United States Patent Application Publication US 2020/0377945 A1 - sequence listing, part 22

SEQ ID NO: 4179 - DNA, 1840 bp, Unknown
  gut microbiota DNA sequence
atttacccctcaggtttttacattgacccgtaattcttaggactgttgctttatggtttcatgctgttcggttttaaggggttagtactaaatttaaaggttttgtttattcatatatgattatcgagtctttgttttcattgatgcggaacttgaacggatgctctttggagatggctctcaagatgtgctctatgccatcctgttccctgaatttgccggtcaggccttcgtgggtcagtagtctggggctggtgacggttatctttacgttgtagtatttttcgagtttgtccaggatgccgctgaagggtacatcatcaaaacagtataatccctctttccagcggagatattcgtacgaggggaggatggttttcttgcagcgtccgtcataattggcaaaaaactcatccttttgaaggcgggtaatcacttggttgttacagcttgggtagatgtctacgataccctccaccaatgttgtttcgaactctttgctgcctttgtatgcgcagacgttaaagctggttccgaccactcttaccttgtgcatttccgtatgtacatagaacggtaattttttgtttttggcaacttcaaaatatgcttcgccgtctaactcgacgttgcggtcattgcggccgaagtcggaagcatatgtaagcgtggattgggcattgagccatacgcgtgtaccgtcggcaagtgtaatttgagcgcgttgcccggcaggaacagtaatggtttgaggctgtgcatccttattatatatataatttgtggtcatgtagtaaccggatacggcaatgatgactgccgctgcaatacgcgccgcccaacggagcgttggcatgagtcgtattgcttttttcttattgtcttgttttgtggaaaacagggatacgtcgaacagcatacgttctttcaggtaggcttcccggttttcttcagaagcttcaacccagtccagaatctgtttctcttcttcaatggatgctgttcctttaaaatatttgtatagtaattcctggttcatcataaatagagttgcttggttaaagagagggactttaccgcctttctgtatatataaccggcgaagtgtggacaaccctatcaaaaaaggaaacttttttctgaaaaaatacttttattgctcagagcagtatggaagccaggtaatctttcaactccaatcgcagtatgcggagggctttggtgatatgcgcttctacggttttcagtgaaacatgcagttgctctgcaatttgtttgttggggagattctggtaacggctcagcatgaaaatagtccggctttgttgtggcatttgctctaaggccttgtgaacgatgtgctgtatttcgttgtcgaatatctgttcgggttcgcaggctttcaaggtggatatacgcaagttgagctcccgctggttatggctgtttatattttcttctgcttgcaggcgtatttttttgtgctctaacagattgagtgacttgtttttgattatggtcaacagcaaggcatgcagattgcttccttctttccaacggttccggttttcccatagggcaatcatggattccattaacacgtcttccgcttccgctttatctctgaggtaggaataagcaaaagtcaggaacttttcttggttctcctggaaaaaacgcgagaaaaggtccatcgtatgtaatttaatggagtcggacattcaaattggagttttttcgtacgatttaaggtttcgtatcacaaagcaacataatctttttgtaatatgcaaacaatacctgttgtttttttgatttccatgggtggggagtgaaaaaa

SEQ ID NO: 4180 - DNA, 2260 bp, Unknown
  gut microbiota DNA sequence
ggaagcaatactttgcgagacagtttgaacttaccggtcttaggatcaatgtcaagcaacttcacatcaatctcgtcaccttccttgattccggcttcttctactgtttccagacgcttccagtcgatttcagaaatatggagcaaaccgtctttgcccggtaagaattcaacgaatgcaccgtaaggcatgatagaacgtactttacctttgtagacttcacctacttccggtactgccacgatacctttaatgatacgcattgcatcgtcgatagacttcttgttggttccggcaatttcaattctaccgatattgtctatttcctcgatagtgattgttgcaccggtttcttcctgcataccctggataatctttccgcccgggccgattactgcaccgatgaattctttaggaatagtcatggtttcgatgcgtggagcatgcggtttcaggtcggcatgcggttcagcgatacattcggtgattttactcagaatgtattcgcggccttctttagcctgtaacaatgctttttcaaggatttcataagacagaccgtctactttgatatccatctgggtagcagtgataccgtcctttgtaccggttaccttgaagtccatatcgccgaggtggtcctcatcaccgaggatgtcggacaatactgcgtatttttcttcgcctgcattcttaatcaatcccattgcaataccggatacgggcttcttgatttttacaccggcatccatcagtgccagcgtaccggcacatacggtagccatggaagatgaaccgtttgattcgagaatatcggatactacacgtactacatacggataatcggcagggatttgtcctttcaaagcacgccatgcaaggtgtccgtgaccgatttcgcgacgacctacaccacgttgtgctttggcttcacccgtagagaacggcgggaagttgtagtgcagtaagaaacgttcttttccatgttccagaacgtcgtcgataattttttcgtccagttttgtacctaaagtaacggtagacaaagactgggtttcaccacgtgtgaagatagcggagccgtgaggaccgggcagataaccgatttcgcaccagataggacggatttcggtagtcttacgtccgtcgagacgcttgccttcatccaggatggaacgacgcatggcttctttttcaacatcgtggtagtagcggtcgataagcggagctttttcttccagttcttcttcgctgaattgtgccttgaattcttcgcggatggcatcgaaagcatccatacgctcatgcttattcttgttaccggaagctgcaattgcataagccttgtcatagcaggcgtcgtgaacagccttgcggagttcttcatcgtttacttcgtggcagtattcgcgttttacggtagaaccgacttcttctgccagttccatctgggccttacattgtatcttgattgcttcgtgagcagctttcatggcttccagcaagtctctttcggaaacttcatccatttcaccttccaccatcatgatgttttcataagtggcgcctaccatcagatccatgtcagccttttccaattgctcaaaagtaggattgataacaaattcgccgttgatacgtgctacgcgtacttcggaaatcggtccgttgaaaggaatatctgaaacagcgagggctgcagaagctgcaagtcctgccagtgcgtccggcatgtcaacgccgtctgctgagaagaggatgatgtttacatatacctctgcgtggaaattgtcggggaataaagggcggagagcacggtctacgaggcggcaggtaagaatttcataatcagaagcacggccttcgcgttttgtaaaacctccggggaaacgtccgaaagcggagaatttttctttgtactctacctgtaacggcatgaaatctgttccgggaactgcgtccttggcggcacaaacagtagctaacagcatggtgttacccatacgaagcattacagaaccgtctgcctgttttgccagctttcccgtttcgagcgtgatggttctgccatcaggaagctcgatcgtcttaacaattgggttaatcataaaaaatgttttatatctatttttctttcaaaatgcttgcaaagatacatattttattcgtgtaatacggtgggaatgagataaaaagtttgtatttagttgttttttgcacttttataagtgtaagaagtgggaaaatgctttgactaacc

SEQ ID NO: 4181 - DNA, 2340 bp, Unknown
  gut microbiota DNA sequence
ataaattccaccgtcataagctaaaacgctatcaatctctatcggtttgaaaacaaacggaaaactcatggaagcgcgtaccgcatctcccaaatctcctctacgcataatcaacggtttcttgttatatacatcggaggcaatacaccggaaaggcacaaacaggcggttaaaatcgccgctgcatgcagccgtagcccgtgcaaatagctccacaaagaccagattcatctgaatgggatttaccatgcttgtaggaagtatctgaggcttgatatgcagcgagtccttaaaggagaaacggatattgaaaaactccggggtcggccggttctgtttgaaataatacccgtattcgggttctacctgtcctgaataccagcgtttgaagtcttcggaacgcaataaagcctccatatcatcgggagagtaccccatagcatagagtgaacctatgatagctcccatagaagtacccgtaatgtagtcgataggaatattgttttcctccaaagcgcgaatgataccgatatgggtcatgcctttcgcacctccgccactcaaaacaagtcctactttctgagcttgcacaaacggcagaagcaataaacagactgacaaaaacaaaaaaaatcttttcatgaatacggtttcgagtgaaatatactaatttattcaatgctcaaatatagacaattgtttccaaaaacctcgtatccaacgaaaaaaaacagacctattacgaaaaaacagacaaaaaaagggcattacaactcatattagctgcaatgccctgttataatagaaatctaaaggggcttatttaatcaaatcgatgcttctctttacaaaattattcaaagcttcacctttcaacatgccattttgaagcaatgccaaatcaataagttgacggacaaccttattctgagcggcatagtcggcaaacaatccatttttccggtttttcaaatcttcccacttcttatccaaatcatttacctcatccttttcggttgtaggaatatcctcatctttcttgccctcctgcttctttttcaattcattacgacgagtatttacatcgtccatttctttttgaatcggagcaacggcagccgcacattccttgtcttcatcagccagaatctcttttaccagcttatggtcggcattcaataccaggttgaacatgtccggcatttcgccatagaaactcattcctgcctggatattagccatttctttcatacgacgcatgtactcgctttgagtaatcatgaccggtgaagcattttcacccaaagcttgagccattacattgaactctgtcttttctatctgcggcaactggctcttgaagataacagagagaacctcctgtttatcggcttccaagacatctttcgccttgtcttccttcactatcagattgtcaacgacatcactgtctacacgggtgaaacgcactttctcgaacttttgctccagcatgcttaccatggcaacatcaagctggccgcccatcaacagcacattatatcccttattcttggcagcctcgatatagctgtattgctcgtctttgttgttggcatacagataaatcagattaccatccttatccgtctggctatcctttatcaaggtcttatactcttcgaaggtataatacttgtcgtccgtatcggaaagaagggcgaaatcctttgctctatcatagaaatcctcttgtgtgagcattccgtagttgatgaagattttcaaatcgttccacttctcttcaaattgcttacggtcgttcttgaatatggattgcaagcggtcggatactttcttcgtaatatatgtagagattttcttcacattggagtcactttgcaaataggaacgggacacgttcagcggaatatccggcgaatcgagtacaccgtgcagcaatgtcagaaagtccggaacaataccctctacagagtccgttacatagacctgattgcaataaagctggattttgttcttgttcaactctatattgctctttaccttcgggaagtacagaataccagtaagatggaacggataatccacgttcagatgtatccagaacaagggttcatcggacatcggatagaggtcgcgatagaacttcttgtaatcctcgtcttttaattcgctgggcttcagcgtccacaacggattagcgttattaatgatgttatcttcggatgtttcaacctgcttgccgtctttccattcttttttcttgccgaatgcaacgggaatagggaggaagctgcaatacttcttcaaaagagaagagatgcgcgcttcttcaaggaa

SEQ ID NO: 4182 - DNA, 1110 bp, Unknown
  gut microbiota DNA sequence
aactgtggtaatgtttttatttacagtttttttaatttcatttttatgaaaaaaaagtattcttttgagtaagtatattttttgtatgaattgtattaataatatcgttctgtaaaaatatgaattatgggatgaagtctatttatgtttaattttaaattttgtttatgaaacacagtcatgttttccatgccccatggttattgcgggcttcattgatgttgttcatgacattttctgttcagtgcttgctagcccaactgaatttgaacacttcccgaacaactttgggaaaggttattgaacaaatcaaatctcagtccagttacaattttttctacgatgacaagctagcatccttggccgtagaaaatgtacaattatccaatgcttccatagaacaggtattaaacactgtgctaaatggaaaaaatgtttccttcaaaattaaaggaggagtagtgtatttgtcggaaaataagcagacacctaaaaatggaaaccaacaaggaaaagagcgtaaaattacaggtcgggtatcagatgatatgggaccgttgatcggtgttaacgtattggtgaaaggtacaaatgttggtgccattacagatatggacggtaactttacgctggtaacgactgaagctaatccggtactccagatttcctatatcgggtatactactcaagaaattgccgttgtggacaatacccctttaaatgtgaagttgtcgagtgatgcacagcaaattgaagaagtggttgttactgctttaggaatcaaacgtgcaacaaaggcactgagttacaatgtgcaggaaatcaagaacgatgacattacccaaaacaaggatgccaactttgtgaatgcattggctggtaaagtggcgggtgtaaatatcaatgcatcttcatctggagtaggcggtatttcaaaagtggtgatgcgcggtacgaaatctattatgcagtcttccaatgcactctatgttattgatggtgttcctatgttctccggacgcaatgcacgtgaatcggaatctgaatttgattcccgtggtactactgacccgattgcagacattaacccagaagatatcgaatcgatgt

SEQ ID NO: 4183 - DNA, 370 bp, Unknown
  gut microbiota DNA sequence
atgactctatattttttatataactgcacactgtggcataactgatggtatatcctttggataacagaaactggtggatatccttcttcagcatgcgctgcttgcgaagccccgtagctaccttaacggcattcttcttcaggcaaaacccgatctcgtccttaatctcttgtgtaaggcggcgagggcggcgtttggaactgtcatacttgggctggacggtaagcaaatcactcaaagcctcttccggattatcagtacggatggctgattcgtattctgaaagaatattgtcaacggtatgacggctgacatgaagttcacgagagatacgccgtttgctataaccgcatactctatacatgtgtat

SEQ ID NO: 4184 - DNA, 670 bp, Unknown
  gut microbiota DNA sequence
cacaccggattatctgaccggaaactacaccggctccagcggaactgtagcttatctggcaaattcggtcactcccccggtaagcgtaggtaccgagcataaaaccgactactggttctatatactccccaacgaagagaccacccgtacggcattggtactggaaggaacgttcaagaaaagtgcaagtgatgcaggaaccaccatctattatccgataatcgtcaacaagagccagaccggaacaaatatcaccggagcttcgggcacgggtacttcaaacattgctcgcaacacgacctatgccatcaaggcaactatcaagaatatagggaccgatgaccccaccggagagataaatcctacttcactcgaactgacagtgagtgtagccgactgggcactgaacatcacgcaggacgtaacattcgaataattacccgaaaccataaacaataatgaaacctatccgcacagccatacttacggcatcatatgcctgccttgcctttctgtacgtatcatgcgtgcgggaagacactggagactgcatgcagtacgaaatacacgtgcgggtagtggatgcggcaggtaatgatctcacccaaagcggtgtactggagaaatcggaagtgtatcttttcggagaaaacggttttgtacgcatggt

SEQ ID NO: 4185 - DNA, 731 bp, Unknown
  gut microbiota DNA sequence
aagtatgagtgtaatccggtatcgaagaacaattcattactctgaacaagtggcaaagttaatactatttcttccgtcctgaaaatttcttgtcctttttagcctccgggaacacaaaagtcgtgttatattccccgtcaaaggcgacaacagcatcgaaactcttgccctgtttgctcttgaaccctttgagcagcttggtatgcccttcggtgagcaggtctttgatttcatcgtcggacagggtgcgtcccgctttcagccggaacacgggcagtccgcactccgtgttgtcgcagcgtaccaccttgccgtagaaccgcatcctgcccgtgccacacttgggacacgcgcagccggagtcacggctgccgaagagcttgtcgcacgagatcagttcggaggttatctcacgtgtgtacgcctctatctccttgcggaaggtgtcgtcggacagttccccgcgctcgatacgcgccagctccttttcccattcgcccgtcatggcaacatcggcgatgcgcatcgtcttgacgacggaattgagggcaagtcctttttcggtgggaacaagcgacttcttgcagcgttccatgtaaccgcgcttgaaaagcgtttcgatgatggaggcgcgtgtggcgggagtaccgatgccacagtccttcatcgcctgccgcagtgcgtcgtcctcaatttccttgcccgccgtttccattgccgagagcagggtg

SEQ ID NO: 4186 - DNA, 2559 bp, Unknown
  gut microbiota DNA sequence
cggtgtcagcgtgtcgccttcctgccagccggggatggtaatttcctctttttcctcgccatagacggcacgccatccggtttgcttcacgacgctgccttttacggtaaactccactccggcacattccgccgtgacagtggtcacatccttgacgcatttctcagagaatgcctcgaccatgcgcccggcaatcatctgatagatggtattgtcctctttggagaggaagagcggtttctcacccgtgacgagcagggcatggtggtctgtcaccttgccgtcgtccacgctgcggcgtgtcggggcggcttttgcccgcaccttgtctttccattcgggctgtgtgccgatgaaagcgagcagtttgggaatttcggcaaacacgtcttcggggatgtagcggcttcccgttctcggataggttatcaacttcttttcgtagagtttctgcgcgatttcaagcgtctgttccgccgtgaagccgtgcttggcgttggcttctttctggagcgtggtcaggtcgtagagcaagggagtttcctccgtcttctccttgcgctcggctttcgtgacagtggcgcaacctgccgcctttaccttattatatagttccatcgccggttctttctctttccatttctcggaggatgagaatttcacgacttcgccgtcgcaaccgtccgttgcgatatggagctgccagaatgcttcggacgtaaagcggcggttctcccagtagcgttcacataccatagccaacgttggtgtctgcacccgccccacggaatacgtgccgtgtccggcggcgatggataacgcctgtgtgccgttgatgcccacgagccagtcggattcgctccgcgctttggcggcgaggtagaggttgtcgtatttgctgccgtcttcgagtttccgcagtccctcgcggatagctttgtcggtgagagagctgatccacaggcgcacgaaaggagtggtgcaacccgtatagtggtagaggtagcggaagataagctctccctcgcgtccggcatcggtcgccacgatgatatgttcgcttgtgtcgaacagtcttttgatgacttttatctgcgacaccacgccgctgtcgggcttgtaacctttctccgtcctgacctgacgggggacgagcgtgaatgtgtcgggaataatcgggaggttgtcacggacaaatccgcgcacgccgtagccgtcgggcatggcaagctgaacgaggtgtccgaatgcccatgtcacggcataaccgcctccctcgaaatatccttcctctctctttgtcgcgcccacgatgcgggcgatttcacgtgccacggagggcttttctgcaatgattgtcttcatgtcttcttcttttttgttgatactttggattttattttggattcagtggcggacacgggattacattttcatgcccttgcccgttttcttctgcggcttctcctgctgctgttgctggcgggcgtccttcgggttggtctgacctttctgcaacggctctctcagattctttgtagcctcgttggtcttgccatcgttgttcaccgccacctgcgtgcggctctcgttggacggagcaacctgctgtgcattgtcagggttcgtgtcgtagcggtacgggcgtcccttctccgggttgaacttgatatacatcgtggcatggaagccctgcttgtcggtcacgttctccagcttcacggctttacccgccacatagtcggctttctgctggtcggtgaagctcacgccgctccatttgctgatggggcggatgctgccgtcctcgttcgtccacgtgttgcggcgttgctccttcttggtctgtgcggcattttccccgccctgcgcctgacttttcgatgtgtcgcctttggtttcctgtgtctgtgcggtacggggcgacttgccggttcccggcacgaactccacgccgcgctgctccacgttcacttgcagggtggtgacgaactttctgccgtcgttgcgctcgatgagcttgtcgcgtacgggcagtccggcgcggagcatgtcccgctcctgcgtggtgatttccgtcttgccgatgcgctccgggatgcgcaccctgcttgccggaatgtccgtgatttcattcgtcttgcggtcgatgctgatgtaggaggggatgatctcgcccgtttccctgtccacaatgtccacgaccctaccgagattgcccgtttcgcggaggttcttccggtcattgtcggagaatttgtgttccttgtactcatccagcttctgctccttgcggatgaagtgcggcacgaggctgatgtttccctcaccgtccttcttgaaggagaggcgggcgtccagctcgaatgattcgccgccgaaggtcggtttgacctttaccaagtcggacttgccatagttgagcatcttcgtaaggtcgccggacttttcaaggttgtcccgctttacgccccatctgtcctccagctcctgccagttgattttactctcgtcgatgggctggtagccacgtttgccctgcatctgttcggatttgtc

SEQ ID NO: 4187 - DNA, 1403 bp, Unknown
  gut microbiota DNA sequence
ccgattgttgaatctgggaggtacagccgtgttcaggaaagacatgtattatacttcgttatattgcgcaatttcgcatagtgctgtatttcagtgtatttactaagtttgcaccaaaacagaacgtatgaaaggaaatacactgaatgtaatgttcttcatcttgaagaacaagttgttgaagaacggtgaagcaccggttgttcttcgggtgacaatcaacggacagcgggatgaaatccgtatccagcgctctataccggtggagttatgggacaatgcgaagatgcgtagcaagggaagggggcggagttcggcagagctgaacatgtatattgagacactgagggacaggatatatgtcatccataggaattctgtgtatgatggggaaagactgactccgaagaaaatcctggatattctctatgccagggaaggacggcatcaggttctgaaggccatgaaggaatgcatagacggatgggcggcttctcccggggatttgcatcctgccaccctggcacgttacaacaggtgtcacggattggtggagacagtcatacgggatgtttacaataaggaggacgtcgcattctccgaactggacaggaagttcatcacggcatttgaaaggtatctgaaggaagcctgtgggctggcccggaatacggcggctaaatatctggagtgtttccgtaaggttctcaaggtggctcagcagaagggctggatggaacatggcaagtttttggaggaactgggacagttgtgcgtaaaggaggagacttacccttcttttctggactgggatgaactgagaacagtgatggaaacagatatgccggccggacgtttggagcgggtgaaggatgtgttcgtcttctgcgctctcaccggactttcctatcaggggataagcaccctttgtccgtcgcacttgtttagggatgacgaaggaacactgtggatttgcaggacacgtgctgaaggagcgaaggttggagacagttgtacaagccgtgttcttcttcttaaaccggcaatggtcctgttggagaaatacaaaggctggaatccgatgaatccggaaggtccgtgttttcctgtcccgtcagtccagaaaatgaatgaatacctgaaagaggtggcagtgcggtgtcggatttccaagcgtctgaccacccagatggcccgcaatacatttgctgcgacagtcaccctggccaaccggattcccaaagaatacgtcagggaaatgcttggctattcttccgactatatgttgcgccattatatgcaggctcaggaaaggaattcctgaaaggtatgaagtggaacatacaataccctgataaagtgaaaggctatactccaacagatgtggtggtatagcctttcca

SEQ ID NO: 4188 - DNA, 498 bp, Unknown
  gut microbiota DNA sequence
ttcggttcttttccagcagtcgtatgatatcgctttcccggtataggatttttcctcctatctggtaataaggcaatatgccgctgcttctgtagtccagcagcgtacgcttgcttagcttgagctttccggctagttccgtatctgtcagatagttttccccgtccaataagtgccggttgtccattggcaaatggtcgatgagatccgatacccttttcatttcatcgaagaaatgaagcacttccttgtctgatctggtgatgattgttcccataatctgtccttttttgtttgaaacaaagatatccgcattcccatgccactgcaaaccgccggagcctgttgtcatcagatttcattaaatgtcatcagatttcatcggaccggattccggcttccagtccttcagcttgttctttaataccttcatgtcctccgtgacttttctgtatgtgattttggcataggcttgtgtaaccctcaaattggtatgta

SEQ ID NO: 4189 - DNA, 1081 bp, Unknown
  gut microbiota DNA sequence
tttctggttcgagatggtcgggaataggtattccgattcgccttttcttatgtaaaaacttgctattttcttggcttggggaaggagagggatgaatgcggggtggttggtcttggtcctgtacagatggatatacatgcttttgtcagaatctgaaatgatttgatcctttctcaaccgacagatgtctgagtaggagatgcctgtgaagcagctgaagatgaatatgtcacggatggaagccagtctaggaatatccagccgcttgcccattatccttattatttcctgcctgttcaggtattgtttctggctttcttccttctttattcggtaagttgagaacggattggtcaggataattccgcaccggtatgcccataggattccttttcttaccatactcatcatcttggctgttgtattgattgatagcctgcagtcagtcctgaagaaaagttctagttcgtgtatcatctgccggttgaactgttccagtggcatatcttgtctgcccatcttcttgcagaattcctcaagccgcctgtagactagtttatgtctgttggaatgggacatgctgatttgtccggcatgtgccagcctgtccgcatcttttacctgtttgtcaaacaactctagaagggaaggcggattggttcctgtggccatgaagcgttgtttcagcatgcttgccgtaagctgttttccttctagttgggcctgtcggtaatgatgctgcaatgtggaacttactttgtccaagtatgcattgatgttgtgtgcttctggattcatgtcggaaacacgcctgttctgtttgtcccaatgctcctgtaggatggacgtcttcagacttacatctgcggccttgttgttgactatgatgcggagcatgattgttgacttgctgtctttttgaagctttctacgtttcagatagaagtagatggaaaaactatgtctcataaaaaataaatattaattgtgtccatatcacagacggatgcataggacacggataagacatagattatggttttgaatggaatgtaattgttgattattaatagttttagat

SEQ ID NO: 4190 - DNA, 569 bp, Unknown
  gut microbiota DNA sequence
cttagccaacagggttgctgcttgttttagccggagattgcgtatcaagtcgcgagtggactggttggtcagttctttcagtttacggtgcatatgaacacggctgatgcctacggtttcggctaccatttcgacattcagttccgggttagctatattgtcattgataactttcataatgcggtctaataggcgttcatccggtgattctatctctaattcctgcatccgttctttttgtgtctggctgccctggaaattgtttctcaatctttctcggctcttgatcaggttaaaagtgctttgccgaagtatttcaatgctgaaaggttttgttatgtaggcatcagcccctatactgagtccttccagattatcttcttcacggcttttggctgtaagcaggataactggaatgtggttggtattgatgttctgtttcacttttgaacagagagtcatgccgtccatttcaggcatcataatgtcactgataattaaatcgggagtttttttgagaatatatgtaaatgcttctttgccgttacggcactcttgcatgtgaaaat

SEQ ID NO: 4191 - DNA, 74878 bp, Unknown
  gut microbiota DNA sequence
aagaagcctatctgcggaccggcatggacgaagaactgcaaacctctgtccttaccgaatgccagatgtgcaaggaagggaatttccagataattcatcttccgcgtgtattgcagttcgggatagtcctcataaaattcgtcccaaccgtgttgggagaagttaagctcgatttgcgcaccgcatatcatgctgaaatacttttcggaaatataacgggcggtcactccgccgttgatacccatcaggttgttctggcggactctgggagagaagcttacgctattcaggttgatgccgccgttgatgcccacggaaaagttatggcgttgttcgcctatctgtgcgcttgccggcaaagcacatgtacctgctaagagtgctgttcctataattgtttttagtttcattttcttcaattgcgaattactgtaaccaaatggctgtaaggcgtttctttaatcaaagtcgagctttatcagttcgaaattcttggtgaagcgtacaaagaacactttccggttgataaatccgccccagttgtttacacgctggaacttgaagccggtctgaatgggaacaaggtccattttgtccaggttcttttcaaatcccgaaccgtagcgcgacagtcctttgaggaagaagtagcccgtgtcgaaacccagcatgccgaatttgggataacgttcgtccatctccttgccataccatttgcggtagctcttggtgaagttaatggctgccggcagcagattgttcgtgtagaacgaggagtagaagtatgtatccagttcgaagaaggcttcaagatggtctttggtgtaagtctgccattccggatagccgaacagatgtatgcggctgtcgggcatctcgcgtaccagcagtgtcagttgcggcagtatcttgatcagtgtgatgttgcttccggaagtggggatgaatatattttcacggtcggcacgcaatacggctttcaaggactccacggtagcatcctctttcagtgattttgtaggtatggaacggttgcgcaactcctctttcaatcccttgatgaagtccgccttctctctggttccctggcttgcctcgataaagataacgttggcgttgggaaactggcgtacaaagtggtcgtacacttccgaataaaggtaggattggggagtattgatttggtataccgacggattgcgaaatacggtattgtctttagacgtaaacggtatcaccagccgtatgtcgtgcttgtcggcaaaatcggccaaaggcttgatgtgctgctggtgcaacgggccgaagataatatccatgtccttcatctcgcttttgccgagtatggagtttagggaggatgtagcaggaccggtactgtaagtataaaggtctatggaagtgcctgtgcgcttcaggctgtctaccgccataaggaatccttcgtaatattccaccattttggcagattcgcttttgcttgccccgtcgggcaggaacggaaggactacggcagccttgatgacattgatgcgcttgctgcttctggtgttttcactgaacagttcgctgtcgctcggtgcggcctgccggggtgtatcctgctgcgttgcagaaggagaggacggataggggatacagaggaacgaacctttctttatcttgttctcgccccgcaattcgggattggcggctatgagttcggcttcggtaatgccgtattcgcggctgatgctgaataccgtttccttgcgttttaccttgtgcatgtcgcggcagcgggattgtaccggggcctgaatggtagtgttgcctgcgggcatgcccgaaagtgcctgcgtgtctgcggtggcggctgccgcatccgtggccgacggaatgcggatgacctgcccgatgcggaagttatccgcgctcagtccggggttggcatcgcatatggctttggcggacacattgtatttcaccgtaagccggtaaagagtttcaccgggagctatggtatggaaagtctccttttgcaaaccggcatccgtacgcggaatgcgcagggtacggcctacatatatcttgtcgtcgcttcccggattcagttttactatatccgcctggctgatgttgtacatgctggcaatggaatacaggctctggcctttttctatcgtatgcagaaagtaagattggttttcttgtgcgcttgttccgaggctgcacgcgccggcaagcagcagggaacaaaaaatacggttaatcgttttcattcagtaatcgttggtttatgtttacaatttcccaaagtagccgcaaagttaacaatattgtcccattttaaccaaaggattgcgttaagaaataatattgtgcatttcaaaaccgaaaaataccgcttttcgactgatattcggtcggaaaccgttatttttgcacaaattcattcattaaaatatgcaagaagaaacagaatatatcaatgtatacggagcgcgtgtacataacctgaaagacatcgatgcggaaattccccgcaacagccttacggtaatcaccgggctgagcggaagcggcaagtcgtccctcgcattcgatacgatatttgccgagggccagcgtcgctatatcgaaacgttttccgcttatgcccgtaactttctgggcaatctggagcgtcccgatgtagataagattaccggtctgagcccggtgatttccatagagcagaagaccaccaataaaaatccgcgttccaccgtgggtacgacaacggagatatacgattatcttcgcctgctgtatgcccgtgccggcgaagcctattcgtatctttccggcgagaaaatggtgaaatataccgaagagcagatactcgagcttatcctgaacgattataaaggaaagcgtatttacatcctcgccccgttggtgcgcaaccgtaagggacactacaaggaacttttcgagcagattcgcaagaaaggctacctctatgtccgtgtggacggcgagatgcgcgaggcattgcccggcatgaaactggaccgttacaagaaccatgacgtggaagtggtaatcgacaaactggtggtggcggataaagacgacacccgcctgaagaacagcgttgccgttgccatgcgtcagggcgacgggctgctgatggtgcttgacgcccaaagcgagagcgtgcgccattacagcaagcgtttgatgtgtcctgtcaccggactgtcctatcgcgagcctgccccccataacttctccttcaattctccgcagggggcgtgtcccaagtgtaaaggtttgggcgtggtgagccagattgatatagacaagattatccccgaccgcgagctttccatcagcgggggagccatcattcctttgggaaaagccaagaacagcatgatattctggcagattgccgcattgctggagaagtatgaagctacgctgaaaactcctgtcagggagctgccggacgatacgatagatgagattctatacggttcggatgagcgtataaagataaaaagctcccttatcggtacgtcttccgactactttgtcacttttgagggagtggtgaagtatatccagatgttgcaggaaaaggatgcgtctgccacggcacagaagtgggcggagcaatttgccaggacggctgtctgtcccgaatgtcacggagcgaagttgaacaaggaagccttgtcattccgtattcacgataaaaacatctacgaactctccacaatggacatcaacgagttgtatgactggctgatgaacgtagaccaatatcttagcaggaaacagcagcagattgcggtagaaatattgaaagaaatccgtacccgcctgaaattcctgctggatgtgggattggattatctgtctctggaccgcagcgccgtcagcctctccggcggcgaaagccaacgtatccggctggctacgcagataggctcgcagttggtgaacgtgctgtatatactggatgagccgagcatcggattgcaccagcgcgataatctgcggcttatccattcgttgaaggagttgcgcgatatgggtaattccgtgattgtggtggagcatgataaagacatgatgcttgccgccgattacgttatagatatgggccccaaggcaggcaggctggggggcgaggtggtatttgccggcactccgcagcagatgttgcggacgcatacgctgacttcccggtatttgaacggcgaatgtgccattgaagtgcctgccgaacggcgcaagggcaacggccatagcctgtggctgcgcggtgcaagaggcaataacctgaaaaatgtggatgtggagttcccgcttggcaaactgatttgtgtaacgggagtatcgggcagcggaaagtccacactgattaatgaaacgcttcagcccatcctttcgcagaagttttaccgttcgcttcaggaccccttggagtatggcagtatcgagggactggagtatatagataaggtggtgaatgtagaccagtcgccgctggggcgtactccgcgctccaatcctgccacgtatacgggagtcttttctgatatccgcaacctgtttgtcggcctgcccgaagccaaaatccgcggatacaaggcgggacgtttctcgttcaatgtaagcggcggacgttgtgaagcctgccagggcaacggctacaaaaccattgagatgaatttcctgcccgatgtatatgttccttgtgaggtttgccatggcaagcgctacaaccgcgaaacgctggaagtgcgcttcaaggggaagtccattgccgacgtactggatatgacgataaatcgtgctgtggaattctttgaaaacgtacctcagatattgaacaagattaaggtaattcaggaggtcggtctggggtatatcaagctggggcagtcttccactacgctctccggtggcgagagccagcgtgtgaagttggccaccgaactctccaagcgggatacgggcaagacgctctatattcttgacgaacctactaccggactgcactttgaggatatccgcgtcctgatgaatgtattgaataaattggtcgataagggcaacacggttatcgttatcgagcataacctcgatgtcatcaaaatggcggattatatcatcgacatgggacccgaaggcggtaagggcgggggagagcttctctcttgcggcacgcccgaagaggtggcgatgagtacgaaaggatataccccgaagttcctgaaagaagaacttcatctttaaaatagtctgaaagaaaaatgacaggtgaaagggcatcggacggcaaaacgtctttctgcaacggaatgcttttcgcctgtctgcaattatagtttgtaatgaaagaaaataaaatcaacaagacaaatgcagctcggctgcttgataaggcaaagattgcctacgagctcattccttatgaggtggatgagaaagatttgagtgccatacacgtggctgccagtttgggagaggatatagagcaggtatttaaaactctgatattgcatggcgataaaaccggttattttgtgtgcgtcattcccggagagcacgaagtagacctgaaattggccgccaaggtgtccggaaacaagaagtgcgaccttattccgatgaaggaactgcttccgctgacggggtatatccgcggcggttgttcgcctatcggcatgaaaaagcctttccctacctatattcacgaaacctgcctgcagttctcctatatctacatcagtgccggacagcgcgggttgcagctcaaactcaatccgaaggatttgataaaggaggtacacgctgaggtttgcaggcttttcgaggcatgaggtgtgtaagcatgagggattatgtgattttaatgctttttccggcacagattgtcatagtgtaattattcacacgctttttccggcttttttcgtgaaagggatattaaaaacctgatttccggcaagagatatttcgttttcttaccggaaatttcgatgaaaagtatatatttgcaaaaaatataaataaactaatactaattactaatttacaaaaacttatttttatgtttagcaagcaccctaatggtttgattgctgccgctttggctaatatgggagagcgtttcggcttctatattatgatggcaatccttacactgtttatctcggcgaagttcgggctgtctgaaacgactaccggatatatctattccgcgttctatgcatctatctatattctggcattggcaggcggtatcattgccgataagactaaaaacttcaaaggcactatccttgccggtctggtgatgatggcggtgggttatctgattattgccattcctactcctacgcctgttcccagcatgggactttacctgggactgacttgtttcggacttctggtcattgctttcggtaacggtctgttcaagggtaatcttcaggcattggtgggtcagatgtacgatgatcccaagtactcaagcctgcgcgactccggtttccagatattctacatgttcattaacatcggcggtttcttcgctccgtggattgctatcggtgtgcgcaactggtggctgaaggtcaacaacttcgactatgatgccactttgcccgaactttgtcaccaattccttaaagagggcgacaagatggctccccaggctatggagaatcttacggctctggcagacaaggttacgctcgacggcagccatgtggctgatatgggtgcgtttgtcaacaactacctggatgtgtttaaccgcggtttccaatacgctttcatggctgccattgttgccatgttgatttcattggtaatctacctggtcaacaagaaccgtttccccgacccggcaaagaaggttgtagctgccaaggaacagaatgctaccgtaagcaaagaagaaatcaagatgagcgcagccgaaatcaaacagcgtatttatgccctgttcgcagtgttcggtgtggtaattttcttctggctgtcgttccaccagaacggttattcgctgacttactttgcacgcgactatgtagacttgagcgtaatcgatattgaccttggctttacccgcatcaagggtgctgaaatattccagtgcgtaaacccgttctttgtggtattcctcactccgtttatcatgtggctgttcggcgcattgaagaaaaaggataaagaaccgtccactccgatgaagattgccatcggtatgggcattgcggcactggcatacgtgttcctgatgatattctcgttcactttgcctgccaaagatgcgttgagcacgatgagtgccgccgaaatcaatgccatccgtgtgactccgtggattatgataggtttgtacttcatccttacggttgccgagttgttcatctcaccgctgggactgtctttcgtgtccaaggttgctccccctcatttgcagggtctgatgcagggttgctggctggctgcaacggcagtaggtaattcgctgcttttcgttggcggtatcctttataccactgttccaatctgggcatgctggttggttttcgtgggtgcaacgggcgcttccatgattgtgatgctctcaatggttaaatggctggagagagtagcgaaataatagagaaaacgtaaaggtcaactttggaattgcagagttgacctttacagttataatgtagccctttagaaacgtaatgtagctctttggaaacgcagtgtagccctttggattccatgatgcggtccgctgcttattcttcgattttcaactgcatgatgtagtcgttcatataatatccgtttcctatcggaaaatctccctctctggatttcttcatccccatgtgctcgtaaaaacctaccgctttgttgttgcggtttacgttcagctccatgatgcacggggcgggatgcacatccctgatgtatttcacagcttcgcgaaacaggaaactcccgcagtgtgcgccctgataataaggaagcacataaatcttttgcaggtgaaacaggtcttttccttgttgctgtacggatacataacccgccgcttcgcactcctcacaggcaatgaggtacacatgcccctcttcttccatctgttggcggatgctctctaaggagtacatccattccatcatatattcgatttgttcttttgaaagaatttctttgtaagtttcgggaaatatctgccaggcgagcttatggattaacccgcaatcggcgcttgttgcttttctgatggtaaacatgttttgctgcgtttatattaatatgatgcaaatatagcatactttgtttcaaacagaaaccaaactgcaattatttgtggcatatcaacgggaattttgcgggtgcgacaggcgcagcccggattgctctccggtcatatatactcttaaataatattaatgtaaggtactttgtaatacaaggtactaagataatacatatatttgtgccatacaaaggatgcaggtatggcattttttgttgtaaatagtcaaaccatttaataacatatacgaattatggacgttaataatgtaaagtcgcagatgcgcaagggcatgcttgaatattgtatcatgctgttgctccataaagagccggcttatgcttcggatattatacagaaactgaaggaagcgcggctcattgtggtggaaggtacgctctatccgctgctcacccgtttgaagaacgatgatttgctgagttacgaatggatagagtccacgcagggaccgcctcgcaaatactataggctgaccgcgaaaggagaggcttttctgggtgagctggaggtgtcctggcgcgaactgagcgatacggtcaatcatattgccaacaattagcatgaagcatgttgggctattgaagagtaatgaaagaataaataaaaaaacatataacgatgaaaaagacattaacggtaaatttaggaggaacggtttttcatatcgatgaagatgcctaccgccttttggataattatttaagcaacctgaagatacatttccgtaaggaagccggtgcagacgagataatcgatgacattgaacgccgtatctccgagctttttacggagaagcttgctgcgggttcgcaggtgattaccattgcctatgtggaagaagtgattgcccgcatgggaaagccggaagaactggagcctgatgcaggagatgccgcttccggaagcggcagttgggacggcagcaaccatgccggcaatacaggtgcaggcgcttccgcaactgcggagaaagtgtctcaccatttctatcgcaatcccgacgataagatgttgggcggtgtggtgagcggattggctgcctattggggttgggacgtgacgatgttgcgtctggtgcttgtaataatcatgattttcggattcaagctcctgatacccgcctatatcatttgctggataatcgttccggaagcccgcacggcagccgagaaactgagtatgcggggcgaggcggttacggtggataatataggcaagacggtgaccggcggttttgagaaggtggcaaacggcgtgaacgattatatgaggtccgacaagcctcgcactttcctgcagaaactgggcgatgccctggttatggtggtggggctgttccttaaaatctgcctggtgatattcgctatcatctgcagtccgctgctgtttgtgttcggagtggtgttcgtagccctgctttttgctgccgtaatggtggccatcggcggtggggcagcacttatctcgatgttccctacttttaatgtagtattgcctgcctctccgttatcggccattgtgatgtatattgcaggtatcctggtagtgggcattccgttggtaagcctcgtttggatgatattcagccagatattcaagtggcagcctatggtttccggcctgaaatggacattggtcattctttggattgtaagtgcgtgtgtctttggcatctgcttcgtaatgcagggagcgacgttcccgatattgggcgtgctggtctgacaatcgggagcatggcataaaaaaaggaagccggcaacatcactgcaacgatgtgccggcttccttttttcatattcttttttatctgctttctttattgttttgcaggcttcagccacttatccagccattcaaagaatgtgcgctgccacagaacgccgttttgcggtttcagcacccagtggttctcatcgggatagataagcagttcggcaggaacaccgcgcattacggcagcgtcaaaggcagccattgcctggttggcaaggatgcggaaatccttttcgccatgaatgcagaggataggggtgtcccacttgtctacgaagaggtggggggagttggcaaacgtacgttgggctgtagcgttgtccttttcccagtatgcgccgcccatatcccagttggcaaaccatttttcctctgtctccaggtactgcatttccatgttgaatataccgtcgtgggcaatgaatgccttgaagcgtttgtcgtgatgtccggcaagccagtaaacggagaagccgccgaagctggcgcctacacaacccaggcggtctttgtcgacaaatggttcttttgccatttcgtcgatggctgtgaagtagtctttcatgcactggccgccgtaatcgccgctgatggcttcattccactccacgccgaagcccggaagaccgcggcggttgggggctacgatgatatagtcgttggcagccataatctggaaattccagcgatagctccagaactggctgacggggctttgaggcccgccctcgcagaagagcagggtggggtacttcttgttcgggtcgaattggggcgggtagataacccaggtcagcatttgtttgccgtcggttgtcgtcatccagcgggcctctactttacccatctccagttggtcatagatttgcttgttctcgaatgtcagttgcttggccttggcgaaagcattgccgttgcgtgtgttgtttacggcatatatctcatctcccatactcatggagtggcgcttggcaatgagcttgtcaccgcaaagggcgagagaggcgtagtcgtgcatgccgtcggtaagccggttcagactgtcattgtcggcaagaccgatgttgtaaatctgcgtttcaccgtgccatacgccgatgaagtatatgctttgcgagtctttgttccacaagaaagcatctacgttggattcgaaggcgcggcttacgaaacgcttctctccggttgcaaggtccatgacgaacaggcggttgaggtctgcctcgtagccgtcgcgttccatgctctgccaggctatgtacttgccgtcgggtgaatattggggattggtatcgtaccctttgttctcttcggtgatgttttccgttttcccggtggcaaggtcatagatgtaaatatcggaattggtggagacagcataggccagtcccgtctttttgcggcaggtataggccactttgtccgaagcagggctccaggccagttgctcgataccgccccagggtttcatcgggctttcgtagggttcgccgtccagaatatcctgtacgttgctgatgccgttgccgtcgaagtctgcaacgaagggatgcggagcggttgtcacccattcgtcccaatgcttgtacatcaagtcggtaacgatgataccggttgccttgggcaggtcgggatgcttgtcggcggtgctctgcacggtttttacctgcgcaatgaaaagcagcttcttcccgtcgggcgagaaagcgaatccttcgatgtctccctcgtaccgggtgagctgtttgcgttccgtaccgtccggattcatctcccacacctggctgctgccgctttcgttgcagaggaaagcgattttcttgccgtctttaatccagacgggttggctttcctgccagctgtcgcgggtgatttgtctgttgctgctgccatcggcattcatgacaaacaactcgttgttgctcttgttttccggtacgctgtaataggctaccgagtaagcaatctgtttctcgtcgggcgatacggctacgctgccgatacggcccattgcccaaagcgcttcgggcgtcatgcgcttaccttcaatctttatatccgatctttcgataagcgttccgttctgtcctgcgtctttggttccgccgcaggatgccaacatcattgctgccgacataaataataggtttgattgtttcatatatgtttgaagatttatttcggtaacgaagataggaaattaatttaaattttcttcagactccatttccctttcttcatgtagaaatagcaaagcaccaggattcctacggaataaacaatttccgatgtccatgcaaatgccacgtccagtttcagataagctacgatgtatgtgatgtagcaggtataaaccaccagtgttatcatctccagggccagggcagtacgcgtgtttccggttcccgatacggactggaaatagacgttggcgggtacgaggaacagataggcggagcaaagtacccaaagcgagggaacggctgcctcttgcagttccggcatatccgtgtacacgctcagtatcagcttggggcacagcgcaaagaacacggcaagcggcaacacgaacgcataggctatgcggatatgctgccgtatcgtaccgggcacgcagtcggtgtgtcctgctccgataaggttgctgacaagcgatccgcaggttgaagcgaatgccatcataaccatgaacattatgcccgatacgttgcggatgatgttggtaacggccagcgaacgttctcccagatgctctacgtaaaggaagagcaggaaccacgtggagagtgacaggaaattctgtaccatcgtccagaaagagacgttgagcatgcgtttgagtatgttccagcggatacccggtattttgtccagtccgtacttgcggatgtcgatacggtgacgggtgtagaggatgaagaatatcaatgacaccaattccgccaacgacgagcctatggcggctccggcaatgccgagctgcggcactccgaattttccgaatatcaggatgtagttgaatacgacattgctcaataccatgacgattgagttcagcgtcagcgttttggtctgtgtcgttcccagaaagaacgcacggaacatcactgccgtaaaggagaaaaagaatccgaagacacgccagttgaggtagctcattgccgcatcgtagatgtgctgggaagagacaagccgtttcaatatcaccggagcgaagctgtaacagagggcaaacataaccgctgccattcccaactggaaatagactccctggtagaagaggttgcctatctctttatattgctgttcgccgttgcgccgtgctatcagaatttgcgctccgatactgaaaccgaatgccaccatgaacattactatgtagaagatacctgcaatggcggatgctcctaattctatctcgcccacgcgtcccaggaaggcagtgtctgtcatgccgatcatctgctccatgagcaggctgatgagaatagggtaggctataagccagatttctttgtaggtgtatttagtctgcatattcgataaataggtttttgggatacattcgataactctttttgggggagactgatatactcgaaaaaaggaaaaggaagccgggcaaagtgcattgtccggcttccttctgaaaaaatatcttgaacggaagtttatttcctgttctgcttttctttcatcatctgctcctgttgcttctgcatagcttcaaggcgggcagcgaagccggtctttttcattttcttcgggtctttcctgttcgcttccagttgtgccagaagcgcttcctcattcgtcattttgcgcatgatgatggtagttaccacactgacaagcgtcgaaatgaagtagtagtagttcagtcccgaaggatagtcgttcaatataaacaggaacataacgggcatcaggtacgacatccatttcatggctgccatttgcgggttggcgccagtgtcctgctgctgcatcataaatttggtgttcaggatattcgttactgtcatcagcaggcagaaaaggctgaggtgactgcccaggaacggaatatggaacgggaaattgatgaacgcatcgtacgtggacaagtcatcggcccacaagaaactttgctggcgcagctcgatggcactcggcacgaacataaacaatgccattagaatggggaactgaatcagcatcggcagacagccgcccatcggactcacgccgtattggctgtaaagcgccatcacttcctgctgtttcttcatggcatcttcctgcttgggatacttcttgcctatttcgtctattttcggtttcagtacacgcattttggcagaggagatgtacgttttccaagttgcgggaaataccactgcttttacaatcaatgtcatcagcagcagaacgatacccatgctcaatccccagctggacagccagtcgaagatgttgatggtgaaccatttgtttatccagcggattaacggccagcccagatataccaggcggttgagctcccacttgttctcgcgtcctttatcgagcgcggtcagcgttttgtagtggttgggaccgaagtagaagaacagttgcgtcggagtcttgccggtcgggtcgaaagcagtgctcatttcggcagagtaatccttgatgtagccgcttccctgtgtctccagctttgagttcagcttcgttttctcaaagttggcatcggcgaggaatacggaagagaagaactggttcttgaaagcaatccagtccaggcgttctgccacttctttctcatcgttcttgccggcagacaggtaatcggttccgtctccggtaattttataggtcaactccgccaggcggttctcatacgtatatcccttttctatctgacgtgcacgctgcgaccattcgatgtctacatagtcggtgtttgccagcttgtttgccatacctacggcgtcaattgtaaagtctaccagataggtgtcattgtgcatggcatacttaaagtcgatatagctggcgctgtctgccgccaaacgcatggttacggtgctgtccgtacggttcaccaccgaaaaatagtagttttccgtctgtatggtttccttcttgttgtagaaaaggaagttcatggaagcatcgttgccgctgaatagggtaacaggtgtctttttgtcctgtcccatatactctttcaacgtagctgacgaaatacgtccgcccttggtggcaactgtcagctctgccagattgttttgtattgtaacctgtgagtcggttccctgaagagcgttgaagaagagagcggtagagtctgccgtctgttcctctttgtcattggccaaggcagcttccgcctttgctttcaggtcagcttcgcgttgttgtacttgggctatggagtcgtaatagcgttgctgtgcagccagttgctccttgctcggacggctcagaaagctgaatccgactaacaggattgctatcaagacaaggcctgtgatggtgtttttatccatttaattaaatatgaattttcaattattaattagtgatgattactttgtttcgttttcaatcgcagcctttacgaaagctacaaatagcggatgcgggtgcagtacggtactgctgtattcggggtggaactgggttccgacaaaccatttcagggcgggtatctctactatctccaccaggtccgattccggattgatgcccgtacactgcatgccggccgcttcatactctgccttatatgcgttgttgaactcatagcggtgacggtggcgctcctgtatgtgttccgtgccataggcctcgtaggctttgctgccttcttgcaatacgcattcgtaagcgcccagacgcatcgtgccgcccatattggtaatagacttctgctcttccatgatgtcgataacgttgtgcggtgtcttttcatccatttcgcgcgaattggcatcagtatatcccagtacgttgcgggcaaattcaatggcaatgcattgcatacccaggcagataccgaatgtcggaatgtcgtgcgtacgcgcatatttgatggctacgaactttccggcaatgccacgttcgccgaagcccggtccgatgagaacgcccgacatgcctttcaatgcttccgctacgttttcgtccgtcagcttctcgctgtttacgaaatctacggataccttgcggtcattgtatgttccggcttgtgaaagggcttcgcggatggatttgtaggcatcctgcaaatcgtacttgcccaccagtgctatgtgtaccggttcggtcgtttctgccttgtgacggcgttcgaggaaagcgcgccacgggcccagtcccggagtatcgcccacgggaagtcccattttcttcaggatggtttcgtccagtccctgagcctgcatcagaataggcacttcgtagatagtaggtgcatcgatgctctgtacaacggctttttcgtctacattgcagaaaagggccactttcttgcgcaaggtgttgctcagctcatgttccgtgcggagtaccagcacatcgggctggataccggcgctttgcaactcttttacggagtgctgggtcggtttggttttcaattcgccggctgctgcaagatagggtacataagtaaggtgtacgcacaaggcgtctttacccagttcccatttcaactggcggatgctttccaagtacggaagagactcgatgtcgcctaccgtaccaccgatttcggtaattacgaaatcgaatttatatttgttgcccaacagctttacattacgcttgatttcatccgtaatgtgagggattacctgaatggtctttcccagataatcgccgcggcgctctttgtcgataacgcttttgtagatacgtccggttgtaatattgttggcctttgtggtctggatacccaggaagcgttcgtagtgccccaggtcgagatcggcttcatggccgtctaccgttacgtagcattctccgtgctcataagggttcagcgtacccgggtcgatattgatatacgggtcgaacttctgaattgttactttataacctcttgcttgcaataatttaccgatggatgacgaaataatacctttgcccaatgaagaggcaacgccaccggtgacgaaaatatactttgtttctcccacagctatactgtttttaaatgttttctctaaaaattaaagcgcaaaattatgaaaaaaaagaggaagtacataacagtttggtgaaaacaattataaaaagtggaatatctgtgcgtaataaggttctgataaactttcactttccaccttttgtaatctgaacattttgatttaattttgcgttcaaatatagattttaagaaaagtatgaggaatagacgtattttaataggattggttgccgcactgctttcttttccggtgatagcccagaatgctgcaaagagtacaagaaagcgggctgcaacggagaatgcggatacattgtcgggtatttggagccagaactggatattgaagctgaaaccctgcgataacgggtatcggttggatacagtctctgtgctgtatgaaaaatatttcggggtgttggattatttgaacgatccggctactcccgaacggtatattgcatacaatccggactattaccgtatgtttgttcccaccacttattattatgctcctatggaacgcctgtcgcaggttggctggactttccagaagccggatacggtacctgcgatgacgaaagagctcttgccgttcgatacattgagcttcttgtcgaaagagaatgcgaatagggttgtggaccgcgtgatgatgaatacgtacgtcaatcgtccggacttggtggtaatgaccgagaaagagattaaaaagaaaaaacttttcaaggacaatatcgaaaaggaaatctcttccaagccttccgtggtgaaactctttgcccaggagaacatggcaagagtgaaagaagaggcggaagtcgtgatacaaaagcccaactggtgggtgaccggtggaaacggttcgttgcagattacgcaaaactatatttccgacaactggtataagggcggtgaaagtacgaactccttgcttgccaacctgcagttgtttgccaactataacgatagggagaaactccagtgggagaatatgctggatgccaagttcggtttcaactcagctccttccgatgagttccacgattacctggtaagtaccgaccagttccgcctttatagcaaattgggtattcaggctgcatccaagtggtattataccattactacggaatttaaaacacagttttgccatagttacaaggcgaatagcgaagagctggtctcagcattctttgcacccgcagattggtcgtccagtatcggtatggactataagctgaaaaaggaaaagtttaacttgtctgtttttatcgctccgctgacctatatgttgcgctatgtgggcaataaagaggtggacgaagtgaagttcggtctggacgagggtaagtgcgtcaagcataatttcggttctcaaatacagcctacgctttcgtggactatcataccttctatcgttctggattcacggttggacttccagaccagttacgagtggacacgtattgaatgggaaaacaccattaattttgtgctgaaccgttatctctccaccaaactttatgtgcatgcccgttttgatgacagtgccaaaccgaccgaaggcgacagctattttcaggtgaaggaattgttgagcttcggtatcaattacaaatggtaaccatatctgttgcgaatgattaaagggggcgctccgctgacagcggggcgctctttttggtttttcagaagaaaaaatagcgaaaaactgcgaaaaataggaaaaagagcgtttacgtacacagaaaaagcagtctaatcccttgcagttcgcaaataatgcgtaaatttgccgcgatttgtaatgcacactttgcaaaatggcggatactataagacatcagggtattgtggaaaacataaacggcactcatcttcaggtgaggattgttcaaacttcagcatgtgcttcatgcagtatcaagggacattgcagttctgccgatacaaaagaaaagcttatcgatgttatagatgaaagttcttcttatcagcccggcgaccgtgtatgggttgtcggagaattgtctatgggggtaatggcggttttgcttgcgtttgtgtttccttttcttgttttaatcttttccctttttgcttttatggctatgtggcacgacgaactggtctctgcactgtgttcgttagggctccttataccttattattatatattgtggctgaacaagtcgcgattgggaaagaaattctctttctcgattaaaccgatgaactaactaatacataaaacaaataattaataaacaactaatttatgaatgtaattctgattgcagtaatttcattgggggccatagcgctggttgcggcggttattctttacgtggcttccaagaaatttgccgtgtatgaagatccgcgaattgcacaagtggcagccgtgctgcctcaagcaaactgcggtggatgtggttacccgggttgtagcggatttgccgatgcttgcgtcaaggcaggttcgttggaaggtaaactttgtccggtgggcggacagcctgtcatgacgaaagttgccgaaatcctgggattggatgctgctgctgccgaaccgatggttgcagtggtaagatgtaacggaacgtgtgccaaccgccctcgtgtcaatcaatacgacggtgcgaagagctgtgctatcgcagcttctctttacggtggcgaaacgggatgcagctttggctgtttgggatgtggcgactgtgtgtctgcctgccagttcggtgctatccgcatgaatcccgaaaccgggcttcccgaggtggacgaaagcaagtgtactgcttgcggcgcatgtgccaaggcttgtccgagaaatattatcgaaatccgtccgcaaggcaagaaatcccgccgcgtttatgtgcagtgcgtcaacaaggataagggtgctgtagcccgtaaggcctgtaccgtagcctgtatcggctgtggcaagtgtgtaaaggtatgtccgttcgaggcaattacgctggagaacaatctggcatacatcgatccgaacaaatgtaagtcttgccgtaaatgcgaagaagtttgtccgcaaggtacgataatcgccctcaatttcccgccgcgtaaaccgaaagcagaaggagaggccgttgcttccaaggttgtagagccggtgaagaaagttgcggaagctgcgaagaagccggtggaaactcctgcaaagcccgcagaagctcctaaaaaagcagcggaaacttcccaagcttctgaaactgctgctgctccggaaactccgaaaactgaagcataatattaaaagaaattaaacgactaaaaatacagaattgtatgttgaagacattttcaatcggtggagttcatccacacgaaaataaactttcagcacatcagcctatcgtacaggcagagattccggcaaaagccgttatcttgttgagccagcatatcggtgctcctgcaaagcctatcgttgctaaaggtgatgttgtgaaagtaggtacaaagattgccgaacccggcggcttcgtatcagcggctatccattcgtctgtcagcggaaaggtcgcaaaaatcgacactatcgtcgatgccagcggatacgccaaaccggctgtattcattgatgtagagggggatgagtgggaagagaccatagaccgtaccgatacattggtaaaagagtgcaatctcacagccgaggaaatcgtgaagaagattgcggatgccggtatcgtaggtttgggaggcgcttgttttcctacacaggtgaagttgtgcccgccgcctgcattcaaggcggaatgtgtcataatcaatgccgtggagtgcgagccgtatcttactgccgaccaccagttgatgctggagcatgccgaagaaatcatggtaggtgtttctatcctgatgaaagccgttaaggtaaacaaggcattcatcggcattgagaataataagcccgatgctatccagctgatgacgaaagtagctgccggctatgccggtatcgaggttgtgcccttgaaagtgcagtacccgcaaggcggtgaaaagcagttgatagacgctgttatcagtcgccaggttgctgccggtgcattgcctatctccacgggtgccgttgtacagaatgtaggtactgcatttgccgtatatcaggctgttcagaagaataaaccgctgtttgagcgtgtcattaccgttaccggcaagtctttgtccaagccttccaacttcctggcacgtatcggtacgccgatgaagcagttgattgacgcttgcggcggtctgcccgaagatacgggcaagattatcggcggcggtccgatgatgggtaaggcgctggtaaatacggatgtgccgactgcgaaaggcagttccggcatcctgattatgaacgataaggaagccaagcgcggtgaggtgcagccatgtatccgttgcgccaaatgtgtgagtgcctgtcctatggggctggaaccctacttgcttgctaccgtatcggctcacggcgattttgaaagagtagagaaagaagatgtcatgtcgtgtatcgagtgtggctcatgccagttcacttgtccttccaaccgtccgttgctggactatatccgtttgggtaagggtaaggtaggagcgatgatacgtgcacgtcaggtaaaaaaatgaaagaattgatttagtataatcttatgaataaattaatcgtatccctttcgccccacgttcacggcggtgacagcgtgcagaagaatatgtacggcgtgctgatagcattgattcctgcatttcttgtatcgctttactttttcggactgggcgcgctgattgttacggctacttccgtagcagcctgtctgttctttgaatgggctatcggcaaatttctgatgaagaaagaaaccacaaccatctgtgacggttccgctattatcaccggtgtgttgctggcattcaacttaccttccaatcttcctgtctggattatcattctgggcgccttgtttgctatcggtgtaggcaagatgtctttcggaggtttgggttgtaatccttttaacccggcattggcgggacgtgtgttcctgttgctgtcgttccctgtgcagatgaccacatggcctgccgtaggacaactgaccgcttacacggatgccactacggctgctacaccgttggctataatgaaaggtgtaatcagcggtgctccgggcatgtctttgagcgaccttccctcatctttcaacttgctgatcggtaataacggcggttgtctgggtgaagtcagcgcattggccctgctgttgggactggcctatatgttgtggaagaagattattacatggcacattcccgtatccattttggctacggtattcgttttctccggcatcatgtattgggttaatccggaaatctatgtatctccggtggtgcaactgctgtccggtggtctgatgctgggtgctatcttcatggctacggattatgtaacttctccgatgagccataagggaatgctgatttacggcgtatgtatcggtctgctcacagtcatcatccgtctgttcggtgcatatcccgaaggtatgtcgttcgctattctgattatgaatgcgtttactccgcttatcaacacatatgttaaacctaaacgctttggggaggtagcgaagaagaaatgaaaaagttagaatcatccttaaagaatatgttgctggtgcttacgggagttactgcgatatccgtagcattgctggcttatgtaaatgaactgacgaaagaacctattgcgcaggccaatgccaagacgttgagcgatgctgtcagcgccgtggttccgggttttgacaatgacccgattgctgaaaaaaagactcaggaggtaaacggtgtccaatacgctgtgtatcccgccactaaagaaggcaaattcatcggtgctgctgttgaagcgacttccatgggctttggcggtgagctgaaggtattggtaggcttcgatgccgaaggcaagattatcgattactcgctgctgtcgcatgtggagactccgggattgggctccaaggctgccgactggttcaagaagggaaacaagggagatattacaggtatgaatcccggtgaagcttctctgactgtaagcaaggacggcggtaaggtagatgccattacagcttcaaccattacttcacgcgcattcctgaatgccgtaaacgttgcatatgctgcctatgcaggtcagaataccgctgacggcgctacgggagctactcaaaagaatgtggaagaggctgccggagcaaatacggctacgggagctactattaaagttgaactcactgattctgtcagtgctaaataagaaaggagtagagatatgaataattttaaagtattgatgaacgggattgtaaaagagaatcctacgtttgtactcctgcttggtatgtgtcctacattgggtacgacttcatctgctatcaacggcatgggtatgggactggcaacgatgttcgtgcttatctgttccaatgtggtgatttccgctatcaagaaccttattccggatatggtgcgtattccttctttcattgttgtaatcgcatcgttcgtaacactgctgcaaatggtgatgcaggcttacgttcccgcactttatgcgacactgggcttgtttattccgctgattgtggtgaactgtatcgtactgggccgcgccgaggcttttgctgccaaaaataatccggtggcatctttcttcgacggtttgggtatgggattaggttttactatcgcattgactttattgggtgctgtccgcgaattcctgggcacaggcaagatattcaacctcacgattcttcccgaagaatacggtatgctggtatttgttcttgcaccgggtgcgtttatagctttgggatacctcattgcgttggttaacagcttcaagaaagcataatttgtaattcataattagaattgatattatggaatatatattgatatttatctcggcaatctttgtcaataacattgtgttgtcgcaattcctgggtatctgtccgtttctgggcgtatccaagaaagtggagacggcgttaggcatgtcggcagcagtggcattcgtgcttactattgctacaatcgtaacgttcctcattcagaagtttgtgctcgatgctttcggtctgggctatcttcaaaccatcacctttatccttgtgattgccgcattggtgcagatggtggagattatcctgaaaaaagtatctccttctttataccaggctttaggtgtgttcttgcctctgattacaacgaactgctgtattctcggtgtggctatcctcgttatccagaaagattatgatttgctgaccggtgtggtttatgcattctctacggctatcggcttcggtctggcgctgacgctctttgcaggtctgcgcgaacagatgagtctggtgaacgtgccgaagggcatgcagggaactccgatagctttgattactgccggtttgctggctatggcattcatgggcttctccggcgtagttaagctctaagatatactctgaatttaagctaaagcgaagaaccggttctctttgtaaaagaagagggcggtttcttcgctttgtcttttatgggcaaagttatcgtacacggtcaggggtgaatattctttggttaatttttaccggtcatgtacgtgctttatgaatttatttccttacatttgtagcctaatgataacctaaaagctaaattatctatattaatatgaaagagaaaatcttggttacaggcggaaccggctatattggttctcatactgtggtagaacttcagaacgcaggttatgaagtcgttattatcgataatctgtcaaactccagcgcagatgttgtagacaacattgaaaaggtatcgggcatccgtcctgcattcgagaaattggattgtctggattacgccggtctcgacgctgtgtttgctaaatataaaggtatcaaggctattatccattttgcggcaagcaaggcggtgggagagtctgtggaaaagccgttgctttattaccgcaacaacttggtttccttgataaacctgctcgaactgatgcctaagcatggagtagagggcattgtattctcttcttcctgtaccgtatatggccagcccgaccatcttcccgtaacggaagaggctcctatcaagaaggcggaatccccgtacggaaatacgaagcaaatcaacgaagagattgttcgtgatacggttgcttccggtgctcccatcaatgcgattctgctgcgttacttcaacccgattggcgcccatccttcggcactgctcggtgaattgcctaacggtgtgccgcagaatctgataccgtacctcacccagacggctatcggtatccgtgagaaattgagtgtattcggtgacgattacgatactcctgacggttcctgtatccgcgatttcatcaatgtggtggatttggcaaaggctcatgttgtagctatccgccgtattctggagaagaaacagaaggagaaagtggaagtgttcaatatcggtaccggacgcggtctttccgtattggaattgatcaatgcgtttgaaaaggcaaccggtgtgaagctgaactaccagattgtaggtcgtcgtgccggagacatagtaaaggtgtgggccgacccgaaactggcaaacgaagagctgggctggaaagcggaagtaggtattgaagatactttacgctctgcatggaactggcagttgaagcttcgtgagagaggcattcaataagaataaagattttgaactttttaacatacagaaaataaacaaatgcttccccgcatttgtttattacatgcaaatcggcctgacgctgcttatgtatatgtgaatatccgtaattagtacatatgcctccccggcatagacaggtaagattgcatagtagttttgtcgtgttttattttgtgtttgtgttgtgaataagccttgtcgcgagacagggcttattttttaggagaatacggatggctttttatgattaggtgcattaccgattgttaaccaacgttattatgtgtggaacaaattgttcccattgtagtattaatcgttcaaaatagtgtaatttatagaaaaaaagcttttaaggagaacaattagacgtgatttgtttatacatttgcgaagttgtttatgtaactattttgaatgaacaaacagtctggcgcgaatgttagtagagcaagtgaatttggacgatgaaagacgcgacatgactgatggaagattccatgcagcgacttacaattttactggaaataattaggaaaatagaatataaaaagattgcttatgtcacagattgttggacatatctctcaggttatcggacctgttgtagacgtctattttgaaggaacagaggcagagctgatgctgccaagcattcacgacgcactggaaataagaaagaatcacggtaaaaggctgattgtagaagtacagcagcacattggtgaaaataccgtaagaaccgtagctatggatagtacggatggtctgcagagaggcatgaaagtttacccgttgggcggaccgatcactatgccgataggagagcaaattaaaggccgtctgatgaatgtcgtaggagactctatcgacggaatgaaagaactggaccgtactggtgcttatcctatccaccgcgaaccccctaaatttgaagatttgactaccgtacaagaggtactctatacgggtatcaaggttatcgacctgctggagccatacagtaagggcggtaagatcggtctgttcggtggtgcgggtgtaggcaagactgtactcatccaggagttaatcaataatatcgccaagaagcagaacggtttttccgtgtttgccggagtgggagagcgtacccgtgaaggtaacgacctgctgagggagatgattgaatccggtgtaatccgctatggcgaagagtttaagaaaggaatggaagaaggtcattgggatctttccaaagtggactataacgaagtggccaaatcgcaggtatccctgatattcggtcagatgaacgagccaccgggtgcgcgtcagtcggtggcgttgtccggtttgacggtagccgaatctttccgtgacatggggtctgaaacgaacggtccgcgcgatatattgttcttcattgataatatattccgtttcacccaggccggttccgaggtgtctgccctgttgggacgtatgccttcggccgtaggttatcagcctacacttgcaacggaaatgggtgctatgcaggaacgcattacttctacacgcaacggttccatcacttccgtacaggcagtatatgttcctgccgatgacctgactgaccctgcacccgccactactttcacgcacttggatgcaacaacggtattgagccgtaagattaccgaacttggcatctatccggctgtcgacccgttggagtccacctctcgtattctcgacccgcatatcgtaggtcaggagcattacgaagtagcccagcgcgtaaagcagattctccaacgcaacaaggagttgcaggatattatctctatcctcggtatggaagaactttcggatgccgaccgcacattggtgaatcgtgcccgccgtgtacaacgtttcttgtcacagccttttgctgtggccgaacagttcaccggagttcccggtacaatggtctctatagaagataccattaaagggtttaagatgattctggacggtgaagtcgattatctgcccgaaccggctttcctgaatgtcggcactatcgaggaagcaatagagaaaggaaagaaattgctggaacaggcaaagaaataaaaattcagtagactataaagatgaaaggactgcatttggatattgtatcgccggaaaaggaaatcttcacaggcgaagtagatagtgtaacattgccgggtacgcttggctcgtttactattctggtgcaacatgcacccattgtatcgtcgttgaaggcaggtacgctggcttatgtaacgaaagacggcgaagaacgtgcactggatattcatggcggttttgtagagatgaacagcaacagagtttcggtttgtatagactgactctttttgattaccaaccttaaatcggattgatgtgagtataacaaaacggaactatttgtggcaagtggcgcttctaacggtattggtgggcggcataggcggatgggtttattattcggtattcccgcaccactatttcggcggttatccgctgatacctgccttcttccttgttttcggcgtgtttatgataaacatggttgaaagctgccgttaccggatgccggggcggatgttgcagatatacctgctgatgcgtgttatgcggatgcttgcatctatcattgtgatgctggtgtattgcgttgcagtgcgtgaggaagcaaaagagttcctgttgacgttcatcgctaactatctgatatatttgacttatgactcctggtttttcttcacttttgaaatgaaccggaagctgaaaaagaaaaagagacaagaaaatgaaacaattgcgtaacatactaaccggagtattgctggcatgtgggttgtcattacctgccgtttctatgcaggccgacagtattcccgcagcgcaaaacggccttgtggccgaactcgacagcatggcccaacgtgacgatgtgactcctgccgagcaagaggagaatacggtagacgtaaaggaaatcgtgttcgggcatatcggcgattcgtacgaatggcacatcaccgatttcggagaaacgaaggttatcattccgttgcccgtcattgtatatagcggcacaacggggtggcacgtattcctttcttcccgtctggaagagaacggaggctgttacgagggactttccattgctccggaaggcagcaagtacgaaggaaagctggtggagcacgatgcagcaggcaatgaggtgcgtccgtgggatatatccattacgaaggttacgctggcattgctcatcaacagtgtattattgataatcattgtgctgagcgttgcccgctggtatcgcaggcatcctcaggacagtgcggctccgggcggtttcgtcgggtttatggagatgttcattatgatggtgaatgatgatgtcataaagagctgtgtaggaccgaagtaccgtaagtttgccccttacttgcttactgcgttcttctttatcttcataaacaaccttatgggattgattccggtatttccgggcggggcaaatgtcaccggtaacattgcaattacaatggtgctggccgtgtgcacattccttgccgttaatattttcggaaccaagacatattggaaagatattttctggcccgatgtgccctggtggttgaaagtgcctgtgcccatgatgccgtttatcgagttcttcggaatctttacgaagccgtttgccttgatgatacgtctttttgccaatatgctggcaggacacatggcaatgctggtgcttacgtgcctgatattcatatcggcaagtatgggacctgccttgaacggttcgctgacggtagcttcggtgctgttcaatatctttatgaacggattggaattgctggtggcctttatccaggcgtatgtatttaccatgctgtcggcggtgtttatcggtctggcacaggaagagcacacggagaaagccggtgagaagaaggcaataaaatgagaaaatgataagattatctggaatataaacattaataaaataacaatttaaaatttgaaagttatgttactatctgtattattgcaagctgctgcggcaggtgttggagttagtaaattgggcgctgccctgggtgctggtttggctgttatcggtgcaggtatgggtattggcaagattggtagttctgccatggaagccattgcacgccagccggaagcatcgggagatattcgtatgaacatgattattgccgctgccttgattgaaggtgttgcattgttggcggttgttgtgtgtctgttggtattcttcttataaaaaaaataaattatgtcattgttattacctgatagtggtctgctgttctggatgctcctttcattcggcgtggtttttgtggtactggccaaatacggctttcccgtcattacgaaaatggtggaagagcgtagggcctacatagaccagtcgctggaagtggcacgtcaggcaaacgcccagctcgccaaactgaaagaggagagtgatgcgttgattgctgctgcaaacaaggagcaggggcgcatcatgcgggaagcaatgcacgagcgtgacaagattattgtcgaggcgcgtaaacatgccgaagcccttgcacagaaagagctggatgatgtgaaacagcagattcagcaagagaaggaagaagctatccgtgatatccgccgtcaggttgctgtactatcggtagatattgcggagaagataatccgtcataatctggacaaagagcaagaccagatggaaatgattgaccgtatgctggatgaaatgctgacggccaatcgctaatcattaatctttggaaaaatggatataggaattgtttcgatgcggtatgcaaaggctctcatggagtatgccaagagcacgggtacggaagacaggctgtatacggaaatgcgcacgttgagcaggagtttcgagaagcattctgatttgcgtgcggcattggagaaccctgtactgccggtacaggagaaattctcgcttatctgtaccgcagcagtgggggatgctcctgccgggcaggaattgtcccgtttcgttacgctgatattaaaaaacaggcgtgaggcatttctgcaatatatctgtttgagctatctggacttatacagaaagagcagacatatcggtgtagcgaaactgacgactgccgtacccgtaagtcgtgagatttgggaacgcatccgaaatagcgcttcccatttgctacatgccaaaatggagttacagaccgatgttgacccttcaatcgaaggcggattcatattcgacatcaacgatttccgtctggatgccagtattgctacccagctaaagagagtgaaacagcagttcattgataagaacagaagaattgtataacagtggttagtgatataaccgaataccgatcattaatcactaaacattaattgctaaataaaatgttgtctgaaaatataaaagtaagcgaagtatccgatattctgcgcaaacagttggaaggcatcgacacccgcgtgcaactggacgaaatcggtacggtgctgcaagtcagcgatggcgtggcgcgtatctacgggttgcgtaatgccgaagcgaacgagttgctggagtttgacaacggtatcaaagccatcgtgatgaaccttgaagaagataacgtaggtgctgtgttgttaggccctacggataaaatcaaggaaggcttcgtggtgaaacgtaccaagcgtattgcttccattatggtaggcgagggtatgttgggacgtgttatcgacccgttgggcgaaccgttggacggcaaagggctgataggcggcgagctttgcgaaatgccgttggagcgtaaagctccgggcgttatttaccgtcagccggtaaaccagccgttgcagaccggtctgaaggctgtcgatgccatgattcctatcggccgcgggcagcgtgagctgattatcggcgaccgtcagacgggtaagaccgcgattgccatcgataccatcattaaccagcgtgccaactacgaggcaggcgaccccgtatactgtatctacgtagctatcggccagaaaggttctacggtagcatctatcgtaaatacactgcgcgagaacggtgcgatggattacaccatcgttgtggcagctacggcgggcgacccggctgcgttgcagtattacgccccgtttgccggtgctgcaatcggcgagtatttccgcgataccggccgtcatgcgctggttgtctatgacgacctgtccaagcaggccgtagcgtatcgtgaggtatccttgattttgcgccgtccgtccggacgtgaagcctatccgggcgacatcttctacctgcactcccgtctgctggagcgtgcggcgaagattatcaaccaggaagaagtggcacgcgagatgaacgacctgcccgaaagcctgaaaggcagagtgaagggcggtggttcattgacggcgcttcccattatcgaaacgcaggcaggcgacgtgtcggcttacatccctacaaacgtaatctccattaccgacggacagatattcctcgacaccaaccttttcaatcagggcaaccgtccggctatcgacgtaggtatctccgtgagccgtgtaggcggtaacgcccagattaaggcaatgaagaaggtggcgggtacgttgaagatagaccaggcacagtatcgcgaactggaagcatttaccaagttcagcggcgatatggacccggttactgcgctcaccatcgacaagggccagaagaatacccgtttgctggtacagccccagtacagtccgatgcctgtagagaagcagattgccattctttattgcggcacgcacggtttgctgaaggatgtgcctttggacaaggtgaatgagtttgaacgcagtttcctcgaattccttgaaagagattatcagatggaggtgctcgatgtgttgaagtcgggtgtcatcgatgacaatgtctgcaagaagatagaagagacggcggcaaaggcagccaagcaatttatgtagatggcagttaggcaacccctaaccgctaatcactaacccctaatcactatatgaaatggcttcactgaaagaggtaaaaaatagaataagctccgtcaagagtacgcgtcagataacttcggcgatgaagatggtggcgtccgccaagctgcataaggcacaggggcggattgagaatatgctgccctatcaacggaagctgaacgagattctgacaaacttcctgagtacggatgttacggtagagtctccctataccgaggagcgtccggtagggaaggtggcaattgtggcattctcgtccaattcatctttatgcggcgctttcaactccaacgtggcaaagatgctggagcgtacactggaagactaccggtcgctgggcaaggagaatatcctggtgtatcccgtaggcaagaaagtggaagaagctgtaaagaaattgggatatgagccgcaaggcagttatcaggaaatggccgacaagccttcgtatgtgcaggcttacgagcttgccgggcgcctgatgaaagagtttcttgaagggcgcatcgacaaggtggagctgatttatcatcatttcaagtctatgggctcgcaggtgctgacgagagacaactatctgcccatcgacttgggcaaggtagccgaagaagcaaccgggactgtcggaaaaagcagtttcaacaatgattatattgtagagccctctgcttcccaactggtggccgagcttcttcctaaagtgttgagccagaagatttatacggtcttgttggattcgaacacttccgagcacgcggcacgtatgcttgccatgcaggctgccacggacaatgccaatgagctgattcaggatttgacgaagcaatacaacaagagccgccagcaggcgattacgaatgagctgctggacatcattggcggaagtatgaaataatttttccggcaggaaacaaggagatgtgtcaaaatacacttgacggtttcttttaggcacggattacacggaaaacacggatttcacagattttctttattctttttctgtgaaatccgtgttttccgtgtaatccgtgcctaaaaaagaaaccaatagtaagcggactttagttttgacacacattctctttttttaaggatgccgtccgtgcggcaaaaaacattcggccggtttttcttttccttggtttatttgtactacctttaccgttctaaaataaaccgaaaagaacaatggagcagaaccccgaatcagcgcttgcgtggcaattcatcgaaagcacaggtactcatctttttctgacaggcaaagccggaaccggtaaaaccacttttttgcgcaagcttaagcaggaaagtcccaaacgtatggtagtcgttgcgcccaccggcatagcggccatcaatgccgggggtgttaccatccattcgttctttcagattccgttcgcaccttatgtgcccgaaagctcgttcagtacgaatggaaaggcaagctaccgcttccgtttcggtaaggagaaaatcaatatcatacgcagcatggatctgctggtgattgatgaaatcagtatggtacgcgccgacctgctggatgcggtagatgaaatgctccgccgctaccgcgacccctacaaaccgtttggcggtgtgcagttgctgatgattggcgacctgcagcagctggctcccgtagtgaaagacgaggaatggcagatgctcagcaagtactacgacactccctatttcttctccagccgcgcgctgaagcagacggaatattgcaccatcgagcttaagaccgtataccggcagaatgacggagacttcctggaactgctgaaccgcatccgtgagaaccattgcgacccgcaggtgctggaaacgctgaaccgccgctacatccccggtttccagcctcggaaagaggaaggatatatccgtctggtcacccataactatcaggcgcagcgtatcaacagctacgagctggaacagcttccgggacgttcctatgcgtttcgtgctactgtcgaggggaagtttcccgaatattcataccccacggacgaagttctcgaactgaaagaaggcgctcaggtgatgttcgtgaagaacgactcttccggcgagcaccgctactacaacggtatgattggtgaggtaacctccgtttctgccggcagtatcgaggtacgcgccaaagacagcggggatacttttctgttgcaggaagaggagtggacgaatgcaaaatacgtcttggacgaagacagcagggagattgtagaagatattgaaggtactttccggcagtttcccctgaaactggcgtgggccattacaatccacaagagtcaggggcttacgtttgaacgtgccattatcgacgccagcgcatcctttgcacatgggcagacgtatgtggcactgagccgttgcaagacgctggaaggcctggtgctcagcgcaccgctttcggcaaaggctgttatcagcgaccgtgccgtagaccggtttacggaagaagcccgccggaacgaaccggacgaaaaccgcttccattcactgcaacgtgcctattttcacgggctgctgtcggaactgtttgatttcctgccgctggcacaagcgttgcagcgctatgtacggctggtcgatgaacatctttataaactctatcccaagcagcttgccgcctacaaagaggcggtggagcgtttccgcgaaaaggtggtaaaagtggcgcagaggttcggcatacagtacaaccgcctgattgacgccgcacaggattatgctgcggacgaaaccctgcaggagcggattgttgcgggagccggttactttaaagatgaaatggcgcttttgtatcccgtattgatagggccacgcgctcttgccacggataataaggtgctgaagaagcaactgaatgcagccaaagaggaactgaatacacttttcctgttgaaagacgggctgctggcatacataacggaacacggattccgcacagccgggtatttgaagcggaaagccatactgtctatcggcgagcatgctgtctccggcaaagaggacttgaagcggagaagcatgccggatacggtggagaagaacatgcaagaccgcaagaggaaagaaacgatggcatcttccgttcaagtgccctcggacgtactgcatcccgaactatacgaccgcctggtggcttggagaaatacggaagcagcccgtttggggctgccggtctacacggtcatccagcaaaaggccattttgggcatcagcaacctgttgcctgccgataaggacatgcttgtccgcatcccttatttcgggaagaaaggggtagagaagtacggagacaccattctggaaatagtatatgcgtactgcaaggagaaaggattggcagagccggagcttatgctttagtatggtcgaaccgctgtatctgattatatcagtctgtgatgtttacggttagaacggcgtccggttgccctgctgtacttcgatgcgtatgccgaatgcaccgttggcggatttcatttcaaatgctcccttgaagttgttcttctcccacggcaatgccgaacggttgggaactttccagccgtccttgtcgtactcgccgtatgtattgatacgcattccgttcttcagtttgaagctgcccatttgcaggttctccggcgatgaccagaagcccgtcagcccaaacggattcatgctgtaaacggtggcgttggtgagcgagaacacatttgaaagcccctgcgagtaggtcgcgtccgggttgagacggaatatccggctgtagtctttgcttgcatccggtatttccaacgtaaaccggggcaggcggggagcttccattctcatgaggctcatgtccaggagaaagccgtcataattcttcgtttcgggtaggaatgtcccttcgggcggcgtaccgtcgggcaggctatgggagcgtatgctgtcgcccttcgcttcggtttgggcgtgcagtgaaacgacgcttgccagtagggcgatgataaaaaaacaaacttgtttcatgattgggcacggttattgttttcttctcagacaaagataatcctttccgtcaattttctgaaacttctttatattatttcttattctttatactatcagtttatagcctatcccccgcacgtttacgatgcgtatgcggtcgtcttgcgccagcttgtggcgcagcttcgttatgaatacatgcaggctgcgggagttgaagaagctgtcgtctccccaaaggtcgagcagtacattctgggtattgaccacctgattgcggttctcgcagaggcgcttcagtatttccgattcgcggtgtgagagttccatttccgtatcggcgtgcggagcagcaccggttcctgtatacgacagccgttgtgtgacggggttgaaccggtaattgcctatttcaaagtcggtggcctctttgggagcaggttccgtaaagttgaaagccttgcccgccagcgatttgatacggataatcagttcctgcatgccgaaaggtttcttcagataatcgttggcgccgagttcaaagccctctacaacgtcattgatggcagagcgtgcagtgaggaaaagcaccggcgtgtgcttgtcggtctggcggatgcggcgtaccatttcgaagccgtccatacggggcatcatgacgtctgccaccagcacatcggggcgcaggtcgaagaacaggcgcaacccctcttcgccgtcggcagcggtgtggataatgaaactttgcccttccagcgtgtcctttataatcatggcgagggtctcttcatcctcaaccagcaatacttttattttatccatgacatccttgtctttcttgttattcttgtttattatgtaatatctgtatgtactccggggatatattcctgtttctcctaagtaaacttccgtttccgccgggagaaacttccgttctcattaggggaaacgacagttccctttaaaggaaacgcgcgttccccttaagggaaaccggagtttcttccgggggaaacggacgggtactccttttatccgttcggaaatctcagagtgaacgtgcttcctttgcccggttcgctctttaccgttacgcttccgccgtgcttttcggtcatggtcttgacatagaacagaccgaggccgtagcccttcacgttgtgcagattgccggtgggaacgcggtagaacttatcgaatatgtggctctgcttttcgggagcgatacctgttccacggtcactgatggcgatttcaacaaactctccttgttcggcagaggcggtttgccggcaacggatgtttacgtccgctgcttcgggcgagtattttatggcattgtcaatcaggttgctgatgatgttgctgaagtgcgtacggtctgccgtgagggtaagtccggcaggctcgatgtccgtagagatatgcacgggcttctccgccttcaatttatgctgctcgataagcggttcgagaatgctttccatggacagcggttccggatgcaggcggaaggtcttgcggcgttccatgctcatggagagtatctgctcgacaagtccgctgagccgttgcaactgctcctggcagatgcgcagatacttgtcgcgttgtgccttttcttccgcctggttaaagttcagcagggcatcgttggcggcataggctacggcgataggggttttcagttcgtgggtgatgttgttggtaaagtcgcttttcatctcctccagcgtcttttgctgcaagatggtgcggataagtatccagaacgcgaagcagaggatgatgaggataacgaacgaggtagtcagaatgcccgacatctgcttcagcaccaacggggtaacgggttccatccaaaggcggtagctctgatgggtactgatgtcgaaagcgtactcgtatagcttggcttcggggcttggaacgtatccgggagtaccggccacggcaagcgtgtctgtaaacgtatggggagatgctttgtcgtttgtatagatatgctccaggcgatggggcagcgtgatgccccggtctttgagctgaaaggtgagcaggctgtcgtatacaaggacatcagggtcggaaatgacatccaggccggagtgcaggccgcgctggaaatatgtggcgagttccagcatgctgttctggtcgcgcagaataacatccagcccgctgtttgccctcagtgcggcttggggcggaacatcggtgtcttttatggcggcttccagcttcttttgggctgaatcggcattcagccattgagccttgttccggtctttgttccgttctatgaaaagtacatcgtcggagtccgggacggcgatgccatcacgggtgataatagcctgtacggaggaattgtccgagatactcatcaaaagggtgtcgctcttttgatgaatgacctgctggtcggaggtttcttctttccggccgttgcggtctatgctggtggtgctgtgtacataggttttgttttgcgttccgtctttctcgaatccggcggatacgctcactgtcccatggtcggcactgtccttgcgcatcctttccacacgcagcatcatttcgttatagtcgctcatgcgcatggcttctatgatgttgcgttccaggtcgttgcgcatggtgcggtacagcccgccgagccagtaggcctggtaggagaagatacccgccaaagacaggataacgagtatggcaatgtatttcaaaggcagtttcatggtggttccttgatatttgtgcaggcaaagataaggagttatggtgtgcggtgtatcgtgcgataagactaaataacacttccggtaacagtagataacacttggtaagcaggcgataacacaaagtcgggcgggtaatgccgtactttgcggtgtgaaaacgaattaaaacatcaaatacaataaattaaagcatcgaatacgtatgaaacgattttatctgttatctgtaatcagcctttttagtgccggtatctccgcccaggaaatcaccggcggagaacgtaccctcagcgccgacagcatcattacctcggatgcccgcctggacagtatctaccaaagcctgcccgaagtgatgattaccggcgaacgccccgtagtcaaagcctcgcaaggcaaactggtgtatgacttgccgcggcttatccgcgacctgcccgtggacaatgcctacgatgccgtaaaggaacttcccggcgtaaccgagatgaacggcggcttgcaactagcagggcagggtgtcaccgtcattctgaacggaaaagtgaccaccctcagcgtcgaacagctttacacactgttgcggagtatccccgcaagccggatagaaaaagccgaagtgatgtataacgcacccgcccgctaccaggtgcgcggcgcacttatcaacgtgcaactgaagcaaaccgcggacggtccctcttcctggcagggcgaactctacggcaaatacaatcagaagcattacgaaggttttgaggagcgcgccagccttttatataacggaaataaattctcaacggattttctttactcgcacaaacacggccgtacttacactacgacggacaaagatgctatgcacgctttggcggatggctcggtgtacccgatggcaaccgatgaggtacgccgcggccgttcgcatacgcatagtttccgggtgggagccgattatactatcgctaaagaccatcagttgagctttgtctacaacggtaactatacaacgtctcacaaccggatgaatatcaacggttcgcagcagtccgccacgttgagcaacagcaccgactggcttcacaacggccggctggactattctacgccttttggcatgaaagccggtgtggagttcacttactaccgttctccgtccgaccagttgctgaacagccgcctgctggaaaacgacgagcttgacttctttacacaggactgccagcgcatcaaccgctggaaaatgtttctggcgcaggaacacagcctgggcaagggctggggactgaattacggtattgtctatactaccggcatcgacaacagttaccaatattactacgacccggagaccggcgaacagttgggagatgaaaatacaacttcgttggcagccggtgataattccgccggtaacttcactaatatgaaatcccgcaaacgggaagaaacgctgaacatctatgcaggtttcagcaagagtttcggcgataagctctcgctggatgcctcgctggctgtggagcgttataaaacgcccgtttggaaccagtgggattggtatcctaccgtcaacctgaactatatgcctgcccccggacatatcctgcaacttgcgctgagcagcgataagcactatcccgactattgggccgtgcaggatgctgtttcttatatcggcggcggatattccgagattcacggcaaccctctgctgaaacctgcgcaaagctatgagtttcaaatgaactatatcttaaagagcaagtacatcttcagcacctggttcagccacaccaaggactactcggtacagacgctttaccagtcctcgcaacggctggttgaaatctataaatacctgaactttgactaccgccaacagtttggcatacaggtatcagtgccctttaaggtaaagaactggttgaattcccgcctgacctttatcggcatctggcatcgcgagaaagacagcgacttttgggatatccccttcgaccgcaaacagtgttacggcatcgcccaaatgaacaacaccttcaccctttccaccaagcccgacctgaagctgaccgtcaccggatttgtgcacagcaaagcgattcagggaatttacgacctgcctgtttccggcaatgtaaatgccgccttgcgctatggctttgccaagggaaaggccgtcctgaatctgtattgcaacgatatattcgagaccgggcagatttctccgcgcatccgcttccagacgcagaatgtaaccaaccattactcttgtttccgcgagttgggcgtatcgttcacatacaagttcggcggttataaggaaaagaagagggaaggagtggatacgtcgcggttcaaatgattgtttgataaccaatcctgttcgggtagttaagctgatactaaattctttttcatatacctgcattttcctttcttttttgtacttttgcagctttcaaaaaaaacaaagttgttatttaaagaaaagaccctatatatgaaatcggatatcgaaatagcacgcagcattgaactgaagaaaataaagcaggttgccgaaagtgtcggcattccccgtgaagaagtagagaactacggccgctacattgccaagattcccgaacacctgattgacgaggagaaggtaaagcagagcaacctgattctggtaaccgccattacggccacaaaggcaggcattggcaaaaccacggtctctatcggcctggcattgggactgaacaagataggcaagaaagccatcgtagccttgcgcgaaccctcgctgggtccgtgcttcggcatgaaaggcggagcggcaggcggcggctacgcgcaggtacttcctatggagaagataaacttacatttcacaggagatttccatgccatcacttccgctcacaatatgatttccgctttgctggataactatatctaccagcatcaggcggacggattcggcctgaaagaaatcatctggcggcgtgtgctcgatgtgaacgaccgctccctgcgcagcattgttaccggacttggaccacgtaccaacggggttaccctggagtccggtttcgacattacacctgcatcggagattatggcaattctctgtctggcaaaggatacggaagacctccgcagacgcatcgagaatatcatacttggttttgactatgagggcaagccgtttacagtgaaagatttaggtgtggcgggcgccgtcaccgtactgctgaaagatgccatccatcccaacctggtacagaccaccgaaggaacagccgcttttgtgcatggcggtccgttcgcaaatatagcgcatggctgcaactccattctcgctaccaaaatggctatgaccttcggcgattacgtagtgaccgaagccggcttcggtgcggacttgggagcggagaagttctataatatcaaatgccgcaaaagcggtctgcaacccaagctgaccgttatcgtcgccactgcacagggattgaagatgcacggtggtgtcagcctcgaccgcattaaggagccgaacatggaaggactgaaggaaggcttcggcaatcttgacaaacacatccgtaacctgcgctatttcgggcagaccgttgtggttgccttcaaccgttttgccagcgatacggacgaagaagtagaagctatccgccgtcattgcgaagaggatttgaaagtgggcttcgccattaacaatgcctttgccgagggtggggaaggtgcggtggatttggctaacctcgttgtggaaacaatcgaaaagaagccatccgccccgttgcaatatacttacggggaaaacgataccgtacagcagaagatagagaaagtggcatgcaacctttatggcgcaagtgtagtgacctacagcagcgcttcacgcaagatgatgaagcttatcgaagaaatgggtattgcacattatcccgtctgcatagccaagacgcagtattctttctctgccgaccccaaaatatacggcgctgtcaataacttcgagttccacatcaaggacatcgttatcaacaacggtgcggaaatgctcgttgccattgccggtgagatactccgaatgccggggctgcccaaagtgccgcaagcggagcacatcgacatagtggacggcaatatagaggggctttcctgaaccttcttaaatagagaattgaaaatagagaattaaaaaataagctgcgcaaggttcgtttgaactgcgcagcttatcttttttactttttattgtagaaactattatttcccgatttcataatcagtaagcgaacagcggatattccttcatcttggcatttacgcgtgcgcggacgtcggcaatgacctgttcgttttctacgttggagagaacggtctcaatcatttcagcgatttccagcatcaggtcttctttggcgccgcgggttgtgatggcgggagtacccagacggataccggaggtctggaatgcggagcgggtatcgaacggaaccatgttcttgttcacggtgatgtcggcagataccaatgccttttcggctaccttacctgtcaggtcgggatatttgctacgcaggtctaccagcatggagtggttgtccgtaccgccggaaacgatggtaaagccacggtctatcagggcttgtgccagcgtagcagcattcttcttcacctgtttggcatattctttccattccggttgcagaatttcgccgaaggcaacggctttcgcagcgatgacatgttccagcgggccgccctgaatgccggggaatacggcagagtcgagcaattgggacatcatcttgatttcgcccttcggtgttttcttgccccaggggttggggaagtccttgcccatcatgatgacaccgccacgaggaccgcgcaacgtcttatgagtggtagaggtcacgatatgggcatatttcacggggttgtccagttcgcctgcggcaatcagtccggcagggtgtgccatgtctaccatcaggatagcacctatcttgtcggctatttcgcgcatgcgtttgtagtcccattcgcgtgaataggcagaaccgccgccgataatcattttcggtttctcgcgcagggccacttcttccatctggtcatagtccacacgtcctgtttccttattgaggttgtactcgcagggggtgtagataatgccggaagtattcactgacgaaccgtgagaaaggtgaccgccgtgtgcaaggttgaggcccatgaatttgtcgcccgggttcagcactgcgaggaatacggcagcgttggcctgtgcacctgagtgcggctgtacgtttgcccattctgcgccgaaaatctgtttcaggcggtcgatggcaatctgttcgctttggtctacgacttcgcaaccgccgtagtagcgcttgccgggataaccttctgcatacttgttggtgaggcaggaacccattgcctgcataacctgatcacttacgaagttctctgatgcaatcagttcaatacctttgagctgacgttgatgctctttttcgatgatatcgaaaattaaatcgtctcttttcattcttgcttattagataggtttgataatactatattctcttattaagcgtacaacgtacaaatttagaagaaaaaaatgaataaactgtaagaaaagtaagaaatttcctgtcaaaagaacactccaagcgaaaaactcagaacattctcccgcctgtggaaacgtatctggttggcaagaggcacttcctcaccggcattttcgtcatagaccggcttgtagctgatacgctttgaaatgttgtgcagtccgatgtcgtagcggaaatcgaagaagatgcgggaaatcgttacggcaacgccggcggtgaggctgacgttcagcggatagagttcctcctcgatgtcccgctggtcgaaattctcgaaagtgaccttgctctgcctgtcccagatgtagcgtattttcggtccgccgaatacggcaaggctgtaaggcccttccttaatgatgttgtatccatagattacgggaatctcaaagctgtggatagacgaggtgatagaggccatttcgggtatgctgctttcgggcgcgtcttcgggcagcggcttctcgaaggtgatgttgcaacggtttatcgtgtacgacagttccggttgcaggaagtggcgtttgaagtttatccgcatgaagaacgagccgaaataacctatcttatagttattctgcacctcgtcgatgacagtaccgttcagcactaaatccgatacgaggaagagcgaagaggtaaacccgcccttgataccgaagttcacccgccggtcgtggcggtgggtgtgctgggggtgttccggtttatccgttccgggcacaaccggcagttgtccccacatggctgtggagaaggccagcaaacaaaccccgaaaagtaaccatcttcttcccataatcaatttttatttattactttttcttctctaccgaccagccgaatttcccgattttctctcccagcccgtaatagccgccatgcacgtagaccagcaggttggattctgccagctccagttttccggtttccgtattcaggtgggaggtgtcggcgcgtacattcaccacatcggcaatgaacatgtcgtgcgagccgagggcgacgatttcctttaccctgcactcgatgcacaagggagattcctcgatgagcggggcgctgacaacggtacttttgccgggtgtcagcttcatctcctcgaatttgttgtagttcttgcccgaacgtacgccgcaccagtcggtggcgcgcgccatatccttggttgtcaggttaatgacaaactccatgttgcgcttgatgatgtcgtaggagtgacgttccggccgcacggaaatgtagcacatgggcgggtttgtacaaatggttcccgtccatgcaacggtcagtatgttatattcttccggggtgcttccgcagctcaccagtacggcgggcagcggataaatcatggttcccggtttccagtcttctttcatcagattatctctatgtcctctcttgtctgttctttctcgcaatagtggcatttgattacgcagttctccttgtccaccacatgaaacagggtaggcatcggttcgttgttggtgatgcacttgggattggcgcattttacgatgccgcgcaattcgtcgggcagtttcacttcacgtttctccaccacttcgtagtcgcggatgatgttcagctttacgttgggggcaactacggcaatgcggtttatctcatcgtcgcagaagaacttatccgctattttgatgataccctttgttcccagcttcttgcttttgaggttgaagccgatagtaatgttgttgttcatctgctccagtcccagcaatgatactactgtaaacagcttctcagagggtatatggtcgatgacagtgccgttttccaatgcggccacctgcaattcttgttttttcatgtctcctaaataaaaccagtaatatacttccttatactttacttaacgtcgtccagcgtaatgccaagcacatcgcacagaatggcttcgcgtgcataaagtccgttttgcgcctgctggaaatagtatgccttcggattgtcgtccacatcgagggctatctcgttgacacggggcagcggatgcaggatgcgcaggttggggcgggtatgttccagcattttgttgcgcaggatatagatattcttcacgcgttcgtactccatgaggtcggtgaagcgttcgcgttgcacacgggtcatgtaaaggatgtctgcatcggctattatctcttccgtaaagtcggtgtgctccacgaatctgatatcgtgttcgcggcagtaaatcttgtactcttccggcattttcagttcttcgggagcgatgaaatgaaaggtggggttgaagtgtcgcatggccatcagcagggagtgtacggtgcggccgtatttcaaatcgcctaccaggtagatgttcaggttctccagcgtaccttgcgttttgtagatggagtagaggtcgagcatcgtttgcgagggatgctggttggctccgtctccggcattgacgatgggcactgtggttacctcgctggcatagcgtgcagctccttccaggtagtggcgcatcacgatgatgtcggcgtagttgcttaccatcttgatggtatctttcagtgtctcgcctttggacgagctggtagctttggggtcgctaaagccgatgacacgtgcaccgagccggttggcggcggtttcaaagcttaagcgggtgcgggtggacggctcgaaaaatagggtggcgacaactttaccgtcgagcagatgcctgttgggttttgcctcgaactctttcgccatattgagcatatagaggattttctctttgctgtgttcggcgatagtgactaaacttctgttttccatatcgttgatattcgttttacttttcgagagtgtaaagttgcaaaaaaaatatgggttatgaaaatctccgggaacttttattctttttccattactttcgccgttggcaagcctgtacggattttgcgctgtacggacttggcggtttgtgtttaattctcgttaaaatgaaaagtcatgtttaaaatctgtattgtattcaagataagtatccggcgtgacggcggctctccgtgccggaaaaggaaaaaggaagagtcttccgccgctaccggcagtttctccgggtttgtctgcggggagattgcgcgcacccgtctcatgcaccgccacagtacggcggacaattatgccactgcgctccgttcgttccttgcgtttcatggcaaaaaggacatctcctttgccgaggtggacagcaggctggtagatgcttacggggaatggctccggaaaaaggggatatgcaaggacaccttgtcttgctacatgcgctctttgcgtgctgtctacaacaaggcggtggagcaggggcttacggagcagaaagaacctttcgtcaatgtgtttacgggcatttcccgcacccggaaacgttcgatagagaaggcggacatcaacaagctgcgtgccgtgcaggtgaagcccggttcgtttatgcaactggtgcgcgatgtgttcctgttctgcttctatgcctgcggcatgccttttgtggatgtggctttcctgaagaaatcgcagataaagggtggcatgcttgtgtatcaccggcgtaagaccgaccaggtggtgcaaatcaagctggagccgtgcatgcaggagataatcaaccgttaccggtcggacggcagcgactatgtgtttccttttcttacttcgcaggacgaagatacggcgtacagggagtacaaacgcaagttctcctattataacaagacgctgaaaactctgggaaagctggcgggggtagacaagccgctctcttcgtacgtggcgcgccacacctgggctacgctggctttcatgtcctcggtggacatgtctgtcatagcgcaggcgctcggacataccgatgtaaagactacccggatttatgtggaggatatcgggaacggaaagcagaattctgccaataagaagcttttgaatgaggtgttgaggaagcgttcctctgtacaagaggtacaataattttcaatatattgagaatcaacagttgccgcatgtatccctttcggaaaaggcttggaacagatatttctgccttgaaaaaaaggcgattcttttttgcttattttatttaatctgcatatcttcgcggctgttatagtgctctattccgatttctgtgagttctcactcttgtacagaggtggtataaaaaggctatatccttattgataaccgcattttcctgccgtatatccacaaggcggggagaaggggttgtctatctttttttagcctaagtccgatacatattttcttgcatggttctgcccgtagcgggagctttcccggttgcggacggcagtggctgtgccccgatttttccttgattttcttctttatttcatgtattgtttacggttttatatttctattcatgtcatcatagcgtattcgccggacttgtaaggttcgcgtgttccgcggcctgataacgttgcatatcctttccgttgcaatacagttttttcgtatcggacttacatttttccatcatgtggattttaacagataatcaagcccgatatggacgattttgatgatcaaatcaagcaaacaacaaaaaatccctggtatgctgtccgcacattcaactgccaggagttaaaaatcagtgattttttaaaagagagaaagaaagtgcattttgttccgatgacctatgttgaaaaggaaaaagaagggaaaacaaggaaaatgcttgtcccggtagtccacaatctggtctttttacagaaaaacgagagccgcaaggcaacgcttgcgatgcttaaggagtgcaatgttcctttcagcgtgctttgcgacaaagaaacaaagcatccctgtgagatacccgacaagcagatgaccgagttccgcatattatgcgaccccgattttaaagacaccttatatataacgcacgaagaggccgaagcgaaacccggcaagaacgtccgtatcattcacgggccctttgccgggataacgggtaagctgcatcgtgcccgcggcggctactatttcataaagacgcttgccggtgtaggagtgatgatgcgcatttcccgctggtattgcgaagtgacggaatagccgcctgccattcgggccgtataagccggttgcatgtattttaatctaaaaaaacagacaataatgaaagaaaaactcctttcccgcattgcggaaagaaaaatcacggtaggcgtcgtgggcttgggctatgtgggcctgccccttgccgtagagaaagccaaggcaggtttcaggactatcggcttcgacgtgcaggaagaaaaagtgaaacaggtgaatgccggacacaactatatcggcgatgtggtcgatgcggagctggcgcagctggtacggaacggtacgctcagcgccacttccgatttttcctttataaaagatgtggattttgtagccatctgtgtgcctacgcctttggatgtgcaccaggaaccggacatcagctatgtggagagttcggcgaaatcaatagccgggcatctgaccgcaggcactatcgtggtgctggagtccacaacctatcccggcactaccgaagagcttataaagccgattcttgagagcgggtcgggcttgaagtgcggcaaggatttctatctgggcttttcgcccgaacgggtagatcccggcaacgcggtttacaaaaccaagaacacgccgaaagtggtgggcgccgtaggcaaagacgcccaggacgtgattgccgccatgtacggagctgtgctgggcgataaggtgcacgtcgtttcttcgcctgccgtggcggagatgaccaagattttggagaacacctaccgcaacatcaacattgggctgattaacgagctggccatcctgtgcaaccgcatgggcatcgacctttgggaagtgatagaggcagccaagaccaagcctttcggcttcaccgcattctatcccggaccggggctgggcgggcattgcattcccctggacccctattatctcacctggaaggcgcgcgagtacggcttccatacatcgatgatagaggcttccatgatgataaacgaccacatgcccgaatacaccgtggagcgttgcggcaagatactcaaccgccaccgcaaggcattgaacggctccagagtgctggtgctcggcgtggcatacaagcaggatatagacgattaccgcgagagtcccgccctgcgtgtcatcgaggagctggagaaaacaggggcgtcggtcaccttctacgacccttacatccccgagttccggtatcacggcaaatcgcataaaggcgaagccgccctctccgccggactgctgcggaataccgaccttgtggttgtgaccgccgcacacaccaatgtcgattacgattttgtacagcgatacgcgcatgccgttttcgacacgaagaacgtgatgaaggcggttgctgtgagaaccaacatcgaagtgctttagagccagtttaaatattcttcttatttatggataaaaaaatatgtgttatcggcggcggcaggtggggaaagaaccacatccgcacattggcggggctgggttgccttgccgcagtggtagaggcggatgccgtcaggctgaaagagtatacggagcagtatcccggaataaagggatatgcggacatggacgaagccattgcctgcggttacgacggatatacggttgcgcttcctgcggaacttcactatccggcaggcaggaaactgctggaaaaagggctgaacgttatgctggaaaaaccgatgacgctcaccgccgcgcagtctgccgaactggtggaactggcacaacgcacgggagcgcgcctgatggtggggcatgtcctgctgtttcatccggcgtaccgtaagataaaagaggtgatagacagcggcaggctgggcaagcttttctacctctattccaaccggctgaacctgggtacggtgcgtacggaagaaagcgtgtttccctcgttcgcgccccacgacatttcggtgctggactacctcacgggcgcttcggcatgcaggatagaggcgaaaggagcgaagtttctccaggacagggtgtacgacagtacgctggtgcaactggaatatcccggcaacgtgcatgcccacatctacgtatcctggcttcatccctacaagcagcagttgctggtggtggcgggcagtaaaggcatgctttccttcgacgatgccgcggacgggaaggaaatccgtttctacaacaagcggatagatttcgagaacggcgttcccgttaaagtggaagctccggacgaaatcatcccttacgagaagaagatgcccctggaagaggaactgaggtatttcgtggagcatctcgactccaccatcgggataaacagcggagaggcaggttatgaagtagtaaaagtactggaaaccgtacaacaaatcatagaaaacaatgaacaacaagaatgactgtttcgttcaccccagcagctatgtagacgagggtgcaacggtgggaaaaggaactaaaatatggcatttctcgcatattcagaagggagcggttatcggagagaactgttcgctggggcagaacgtgaacatagcgaataacgtaaaggtgggcaacggcgtgcgcatccagaacaacgtgtcggtttacgaaggcgtggagctggaggacaacgtattctgcggcccttcctgtgtgtttaccaacgtcgttactccacgggcgcatttccccgtacacggcgtatatgccaaaaccctgattaaagagggtgcttcgttgggagccaactccaccgtggtctgcgggcatacggtgggcaggagcgcgctcatcgccgcgggcgccgtagtaacaaaagatgtacaggactatgcgcttatggcgggagtcccggcacgccgcataggctgggtatgtgagtgcggcgcacgcttggatgcttcgcttgcatgttcgtgcggcagaaagtacaaggaggaaaacggcaacctgcttgctgtatcgtcggcggatttttgataggtttcaagtccccgattctcataccagaattatttacgataaaagaggtttatatcatgcaattcagagatttaaggaaacagtacagcgtactgaagcaagacatagacgccgccatgatggaagtagcggcagcaagcgcctttatcatgggccgccccgtgaaagagctcgaagccgggctggcggagtatgtaggagtgaaacactgcatttcgtgcggcaacggtacggacgcgctcaccctcgccctgaaagtatggaacatcggtgcgggagatgccgtattcgtgcccgacttcactttcttctcttcggcagaggtcatctcgctggaaggggccacgcccgtttttgtggatgtggatggcgatacgttcaatatggacgcctcggatttggaacggaagatagcccgtaccatagaggaaggcagactgacgcctaaggtcatcattaccgtcgatttgttcggccttcccgccaactatcccgctattcgtaagatagccgatgcccaccggcttttcatcctcgaggacggtgcgcaggggtttggcggcatgataggcaacaagcgtgcatgcagtttcggcgacatctccaccacttcctttttccccgccaagcctttgggctgttacggcgacggcggagcggtgtttaccgacaacgacgaatgggccgcactggcagattcctaccgggtgcacggcaagggcatgttcaagtacgacaatgtgcgcatcggcatgaactcgcgtctggacactttgcaagccgccattctgaaaataaagttcaaggctttccgcgagtacgagttgcgcgatatcaacaaggccgccgctctctacaccaagttgctggcgggcagggtaaagactcctgtcacgcccgaaggctattattcgagttgggcgcagtacaccatttgcctcaatagcagggaagagcgcgatgcacttcaggcgtgcctcaaggagcagggcattccgtccatggtctattatcccacacctatgcacgggcagactgcctataaggcattgaatgcccccacagattgctgtcccacggcaaagcggctttgcgacacggtgctgtcactgcccgtacatccttacatcacggaagaagagatagaaacggtttgttccgtgatactcggtttcgtaagatagggcacgtttcccggttcgtaaggtaagttgcgttttccaaccaaatacacaagtttatgtcctctgcattccgccggaattttctgatactctggtccgacctgctgattgccctgtctgccttctggctggcacgctacttcggcgatatgccccgctggtactggctggtgctttcggcggttgtctgggtggtgctgggcggagtgtcgcgcaagttacagttcggtgcatacaagaggatacgttatgcgtttctgggaatcttcgcgctggacgtactttcggggctgttcctctgcaccctgtaccggcattgcgtgcccggctacgaatacgactattccattattcttgccaccggcatcatcattgtgctcgaatgggcgttgtactgtgccgtcagacggctggtttaccggaaaatccctttcttctacgaagagcctctgctggacgatgtgacggaagtggggataaacacaggcatcgaacacacggagctattggagaaccgtgacgtgacgctgctgctgaggctcgtgcacgaagcggagaactcctcggagctgctccgccggatgcaggaaagccgtgaggcgttttcgccggtaacaatgctcatggactcgccggaacccgaagccgtgcttgcgcataaagtgcgtctgccccggctcgttatccaccggtgtccgctcaaccgtgtgcggcatatcaacaccctcttctcctataccaactattgcatggagagagggggacttattgcctgccactgtaccacagcgggcatccgccgcgagaagataatgcggcagaatccggtagtcattaaccgtgtcctcttcttcctggattattgctggcacaggataatccccaagctttctttcaccagggatttctatttcgggctgacgaaagggcagaaccgtgcgcttacgcgtgtcgaggttctggggaggctgtaccgtgccgggtttgatgtgcttcacgaggagattgtacatggagagttctacgtcattgccgcgaaggtgaaagaaccggtacgcgacgacaagccttcgggcggactgctcatccgtctgaagcggaagggcaaaggcggtaaaatcatcggtgtgtacaagttcaggacgatgtatgcctattcggaatacctgcaaccgtatatctataaacaggcgggactgtgcagcggcggcaagattgccggtgactaccgtgtgaacgctgccggacggtttctccggaaaacctggctggacgaactgcccatgctgataaactggatgaaaggcgatttgaaactggtaggtgtgcgtccgctgagcagccattatttcagcctttactccgaagagctccgtgcgctgcgcatccggacgaaaccgggccttatcccgcctttttatgcggatatgcccggtacgttggatgaaatacaggaaagcgaacgccgctatctggagcagtatctcagaagccctttccttaccgactggcgctatttttggaaagctttccgcaatatagtgttccggggaaagagaagccggtaaaggaaacttccggctttcatcaggtcagcttatgcaagacgtgataccgaaaacaccagccaatgcagtggctactgtaatgattactttgaggacgatgccccataccgattttgattttgtgctcatgttgtttggttttaatgtaaaaacaagtgttcaaggcattatcctaacggattttcttcctcgccgccgtcgccgccgggtttgttttcactgccgggttcgctgccgtccacattgtatttgtaggcctctttcagttggccttccaaattaatctgggcgttgctcaattcgcccgtggcgcgtgcacggagcttcaggcctttcacattgtccgccagcgtaaagtcggcagccgaggcggcaccctttctgcttacgatgcctacggagaaaatggcgaggtcgtccagctttacgttcttgccgtccaggatgagctctttggtgcaggaaatcatgtcggtcagcacccccttgatcagcccctccgaatagggcgtgttgtggttggccatatgcttggcaagcctttcggtatcgaaagtgtcctcaatcagcggacgtgcataccacagtcctttcaatgggcttttttcgccggtcatttgatactttttgtaacgaatcatactcttttgtttttttagttttcaaattaaaaaattctatatccttgttgcaacaatacgaagatacgacatagcctaagggcatttatcactatttgtccgttacggttcgttactgtacgttatatacagatataacggctgtgatgtggagatatttacgtatctttggcttatataaaaacaaagaattcaaaagatatggaaactttcaagatacgtacatacgggcgcacggaacttgcccagctctacagtccgggactttgcccgcaagccgccttccgcaagctgaaccagtggatagatttccaccccacactgcggagcagccttcatgcactggtcgcctcggacaaaacgcggacatacacgccggcgcaagtacggctcatagtcgaggcgttgggcgaaccgtaaactaccctcgactttagcatcgtaacatagccctttagccacacagtatagctctttagcgccgtagtgtagccctttagtttctcggcagctccaccacgcgatacccccgcttgccgttcgacctcgtcagttcgaagcccgcctgcttcatcacaagccctatctttacggggctaaggtagtgctttacggcagagttgatgcggctcagtatatcggtggtagatacgaacgtacccttttcgcccggcagggggcaacggtaataagcctgtatcagttcgcgctccatgctgggcacttcaaaattacggttgtgcaggtttacgagctttatctcctcgtcctcaaaccaatagcgcatgccgcctttccaaagtgcatacgcctgtgagtacaccccctcgtaatccacgggatgcgtataaggattgtcgatgctgctgatttcgaacggcagccagcggcggttacccgtgaggtctgtcaggaactgcacgttattggtcgttccgcacaggctggcaatgtgggcgcggtgctctttataatgcgcataagccattcgctcgttcaccaccttctgggtggtcatcgcctttatctggttcagctccgacgcccccagttcgtctatttcctccatgcagataaagacgaattccgccagcgaaaacatatcgtctttggtaatgcggttattgttggacttgatgtaaaaatagcgttgcagcacagggggcagcagcttgttgagccaggtagtcttgtagctgccctgaggtccgatcagtacgaaaatctcgtggttcaccgtttcccggtcgaaaagggaggcaatggaggctacgagccatttcttgaagtaaccttcgaatacggactgctcgctctttacgtgcaccgtggcggcaagccgcccgatatggtcggtcacaccgtcccagggcttcagcccttcgaagtagtcggtaaaaggattgaacagaacagtatattccgagtgcagtattgcacggatgtcattgatgcgcacggtttttccctgcttgctcatacggctccatagggtgttgacgaaacggtcgtctatttcggtatattccccttcggcgccgtctgttccggcaacggccgtctcgcacttcccggtggcctcattgtaccggaaacgggcctgcgtgtcgaggaagcgttcgatgtcctccacactggcaaatccgtcgttgccgccggcattcggcgtccgcccttgcaacggacgccgcccatgctcctcggtgtgctggtagcacgaccggaaaacggcggctacatccccgtcgtagtcggcaaagcgtttcaccgcccacccggtagcgctggcttgcgccactccgtaggcattgagcagataccccatgcgcatgatgtattggttgcgctggtgtgcttcgtaaacgatgccctgttctgccagttcgccggcagcggcagcgacggctttctccagccgcctgttacggatagaggatttggcgggctgctctttcttgtcgcctttcagttcgacgggcatggcggcggcatcgggattgaagtagacgtcggggtcgtgtgccagtccgctgagtctcgtgatattcttgcatttcaggtcgcattcgcatcccagcaggtcggcataatagcggttgccctgctcgaagattttggaatagactttccggttcttctccggagtggtcgtcaggcagtccgtacggtagataatgcgaagccccgtaccgctgatagtggtgtaggacagcagcgtatgcttgtcggcgcggacacgtccgataagttccggcaggcggtcggcgtcgatatggtcgatgtctgccagcgccagcgaagtccagcccgtgatgttttctgcctgcttgccgcctccgaagcacacggcaacggcaaaacacgggcaggcggctttctcccatgcagcggcagccttttgcccgttatgactgtaatagcggtgtttctcggtacggtcgcgcaccagtgcatcgttgcggataaggtttacgatttcctgtaacgtgctgtcctgcggatgtgtatccgagtaacctttgaaaaggctgattgaagtttctttcattattatcgttattagggttttacggagtgaagttccgaataaagcgccggatacggaaaacagcggttcccgcatgtgggaaccggacagatgatatattaacattattaacttttaaaagcatttatagatgactcaaaatctgaatcaggaattcgtccacttggagcttggcgactacctggaactgctccaaaacacgattctggtaggtggcaaacgactgaacgacaaagagatttgccgtaaaatctcgatgagtccccagacctatggcaaggtaaaaagggcgaaagtttaaagctgaaccagtattacagtgtgttccgcatctaccgggaagaactgaaaaaccgccctgcggaactgtataacgtattgacagagttgggcttacggctcgaagcggactatatgcgactgcatgttccccgcccgtagttgacaggttgccggccatatttccaacttttacaggggtatgtgttttagaaatgataaatgtaatcgttacatttatcaataaattctcgcgcgcgtaacgataaagttataaaagagggtggcaacctgtcatatccggagttccataccggcaacatctcggttttctgcctgacggacggcaagcgcttcgtgatgattgaggaaccggactttatcgtgagccgtatcaggaacagcgccgggtgcggggagaaaacggacgaataaacaagaagatagcttcttattaaaatcggggtcaatttcagtaatgagacgaggaatgtcgagaggtggattattgagtaagaagccggtacgttcggcaaatattcactgaaatatttgttgtcatcaatttaaatgtcgttctttgtacgagaaaaaggtaaacttatgtgtaaattctcagaagacagcagacaaaaattgggtaatgccgtcatctatattgccaatcatacggaacagctcagtaaaacgaaattactaaaactgctgtttttaatggaggaatatatggtgaaacgttatcatgtacctttcatggggttgccttttgagatatggcaagtcgggcccgttgccaaagatattttcatcgatttgtccgacggccctttcctgttgaaagattttgtaaaaacagaggtacaaaaagatgctacgtatattagggcaatcaagcctttctgtgatgatgagttttcggactgcgaaatggagatgatggatgaaatcatccggaagtatggcaagaaaacagccaagcaactggtagcagaagtgcataaagagggctctttatggttcaatgccgctaaaaagcatggattgctgactgctttcaacaaaggtttatgcaataattccgattataccatagatttctctgaggaattgtccgattgtgcgcgggaagattacaaggagagccttgccattcatcagactgccaatatcctaaaagctcaggaacatgtttaaggagggtaacttactgaaattttctccttttatatttaaaaacggagcttgtcctaaaaataaatttttcgttgtgcttaaagaagcggagaatgcgatgatactggcatccttacccacttctaaagaccatgtacctgccgatatgcagttaaaggagggatgtatggaaattcccgaccgtcagataaacatttatatttttcttgccaagcaaaatatagctatacatcccgatacgcagcttccgttctcttttaatttgaatactttcatttacggtgcagatatagacagttatcccgttacagttttccaagaacagattgagaacggagaaaccaaagtcgaattaatgggtagactgaccgaggaacagttctctgccttaaaagattgcctgaaaggatcgaagatgacaaaaaggcgttttaagagaatgctataattgtcaacgtgcaattaatctccggacatttccatagatatatcatacaactctctcttgttgaaaaatgtggagataaaaaccacacaaaaatactactatgtacataaccgttccgaataataatattgtggaaaggtattatatcattaatatactctttcatgaatttcttggattaaaatatgaaatctgtgtagcgaatgatgagaaagactataccgttatcttagataatgggcgtaagttgattataaaagattctttttttaatcttttcccaaccccgttatcttacctgtctcgtaaaaatatacccactgcgataacttatgctgataattcttttctgagtatggagaaaatgcctgtgttattcggaacaggcgatttggagatgcgtgacgacagcattatttgtggaagtgacctgtttgccggagctttctttatgttgacaagatgggaggagtatgttgttaaagaacgcgatgtgcatggccggttctgttcaagcaattcgttggctttccggttcgatttcttgaacagagcgatagtcaacgagtataccgaatacttatggaacatgatttattaccttgacagtacggcaaaaagaaaaaaacattcatttgagattattccaacccatgatgtcgatgtcatttcctgctggcatacgcctttcaaggatataaaaagaatagtgagttatttccttaaaaaaggatgtataaaatatggtatggagaatatcgtaagctatatcaaaacgcttgtaaataaagagaatgatccttacaacactttcaggttcttaatggaatattccgaaagtttgggattgaaatcatacttctttttcatgtcttcggcggagtatttttttgcagagcgtgacagaatgcagaaaatagcggatacaattttggaaaagggacattttgtgggttttcatcccaataaaggcacttgttccgataggatagtctttcaaaaagaattgaatgctttaaatacggttttaaagagaaaaaacaccataggaaggcaacacttactgaaatttgaagttccgtttacatggcggatttggaatgattgcggaatggagtgggattcgtctttagtgtattttgataagattgggttcagatgcggggtttgttatccgtttacagtctttgatattcttgaaaggaaacatttgcagttaaaggagttacctttattggcgatggactgtaccctgttttactataatcagcttaaacccgatgatgccttatcggaacttagcggtataaagagtacggttcggaagtataatggcaagtttgtcgtattatggcataattcctatttctcttttgaaaataggaaaaccttagccgtttataaagagatattgaaagaatcttatttggattctgcacgataaatgaaagaaaccttagagaatgccatatataaaaatatggcaaaacttttaataggcgacgggattgccaggattttgggctttgtcatcacaccggtcttaaccagaatctatttgcctgctgaaatgggaagccttgctgtttttacatcttttgtagctatccttattcctttttccacactaagatatcctttgcttattccggtcttgaaggatgagaagatggctttctctttatcttacgccacttttctgatgttgttatgcagtacgatactgctgattataagtttgtttttctttaagagtgatatatttagcttgttttcggtagaagagttatccgatttttggtggctgatacccatatcttttttcagcatgggactttatgaattgttttaccaatgggccataaggaaaaaggagtttttgttattgtcgaaaagtaaaatcctgcaaaagagtatcggttcggctgttcagataggattgggcatggcaaggttcggttcgttaggattgattatcggttctattttttccgaagctggcggactctctttgtttgccaggagttttaagaaagacatctgttgcaattatagatttgtaaggtggagcaggatgaaagtcattctcgggaagtttgtcaattatccggtttacaggcttcctgctcagtttctgttgtcgttatccggtaagatgcctttactctattttgcatggaaattcggtgcaggtatggcaggacaagtaggtctggccacgacgatgctttcaattcccgttactttattaggttcttcggtaggtaaggctttttatgctgaagtgtcgggtatgggaagttccaaaagaattgaaatactgtatttaacaaggaaagttatacaaaaactattctgtataagcttaatccctactatcctgatagttctttttgctcccatactgttcgagctattttttggaacggattgggtgcaagccggtgtttttgcccgtattctggctatttatttaattactcaatttgtttacagtcctatcagcgagggattgttcaatattctgaaaaggcagtctatcgtattatgtctaaaaataattcgcattttaattatcagtatggcttttggagcgtgctattattgggaactttctcctattgcgactcttttactttatagtataggaatggctgctaattatgttgtagctacgttggtgataataaatgcagtaaaatatcaaaaataaatatgcaatcaacagatttacaatttgagggtatatgaatatcttaaatttctcttctttacctttatgggatttaggcaaaggaaaagggcgagtctccactattcttcctataaaaggatttgtagacagaggtcataaagtacattatatctcggattctataatgcaggaatcgggtatattcaatgacattagtgtgaaccggataaagacgccatttgctggtaagcgtatttatttgcgcattatcgcttaccctattattctaattcaatttctttatgccggttttaaatactgtaggaaatacaaacctgatgttgtatatgcacatggctatgacactgcattaccggcttttttgctggcaaaaatttataaagctcgatatgtattaagactgtatggagttggaactaaaatgtcggtacgctttaaagtctcttatttgtttttatttatggcttttaagttaagagcggatgcatacattttgactaatgatgggacagggggagacaaagttgctttatcgtatggtatttctccaatgaagatacattttttcaagaatggaattgaaaaagaatgggcacaaagtgtagtaaatattgatttaaaaaggcaaatagcctcaaataatgaaaaaattttgttgtctgtgagtaggctttctaattccaaagggattgattttattataaaggcactacctcagttagtgaatttaaataagaatgtcaaattggtaatagtaggtggaggaaatgaggaaagatatttgaaaaagatatgtcaagatttggagatttccgaatatgtaatatttacaggagctcttttgcgggatgaaattagagagtatatgaatattgccgatgtctttattagcatgaatctattaagttccatgagtaatcccgtttttgaagccatgatttgcggtacggctgtggtggctctcaatagaggaacgacatcagaattaataaagaatggtgaaaatggtatccttattgaagatgaccggttaggtgaactgcctcagataataaacaatcttctcgaaaataatgaagagcggaaaaggatcgccaagaatggacagagaacgattttagaacagtggccgagttgggaagagcgtgtaagagatgaggtcgatttggtagagaaattggctggcaataaggttggggtatgaacaggataaaattaatatctgtcaatttaggattattactcttttttgctttacacccttatccgaggtggtttatgccggaaggtctgtttcagattgtctttctttttactacaacaatatcttcgatagaattacgccgcaacatcagaaaaggattggtggttgacaaatatcgcatcggaatatgtattgcagcagttacattcctgctattttttacaacaccgattgtacacgatttcaggataggacattttgcatactttttgatattcatacagattattttcttcaatgacataatcttctacaattcatataagtttctgaagaagttgtttataattatttctgtttttgctattgttttttgggttcttaatgccatgggcgttcctctgatttattataagtgcactcctgcttttagaacggaaagcgtattggataactatcggatttatgggcctgttttaagtctgtaccgggggaatatgcctattggagggggaattgaacgaatatgtggtgtttttgccgaacccgggcattttggtatttacataggattaatgcttgctattgaaaaattcaatttctacgagaaaaggaatttgttacttctgataaccggattccttacattttcaacagccttttatggtatattctgtttgggtgtcttgtataagcttcttaagtataaaaggattacgacagacataatacggatagtggcggtactgttcttcactgccataactctgttatttttcagcgaccgctttgtcgaaaccatttatggcagagtcgttgaaaataaaagagaagaagtatctggtgtggttgatttgcttgataatagagtcccggattcccatatcaccaagtttgagagttttattcactctcatgatgctttggtgggattgggatacgataatgacgaaatggtaggaacaaactggagaggggtagtctaccggttcgggataataggaaccgtcattatgttgctactgattttttcaatagcccgaaaaggtagcatgaagtatggattcttattggccgcaatagcgctgttgattgttgcccacagggcttaccttatgttttctcccgccatatacatgatgttgctgacagcagtgtatgtgaatcgtaccaaagaatcgttcattataaaaattgagggattggacaaatgaatgtcttattagtagccaaattatcaaaccagactttgacagagaatattctttctcctttattgaaatcatcgtatgtagaccatgtctatgtcttgcgtgactttcccggtgatatgattgacggtaaagttacttacctgtctcccgaaaaggtatcggaaagcagaatccgtcatatcaggaaggtggtggcaggagtccgctactgctcaaaatataagatagatgtaataataggtgtactgaatactccgcatggctatatcggaaaagctatcggtgccatgatgaatattccttatattcatatcaccattgcagggcatcgtgagttttggctgggtgggaaaatcagggaaagggtaaacctggcagtattcaggaaagcccggataattacggttacaggacaacaaacgcttgcctacctggtgtccaagggcttcgatgcggacaggattgttgtgctgcccaacttgcccaatcaggcgtttatggatagtaatatgcaggaagagggcgagcggaagtatgacatcgtgtctttttcgcggatagataaaaataaaaacatcgggttgctgttgagagccgtatcccgaataaagaatgaatgcagcgtgaaactgattgttgccggtgatggtgaggaacttgacaacttgaaaagaatggcaaaagaactggccatcggggagtatatagactttgtcggctatatctccgatttggaagacaaattgcggatataccggaacagcaggatttttgtttcctgctccaagggagagggctttccggtgtcgttgcttgaagcgatgtcttgcggatgtgtacctgtcgtgtcgaacgtaggtgatattgtagatgtgataaggcatggcacaaacggatttgtattcaatgatgtggacagtgaaatggaacttgccggttgtttgatgcgtctgctttctgacaaggaactggtggataaaacgagtagagaggcacggaaaatcgtggaaagcatatcggtagagggtaatgcaggaatatgggacaatgtatttgcacgtataacagcaagacaatgaaaataacactggttggcgatatttttccggcagatgaatttttgagtgtaggatttggtatcagatcgcaatttgaagctacaaaaggagaaaggtggaaggataatattcaaggtatcacgcaagattcggatattgtaataggcaatcttgaaagtcctcttctggaaccttcgcttgctgccggaaaaccggatttctacggcagtccggagtttgcacgttttctgagagaatgcggtatcggagtgctcaatgtggcaaacaatcatatactggagcatgggaaaggcggatatgagagaacattgcaaatattggaagagtccggcattgcagttgcggggaacgataatcgtgtattatatattcatcgggataattgcctgataggcattgcgggcttttgtaatgtagatttggacaagtttgacaacgacggctgtttttctgtactggacgaggtgaatgcaatggcggctttaaatgagatggcggacaggaaagcggatttgaaaatccttactctgcattggggaaatgaatacattcaccgtccctcgatgatgcagaggaatatggcttacagattgattgatgccggagcggatattatagtaggacaccactctcatgttattcagccttatgaaaaatataaagcggggcatattttctactcattgggcaatttttgctttgacaagcctttccagtcacggcaattctccaaaggaatgggagttgacctgtatttcgatacggatagcaaagagatagaaaagatagaaattttcggcataaaactttctttcaggcatctgatgcatagaatgccggcagacagtttcaaaccttattttgccggaatacaaaacaagtatgaacgcttgaaatgcgacacgacctatgataccggctattccgaagaactttcgaaaaggcgtatgatagagcgtatcttgatgaaactatcgctgatacagactttcttctttgtttctttcaaagaaaaaaggatgcttattaataatctgataaactattattttaaaatatgatatctaatcattgtgttcaggaacgggttatcctgcctttgggtgatatattgaccgggcagtcggtaagcaaatatctgcgttttctgcaaaagagccggtattggagcagggaggaaatcgacaggtttcagaacgaacggctgcggctgctgattactcatgcttacgggcatgttcctttttatagggaagaaatggataagttgcagttgacacccgcggatattcggacaaaagaagatttacgcctgttgccgattgtaacaaaagccatgataaaaaaagaaggtattgaacggtttaaggctgccggtattcctgaaaaaagtattgtccaaggtgcgtcatcgggttcgaccggtgagccgtttcgttatctgaccacgaaagatgattactcggtgaatattgcagccaatctacgcggctggtatgatatggggtggcgactgggtgacaggtatgtcaagctgagtcagaatccgagaaataatcctgtgaaacggttgcaggattatatgactaacaatctttatctggctaccaacccgttgacggatgagaattttgccaatgtgttgcggcagatagaaagttataaaccccgggtaatccgttgttatcccgacccgcttcttttactggcacgttataaacgtgtgcatccggaatttgcctggtcgcctgtggcgataacaaccaccggcaataccttgtttccggaaacgaggaaagagatagaagaggcctggggatgtaaagtgttcgactcatatagctgtgagggcaattcgtgcgtttttgaatgtcctacgcatacctgctatcattcaacagaagagtatggaatatcggaagtagtggacgaacagggaaatcccgttaaaaaaggggttgggagactcgtatcaacgagtttgtggaacatggcacagccttttatccgttatgatacacaggactttgttgaagtggacgatacaccttgcgaatgcggcagggagcatctaaagatagtacggattttaggtcgggataatgatgtactggtaatgccgtcgggcagacggttcattgtacacaattttaccgtcttcttccagacggatattcccgaactgaaaaggtctatcgaccaattccaagtagtaaagcaaaagagtggttgcgtagtgttccggttagtggtgaacgaaaactatgatacggaagtagggaactatattattcgtttctggcagcaggaattcggtgtaccggttactattgagcttttagcagaacttcctgttctacacaataacaaacgccatttcattatcagcgagtaataaggatattatgaatatacgatacaaattgtgccttttactttattatggttttgccagacatttgccaaaatcgactgtaccggtcattggtactgctgcaaaaagaatgcgtggagcaatatgccgtcatatattgggatgttgcggcagtggcaataatattgagcaaggcgcgtatatcgggaatggaaaagacgtccggataggaaataatgtagggcttggcaggaatttcaaggtgcttatgcgaatgcttactattggtgataatgtgatgatgggagaagatgttctctttttaggaggaggccatcggcatagccgtacagatgttcccatgaataaacagggttcggaaggtaaaactcctttatacatagaaagtgatgtgtggattggtgcacgggttacggtgttgcccggttgcagacatataggacgtggcgcgattatcggtgcttgtgccgtggtaaccaaggatgtaccggattttgctgttgtagccggtaatccggctaaagtgatgaaatacaggcaatgaaaagtacgtttttatagatgtacagtatattaaatggatacggttcaatgtgagccgaaaagagggtcttgaaaggagttttgagccaagtaccgtgattttccgcaatatttaacatacatagaacagatgatatttgtaagtgaaagaatagatgtaacagcttgggaagagctgattgcacagtcttcgacagccaattttttccagacaaaggaatgttatgatttttattcgggtttgtcttttttggaagcttttgtatttggggttaccgagaacggatgtttgaaaggaatagtggttggctatatacaaaaggatggaggaaaactaaaacaatatttctcgcgaagagcaattgtgacaggtggagccttgctggcagatgatatcagtgacaaagctttgtccgcacttttgacctattgcaggaataaattgaataagaaagcaatttatatagagttccgtaattttaaagattacagtttgtatagagatgtgtttcgtgagaatgattttgagtatatacctcatttgaattttcatatagattgcagcagcgaagaagttatacaaaagaatttgcacagtagtaaaaaacgcgacataaaagccggttttagaaagggcgcaatattagtggactctccgtctttggatgaagttcgtgaatattatcggattttagtcgatttatatagaaataaagtaaagactcctctatttccattcgatttttttgagaaattataccaatcggattggggaaggattttattgataaaatatcaaaatcaaataataggtggagtgacatgttctatcttaaaaaataagactttatatcattggtttgtagctggtttggatgaacgttttaagtcaatacgcccttccacattggctacatgggctgctatagaccgaactttaaaggagcggattcctatatccgacatgatgggggcaggaaaagccgatgagaattatggagtacgggactttaaagcggcattcggcggaaagctggtagagtacggacgttttttatgcatcttgaatccggtattatatcatatcgggaaaataggagtaaaaattttaaaaagaataaaacaatgaacatttcgttttttggattaggttatgtaggatgtgtaggcatgggatgtttggcacagaacggccataaagttatcgggatagacatttcttccgaaaagattaaaaaaataaacgaggggatgcctacaattgtagaggcaggtatagacgaaataatcagggaacagcatctgcaaggaagaatcagagctacacacgactacatggaggctgtgagagaaagtgatatttctttcgtgtgcgtaggtactccttctacgaataacggacatttgaacttaaattatatttatcagaccgccgaagagataggagaggcattgaaggagaaaaacggttttcatattatcgtcatcagatcgaccgtatttcccggtacgaataaagcagtgggtaagataatagaggatatgtccggaaagacgcggaatgtgcactttgccgttgtatctaatccggagttcctgagagagggaacggctgtaaatgattacatgaatccgccactgacggtaataggtacggactgtgaaaaggcacgggatattatgacggaactgtatgcaccgatgggtgcacccattgagacggtttctatagaagtggcggaaatgattaagtatgtaaacaattcctatcatgctctcaaagtgacttttgccaatgaaataggaagggtgtgcaaggcatacggcattgattcgcacgaagtgatgcgtattttctgcatggacaaacagcttaatatttccccttattattttaaaccgggatttgcgtatggcggcagttgcctgcctaaagacctgaaagccctgaaaacaatggcgcatgacctgtatgtggaaacgccggttctgaatgccatagaaagcagcaaccagcaccacatggaaaacgccattgagtggattcaggcagtaggacataagaaaatcggtgtattgggattgagcttcaaggcaggaacggatgatatgagaaacagccctattatacatgtgatagaagcattgtatggtaaggggtatgaaataaggatatatgacagaagtgtttctttggcacggctgataggaaagaataaaagcgtgattgaagagaagttgccgcatttgaactgtatgttgcaggatgatatggactctttgctggattgggcggaaacgattatcattagcaacaatgacgagattttcaaatcggtaagggtcagagatggacaggcggtaattgatttggtcaggataaaggagctggagaaagaaaatggttacaggggaatctgctggtaggagcaggaagagtgtatggtttgatatttgccatactccgcaatataatttctataagaatttcatcatccgtctggcagaagaagggcatgttgtgtatctcaccgtattggacagagggaaaatgcctttgattgttcggaaagaactggctgcgtatcctgcaataaagatttatgtgataggcaggcacagacttgcaaaatggtcggctatcgtagatgccaatttgatacggattgtcaaactgtttttatggtcattggataagcggatagatatagcttattccaatgctttcttaagcagtgtcataggtagagtgagaggctttcattcctacacttttgatgatgacccgcagacttttgatttcaggcccaaaatatggttttcgaaaatatctcattactgcctttacgaactgccgcccggttatgtcttgtcttctaaggtaaaagtgttgccggcccttaaggaatgggcatatctggcaccgaatgtgtttacacccgacagaatattcctggataaatataaactgcatcccaaagagtatttctttgtgagggaggtgtcggtaggtacggttaactatacgggacagcatgtgggtgctgttatgggtattgcttcgaaaatacctcatggtaggaaagtgttgctttctttggaagataaatccacgaaagagaggtatcctgaagattggattctgctggaagagccggtcgagggcatccattctcttatttattatagttgtgctttgatatcttcgggagacagcatggcgcgtgaggctgctttattgggagtgccgtcgtattatttaggaatcagatatgatatgccggcaaatcgtgctgcatcaaggctgggaattttgcataaccggaaaagcatggattttgaggaatggataggccgctttaaagcaaaacaggattatgccggagagcaggagagagccagggataccatcaatcatttatttatagatgtaaatgagtacatgtattcgtttgtggatgaacttgataacagaaaaagcaataatggatttcactcttaaaacttaccggtctcttttatccgcactgaggcgggcaggttataccttccgaacatttgaagaattcttatcagttcctgctgacggtaaagtagtgatattgcggcatgatatcgataaaagaccggagaatgccttacggttggcacagatagaacatgcctcgggcgtgaaggcttcttactacatcagggtagtaaagggtacttggaatgaagaaataatagaacaaatagtagctttgggacatgaaatgtcttatcattacgaagacctgacgattaccaaaggcaactacgaaaaggcttttgaacatttcaaggtacatttggccgaaatacgccgtttttatccggccaagactgtttgcatgcacggaagtccgctcagcaggtgggataaccggaaactgtgggagaaatataattatagagaagcggggattatcggagaaccgtattttgatgtggattatacgaaagtactctatatcacagatacggggcgggcatggaataagacaggtgcgagtgtaagggataaagtagaaggcggcttggaactgaaagtcaaaaatacccgccgactgattactttaatcggtaatgacgagcttcctgaaaagctgattatcaatacccatccgcaacgttggtttgattttggttggggatggatgaatga

SEQ ID NO: 4192 - DNA, 4078 bp, Unknown
  gut microbiota DNA sequence
tttgtactatgtgtcctggcgggttgtgcgtcgcaaaaacagatttcgtacctgcaagatgtgccggatgactatcggcaaaagataacccaggattatgacctcaggattcatccggatgatttgctttccattatggtgaacagtaaagaccccgaactggcacagatgttcaatctgccgatggtaagttatcagatagctaacagcaatacaggatatgcaggaggacagaaccgggtattggggtatctggtggacaaagagggaaatatcgactttccgcagttgggagttatcaaagtacagggaatgacacgtgcagaactgacaaaatatatcaaaagccagttgatagaaaagggactggtaaaagatcccatcgtaactatccagttcctgaacttcaaagtatcggtattgggggaggtgaaccggccgggaacattcgagataaccagcgaccgcatcaccttgctggacgcattgagccttgctggcgacctgaccatttacgggcagcgcgagaatataaaggttgtccgggaagaaaacggagagcgggtagtggtttcgctggacttgcggaacaaagatttattgtcgtctccttattattatctgcaacagaatgacgtagtgtacgtagaacccaataaggtaaaggcaggacaacgggagataaaccaaaacagaaccataggtacgtttgcttccatactatcggtaatggtatccttggccgtgcttatattcaaataaaaaacagtaaagaaaaagtttatgggaaaagacaggtttgaagatttggacttcatagattttaatgacagccgccggcaggagggcacggtgattgccgatatgctgtcggcagtgtatcgcaaccggaaatggttcatcctctccgtagcggtgtgtgtcctgataggttttctgtatctgaaaagttctccgaagatatttttgcgtaccgctacggtattggtgaaggatgagcaaaaaggcgggggtgtcaatggtgcggctgcttttcaggatttgttttcgttaggcggcagcacggtagataacgaagtgggtatctttaaaagtaagcggctgatgcggacggtagtcgaaatactgcatctggatataagttataaggagtgggacgggctgagaaagaaggaactctatacgtccacgccgtttgccgttaccttccttgatgcaactccttcacaacagataagccttactgttacgatgtcggacaatggaaaggtgacgctggcggatatgaccctgcaaaatgaagaggaagaagaggaatttgacgaaatcctgaccgtgcagccgggagatacggtgaatactccggtgggaaaaatggtggtggcatcgacactgtttacggacgaaaacagcataggcaagacggtctacgtgacgaagggaaatatgaaagaagtagcggagtcatataacaaggctttgaatgtaggggtggcaaacaagcagtcgtcactgatagccctgagcatcgaggacgagaatgtgcagcgggcggaagatttactgaatacactgattgaggtttataagaacgatgccatcgaggataaaaacaggattgtgataaataccgccagatttatcggcgagcggttggagataatcgaagccgacctggctgccgtggatgcggaaattgagaattataagaaaaagaacagactgacggatattgcttcggaaagcgccttgtatctgcaaagttcgagcatgcttgatacggaagggttaagcgtggaaaatcagcttaatatggcgcaatatatgaaggaatacttgcaggataactcgaagacgacagagcctgtccctgcaagtatcgggatagatgatatgggagtgcagaacctgattatggagtacaacacggtgctgacgcgcaggaacaagctgatagccaacagtagtgccaataatccgctcgtgcgtgacctgaacggtacgctgatgtccatgcgcctgtctatcgcaaaagctgtggataacctgatagcaagtctggagatacaggtggcgaatatgaagaacaaggagcgggagaacagcaataagatagcattcgtgcctactcagttgaagtatgtggtaagcatagaacggcaacagaagataaaggaagaactgtatctgtttctgttgaataaaaaagaggaaaatgagctccagctttccattacggagagcaattgccgcatcatagatccggcagaaggtgtggacttgccggtagcacccaagaaggtgcaggtagcgctgattgctttgctggcggggattatgctgcctgccttgtggatttatatccgctcgctgctcaataccagcgtgcatacgaagaaagaactgaaagcgggtgtgaacattcctttcttgggagaagtgccgcttgaaaagaataagcatgagaaagatatcgtggtacaggaaggcagcagggaaagcatttgtgaggccttcaaaatagtgcgcgataatctggactttatggatacggaaaagaaaacggtgggaaaggtagtgctggtgacttcggcaaatcctgattccggaaaaacctttattacgcttaatctgggcatgagcatggcgctggcgaatgtaaaggtagtgattctcgaccttgacctgcggaaaggttctttgagcaaaagcgtagggataggtatgaaaaagaccggtgtatcgaactacctgagcggcaaggtggatgatgtgaaagaactggtgcaggtgtgtggagatgataacaggctgcatatcattacatcgggagcgctgccgcccaatcctgcggaattgctgaagagcggcagactcgaccggctgctggaggagctgaaaaagaattatgattatatcttattggataacccgccttatggtgttgtggtggatacgcagttgtgcggacggttggcggaccagacggtgtatgtagtccgctcgggcttgttcgacaagcggatgttaccggagttgcaggaactgtatgattcgggaaagatgaagaatatgagtattctgctgaacggaatagattatgtaaagacaggttatgggtatggctacgggtatggttacggcaattacgggaacgatgaaaaccggaagaacaagaagccgctgtacaaaaggatatttggaatttaaacgctatgggtatgtttttcttacgacataaaacaaagttggcggatatcggtttcttcagggattttgtggatagtcacagccatatccttccgggtgtggacgacggcataaggacgatagaggaatctctggcggtgctggcgtacttcgactcgctcggagtgaagaaggtgaggctgacgcctcatgtgatgaatggtgtggaacactgggaagatgtgttgcaggctttcgatacgttgcgcaagcgctataccggagaaaccgtgcttgaactgggggctgaatatatgctggactccggcttcagggagaggttggggaagggattgcagcctttgtgtggggattgtgtattggtagagacgtcttatttttctccaccaaacaatctggacgagctgttgtacgatgtatcgcttgccggatatacgccggtgattgcgcatcccgaacgttatctttatatgaggtacggtgattattgcgaattgaaggacaagggctatctgttgcagctgaacttgctttcgctttccggttattatggaaaacaggtgatgaaaaatgctgaaacattgctggaaaaaggtatgtacgacatggtagggacggatttgcataatctggagactttcggaaaatggataggaaatgtgaggctgacggataagctggcgagggaaataatgtctcttcgctgactgtcaaagtccgcaatgagttaggaagctccggagacctgtgcttttgcaggtttccggagcttctgtcgtttttggggtatttagagttttctattaaaattgtgagagttgttttgatatatttccgtatctttgccccattattgaatattgaacca

SEQ ID NO: 4193 - DNA, 870 bp, Unknown
  gut microbiota DNA sequence
ttggattggctatatgcctcctgtggaagatttggaaaatcccaattataaatttgcaacggaaatattctcagaagacgggaaagttctgggaacttattcttatagcaaggagaaccgcgtgtttgtgggatacaatgatttgtcgccccatattatcaatgcgctgattgcaacggaagacgtacgctttgccgaacattcggggattgatgccatcgcgctgttccgtgccgtggtgaagcgtggtattctgatgcagaagaatgccggcggtggcagtacaatcagccagcagctttccaaacaactttattcgccaagcgccgacaacatagtggaacgtctgttccaaaagcccatcgagtgggttatagccgtgaagctggaacgctattataccaaagaggaaattcttacgatgtatctcaataagttcgacttcctgaataatgcggtgggtataaagactgccgcctatacctatttcggttgcgaaccgaaggatttgaaaattgaggaagccgccacactggtgggtatgtgcaagaatccttccctttataatccggtacgttataacgaacgttcgcgcggacgccgcaatgtggtgctcgaccagatgcgcaaggccggatatatcaccgttgaggaacgggattcgttgcaggcattgccattgaagctgtcctatcatcgcgtagaccataacgaaggtcttgcaacgtatttccgtgaatacctgcgtggtgtgctgaatgccaagaagcccgataaatcggactatcgcggctggcagatgcagaagtattacgaggattcgctcgactgggaaacaaaccctctgttcggctggtgcgaaaagaatac

SEQ ID NO: 4194 - DNA, 3411 bp, Unknown
  gut microbiota DNA sequence
tatcttctgttcgcccaacacggtggatgtctacaatcctaaaaccgtacaggctaccatgggcggcatcgcacgggtgaaactgcattatatttccctgcccgaacttattgcttcactggaagacataccggtatacggcactttcctggacggagaaaacatgtatacacaaccgctttcggcgtacggactgatagtaatggggaatgagggcaacggcataggagatgaagtgaaacggctcatcaaccggaaactgtacattcccaattatccggcagaacgcgaaacttccgaatctttgaatgttgccattgctaccgcagtagtttgtgccgagttccggcggcaggcagcaatgttgtagtgtcaaaattagggaaatagacaggcattagtccgcaacttccgtcaataaaggatggcggagttattaataaattccgagaagcgtttgtcaaggagaaaattgtgtcaggttctttcaactcgttttgcgttaaaagaacgattgctcccggcagccattccacattttctatctcttcggtcaatggaaataaacgtacaaccatcccctcttccgtctctatcgcatattgtttgagataaccgtatgcgggcaggaataaaaaatgtgaagcgaaacgtttcattgtttttctgtggtttggcgcaatcttggacgcggacgcctttcagagcgttgacggacggtatctttctcttcactctgccgcttcagttctgccggtttgcccggaacgggttctttcttcagttctttgtcgcctgcctcaaggctatctgccggggccttgaacaaggtatcctttgcgtggtagcgcatcaggctgatgcggtctgccaacacatcccgtgtggattgctgtgcaggataatagataaagcctcgtatttcttttatttctcccaatgtgtcggcaaataaagaaatagtctccgtgcccgattgctttaccttgagcatatcgttcagcgtatctttggcataaagaacctgcattgccattaaaggtgcgtgcagactgtcgggtgttccgttcaggaaacggaaacggactgtccaacgcagcgtatctctgtccttgaaattggtgtccgaaggaagtgtgaaagtcagtttgttatccatcggagttccggtaagataacagatatgccggcctctccatacgtctatactgtcgcccggagaagattctttgggcttgttgtcgcgcaaggctattaaatgattgataccgtccctctcggctttcaaccgctggtttactttttcgtagacttttgtaagggcatccggatggcgggcataccacaccatggaagtatcgaagtcggcctgggtaatgccgtgtttcctgtaaaccgattcaatgtacagcacacgcttataactttcgctgtaaggaacctcctctcccattgcctttgcaatgtggaagtcataaagtacgttttccattttggcgtccgatataaccgtatcaggtcttttaacctgacatgccgtcagaccgaacgccagaaagattacgctataataccattgaatccgtcttttccttttcatgatttctttataacatgataggaatcattcaaatacttactgtagaagagcaacagcgctatgataccgcaactgattgccgcatcggcaaagttgaaaatcgggctgaagaagatgaaatggtctccacctatgaacggcatccacgcaggccagtttgtttcgataatagggaaatagaacatatcgaccactttaccgtagagcagcggagcgtatccgccgccttcgggcataaaggttgccagttgcgaataggtgctttcattaaacagcactccgtagaatacgctgtcgatgatattgcccagcgcacccgtcaggatgagcgagacacagacaataaaccctgttttcattccatgctttatgaacttgtacaggaaccagcctatcactcctaccgcaacgattcgaaatgaagtaaggaacaatttcccgaatatctccaaaccaaaagccataccgttgttttcggtaaaataaatgtaaaaccaatcggtgatgcgtatgctctcatgccaatacatgtgcgtctttacaatcaccttgattacctgatcgataatcaataccgagaaaataacgagtaaggctatccgccctttcgtgaaaaaattcttcatccttatttcttgccgttgtttttagcttcgatgctcaatgtagcatgaggcactgcacgcagacgttcggcaggaatcagcttgcctgtttcgcgacagataccatacgttttgttctcgatgcgtaccaaagcggcctgcaatccttggataaacttcaactggcgttgtgccagacgggtcgtttcttccttggacaaggtgtttgccccttcttccagcactttgtacgttggagatgtgtcgtcggtgtcattaccgtccgcacctgtcaggctggctttcagcaactcatagtcgcgttgcgccaactccaacttttccagaataatggcgcggaattcttccaattccgcatccgagtatcttgtcttttctgccataactttacgtgtttaatcgttagtattaataattcattctttcacaacgcttacatacagtctgaaatcgtcgaattcgagttccgttccgccttccacattgtccgtcagcgtcagtgatgttcctaaaacctggttacaaatatagtctttatattcatttaccgcatcatccgtttgcggattttttgataatgtaatctttattttgtccgttatctcaaagccgctcgacttgcggatattctggatacggttcaccaattcgcgggcaatgccctcgcggcgaagctcttcggtgatggtaacttccaaagctacagtcagcttgccttcattggccaccagccatcccggaatgtcttcactgaagatttccacgtcggatgtctcgattacggcttccgcaccgtccagattcagcgtataggaaccgttcttttccagctcggcaatggcttcctgcggcattccggcaacggctgcggcaacggctttcatctgcttgccgaatttcgggcccagcttcttgaagtcgcacttcactttcttcacaagcacaccggctgcaccgtccacaaacttgatttcctttacgttcacctcgttcatgataagtgtttttacggcttcgatgtgggcgcgttgctcttcgtccactaccggaaccatgatgcactgtagcggttggcggactttgatgttcaccttacggcgcagcgccaataccatagaagtaacgtcctgtgccatttgcatgcgtgcttccagctccttgtctatcatctcttccttgcattcg

SEQ ID NO: 4195 - DNA, 1693 bp, Unknown
  gut microbiota DNA sequence
cgaccatatacaaggtatattcaatcgctgtatcaatcatgccagccaagttatgatagataatattgcctctaagtccttatatttcgacgcagaacaggctgataaactggaacagcaagaatatgttcgtaccactgatgagttggtgcagttatatattcgttattctgtgttgaatgatattcaatatttttattctgtatctgatttcttttgggaaagcggtttttatgaatccttgaaatccgatgagaaaagaaaatacatgtcgtttaatcctctttcatttgattattcccggtatgagcaagataatacggtttatgatgaagaactgccttatttttctgtaatagttaaaactgttgtattggaaaaatattctgcgtacttgcgaaaaaagaaagaaagtaaggtgcaagcggaaatgcagccacaacagaaagagccgcaaccaattcaagataaatgccaagagcctaaaattatctcccatattgctgaaacagaaaatccgtttaagtctattttaaacgacagacaaatagcattgttggtggattgtatcaatgaagtggaaattttcaatgctcctatgacttttgaagatttgaaagcaatactttcctgtaagccaaaagttatatttaggtctaataacaacaggcaggtagcttttcttttttcggaattaagcaatcgtggtttgataacacctaactggcaatctgttatagcaaagaataagttgtttgttacgaagaatataaagaaagataaatatctgaatcaaggtgatttagccacagccgccaattatgtaaaaggggtggaacatgaaaaagattatgtaaccatcagcaattatatcaaacaactgaaaaaactttaagaataggttaatacctcaaacatagcttaatccactatcaagctattcctcaatacttttgcccccgtaatcgattacaagaaactggagggcatgcactccatattgtctaacgcaaatacttttgttatatggaaacaagtattgagaagcgagttgcagaactcgaaaatttagtgttcctttcaaagaatgtgcttagttttgatgaagcgagcaagttcttgaacctttcaaaaagttacctgtacaagctgacttcgggtaacttgataccccattacaagccgcagggcaaaatgctttattttgagaaagcggaattagaagcgtggttgcgtcagaacccggtgaagacgcaggcgcagatagagcaggaagcgcagaaatatatccttaaccgtcccttaaagaaatagcggctatggaaaatagaaaagcgacagaagccgggcaggatgtcaccatgcagaaagaggattttgcagccctttggaaaaccatccatctaaaggtgacggacacttacgaagtgccgcccgaaatactctgggtgaacggctctaccattggcacgctgggtaatttcagcgcatccacaggaaaagccaagagcaaaaagacattcaacatttccgccatcgttgcggcagcgttgaagaatgacgaggtactgaagtattcggcatatctgccaccgaacaagcggaaaatcctctatgtagataccgagcagagcaaataccattgccataaggtcatggagcgtattttgcgacttgccggactgcctaccga

SEQ ID NO: 4196 - DNA, 42276 bp, Unknown
  gut microbiota DNA sequence
actttatccattgattaatatcgaaaagccatcgataaaactacggaatgcttataggaaaaccccgttttgcagttgcgggccgcacggggggcaattgcgggctctgcggtttccatatgcgggctgtacagcccgcagctacgggacgaagaaaacaatactctataaccgggttttacctacggtatctctgctttatatcgcagagacaccgtagaaaaacaccggcaaaccggatgctccgggccggagttcggaacggtttcccaagtacttttacttatattcgtcccaggccctgatagccaaatcgtccggtgtcatggtgcagaaggcattgataaacgcacttgccagacgtgcattcgttatcagcggaatattgaggtcgatagcggcgcggcgtattctgtaaccgttgtccaactcgcccgcggtgaggttcttcggaatgttcaccaccatatctatctcttttctgtgcagcatttcgagcgcctgcgggtgcatgtcgggctcgctcggccagtagacacgggtgttctccaccccgttctcggtaaggaacttgctcgaaccgccggtagcaaacagtttataccctttcttttgaagcatgcgggctgcggaaagcatgtctaccttctgcttcggcgtaccggtggagagcaggatattcttctgcggaatacggtaacccaccgaaagcatcgctttaagaatagcgcaggaagtatcactgcctatgcaccccacctcgcccgtagacgccatatccacgcccaatacggggtctgccttttgcaggcggttgaaggagaactgagaagccttgattcctacataatcgaggtcgaacaggttcttgtccggcttctgcacggggatgccgagcattactttcgtagccagttcgataaagtttatcttgagcaccttgcttacaaaggggaatgaacgcgacgcacgcagattacattcgattaccttgatgtcgttgtccttggcgagatactggatattgaacgggccggagatgttcagctcgcgggctatctcgcggctgatgcgcttgatgcggcgcaccgtctccacatacagtttctgcggcgggaactggatagtcgcatcgccggagtgcacgcctgcaaactcgatgtgttcgctgatggcataggcaacgatttccccgttctgcgccacggcatccatttccacctccttggcatgctctatgaactggctcaccaccaccggatgtttcttcgagacgtttgccgccagttgcaggaaacgttccagctcttcccggttggagcagacgttcattgccgcgcccgaaagcacgtagctgggacgaaccagcaccgggaagcctaccttatcgacaaaggcgttgatatcttccagcgaggtgagcgcacgccattcgggctggtctacgccgatgcggtccagcatggcagagaacttgtcgcggtcttcggcgttgtcgatgctcctggcgctcgtaccgagaataggcacgcgctgcgcatcgagacgcaaggcgaggttgttgggtatctggccgccggtggatacgatgacgccgtgcggattctccagttcgagaatatccatgacgcgctcgaaggtaagctcatcgaaataaaggcggtcgcacatgtcatagtccgtagatacggtttcggggttgtagttgatcatgacgctgcggtagccttccttgcggatggtgttcaatgcctgcacgccgcaccagtcgaactccaccgaggaaccgatgcggtacgcacccgaaccgagtacgacgatggatttacggtcgcccaggtaatgcacgtcgtgggcgatgccgctgtacgtcaggtacagatagttggtacgggcgggatattcggcagcaagggtgtctatttgtttcactacgggcagaatacctgcatgcttgcgcagggcacgtatggcaaggatggcgtcctcaccgtccatataccgttctaggccgaaagcgcgggctatctggaaatcggagaaaccctgtatcttggccttgtgcaacagttcccgcgcggctttgtcattcaggagggagtgaagcatcctttcaccttgtgcggcttccgacgtaccttcaccttgtgcggcttccggttcatcctgcaccttttccgaatattcgtgcagcgccctgctggtgtccattatattcatcagcttttcaaggaaccagcggtctatctttgtcagcgcgtgcacctggtctacggtatatccggcacggaaggccttggagataacgaagatacgcttgtcggtaggctcgcgcagcgccttgtctatgtcggggataacaagctccctgttctccacgaatccgtgcatcccctgtcctatcatgcgcaaccccttctgaatggcttcttcaaaagtacgtccgatagccatgacctcgcccacggacttcatgctcgaacccaattccttatctacgccatgaaacttgcccaaatcccaacggggaatcttgcagaccacatagtccagtgccggctcgaagaatgcgccggtggtcttggttacggagttcttcaattcgaaaaggccgtagcccagtcctaatttggcggcaacgaatgccagcggataacccgttgccttagaggcaagtgcagacgaacggctcaagcgggcgtttacctcgataacgcggtagtcctcgctttcggggtcgtaggcatactgcacgttgcactcgcccacaatgccgatgtggcggatgatgcggatagccagttcgcgcagtttatgataatccgtattgctcagtgtctgcgacggagcaatcacgatagactctccggtgtggatgcccagcgggtcgaagttctccatgttgcacaccgtgatgcagttgtcgaaacggtcgcgtaccacttcgtactccacctctttccaaccgcgcaaggatttctccaccagcacttgcggggagaaagagaaagccttttccaccagtacgttcagctcgtcttcgttgtcgcagaagcccgaccctaacccgccgagcgcataggcggcacggacgataaccggatagcccagttccgcagcggcgcggcgggcatccgcagcattctccacagcctcgctccggatggtctttacattgatttcgttcagcttctgtacgaatatctcgcggtcttccgtatctataatggcctgtacgggcgtaccgagcacctcgacgccgtattttccgaaaacaccttccttgtaaagctccacaccacagttcaaagccgtttgtccgccaaaggcgagcataatgccgtcgggacgttccttttcgataaccttctccacgaagtaaggggttacgggcaggaagtaaatccggtcggcaacgccttccgaggtctgcaccgtggcaatgttcggattgatgaggacggtgtggataccttcttccttcaatgccttgagcgcctgcgaaccggagtagtcaaactctcccgcctcacctattttcagtgcaccggaccccagcagcaggactttctttatattgttctctttcatttgtcttgatttgattgtaccaataatttgttttcacacgtatccgaatctttttcgataccgataaaacggttatagcagttttacgaactcatcgaacagaaattccgtatccgtcggtccgctggccgcttcgggatgaaactgtgcggagaaccacggattgcgcttatggcggatgccttcgttggagccgtcgttcatattgacgaagagcggttcccagtctgcgcccagcgtgttgctgtccaccgcataaccgtggttctgcgaagtgatgaaacaacgctccgtacccaccatgcgtacgggctggttgtggctgcggtgtccgtatttcaatttgtatatttcggctccaccggctttggagagtagctgattgcccatgcagatgccgaaaataggcagcttctcgttctgcatcgccttgcggatgttccggacggcggcatcgcaggtatcggggtcgccgggaccgttggagatgaacagcccgtcgaactccagtccgttgaagtcgtaatcccagggaacgcggattacttccacatcccgtttcaagaggcaacggatgatgttggccttgacgccgcagtccacaaggagcactttctttctgccctcgcccgtgttgtagcggataacttccctgcaactcaccttatccacgtagtttacacccgcataagcagcttggggcacattatcgggatcgtcgtcaaagacaatcttgcccatcatcaccccgtgctcgcgcagcactttcgtcaactcacgggtatcgatgcccgtaatgcccggcacttgttcgcgtttcagccagttgccgaggctttccacggcattccaatgactgtagttaccggaataatcgcttacgataagggcttcggcgtggatgcgttcgctctccataaatacaggcagcccgtcgggggcgaaggtaaaaggcggcacaccgtaattgcccgccaagggatatgtaagcgtcatcaactgtccggcatacgaagggtcggtcaggctttcgggataacccgacatggcagtgttgaacaccacctctcccgctaccggcttttcataaccgaacgacttgccgtgaaaacggctcccgtcgtcaaggataagagtcacatttctcatattcagaattgatatacttgttctatgtaattaataaatgccatgttcagcaacttcacaccgcccggcgtgggatagtcaccgctgaagtaccagtcgccccggtgccgcggacaggcttcatgcaggccttcaagaggctgatatacaatctgcacttgggctttcgtgcctttcggagtgagcagttccaccattttggcggaaatctcttcgtcggtaaagggagcgtatatctcctttacgtagttcaccatctgttctttgggcagactcacctgttctttggacttgcggtaggcggattcgatgacatcgcgcatctcgcgttctttcagcaactcgatggcagccttgaaagctatgaactcgctcatcttcgccatgtcgatgccgtaatagtcgggatagcgcacctgcggtgaggagcttacaattactatcttcttcggaccgaggcggtcgaggatgccgatgatgctctgcttcagggtagtgccgcgcacaatgctgtcgtctatgataaccagattgtccgtgccgggcacgaggctgccgtaagtgatgtcgtacacatgggcggcaaggtcgttgcgactgttgccctcggcaatgaaagtacgcagcttaatgtccttaatggccaccttctcgctccgtatgcggcgggacaggatacgctccagctcatcgtggctggggttgtgtcccaaagcggcaatctgccgcaccttctcctcgttgagatagtcgtccagtccctgcaacattccatagaaagccacttccgcagtattcggtataaaggaaaagacggtgtggtctatatccttgtcgatggctttcaggatgttggacaccagtttctcacccaacagtttacgttccttgtagatgtccatgtcactgccgcggctgaaatagatacgctcgaaggagcaaggcttcacctcgcgcggcttgttgatttgcaccgtgcggagcttgccggctttgttgattagcaaagcctgtcccggttgcagctccctgatgcggtcggctgagacgttgagcgcggtctggatgacgggacgctcgctggcaagcaccgctatctcatcgtcctgataccagaatgcagggcggatgccccacggatcgcggacggcgaatgtctcgccgcttccggtaagtccgcacatcacatagcccccgtcccactccttgctcgaggtgcgcaggacgttggcgaggtcgatgtggtcttcgatgtaatgcgtgatgtccatgcccgtcagtccttcggcttcggcaaggttgaagaggcgctccacctcgcggtcgagccggtggcccacctgctccagcatgatatacgtatcggcatacttgcgcgggtgctggccgatggcggtgatgcgtgcgaagatttcatccacgttcgtcaggttgaagttgccgcacagggcaaggttcttggcacgccagttgttccgcctgagaaacggatgcacgtacgagaggcccgacttccccgtggtggagtaacgcagatgccccatatacacctcccccgcaaaggggagcacgcgcttggcatagccggcgtcgtgcagttgttctttcgtaaggtctttaaagttgctttgcaccgtgccgaatatctcggtgatggctcccgaaccgagcgcccgttcgcgaaacatatattcctcgccggggttcgcttccagtttcacacaagccagtccggcgccttcctgcccccggttgtgctgtttctccatgagaagatagagcttgttcagcccgtacatccatgtaccgtacttttcttcgtaatactccagcggtttcagcaggcgtatcatggcgacgccacattcatgcttcagttgttccatttatatatttactaatgagttattacttcttttaaaaacgcgttatttatgttctgagaacatatcatctgtcaagggcaaacgcattatctgttttacccatacacatcatccgcttccggtcattccaccgttaccgacttggcaagattacgcggtcggtctacatccatgcctttacatacggctatgtgataagcgagcagttgcaagggaaccgtagttattaacgggccaagacattccattgtttcgggaagttcgatacaaatgtcagcgattttaccgataaccgtatctcccttggtaacaatcgctatcaccctgcctttgcgcgctttaatttcctgtatattgctcagtactttttcgtacaatccgttctgtgtggcaataaccaccaccggcatttccgcatctatcaaagcaataggcccatgcttcatttcggcggccggatagccttccgcatggatgtacgagatttctttcagcttcaaagcgccttccaacgctacgggataactgtaaccgcgtcccagatagataaaattgtgtgcgtaagtgaagattttggaaagctccgctatacggtcgttcagcttcagcacctctttcatctttccgggaatctgtccgagttccctcactatggcgaggtattgcgtttcatcaatcgtacgcttctcccgtgcaagagtcaatgccaacatggtgagcacagttacctgacctgtaaaggctttggtggacgccacacctatttccggccctacatgaatgtaagaccccgtattcgtagcgcgcggaatactcgaaccgatagcattacagatgccatatataaatgcaccacggcttttggcaagttctatggcagccagcgtatcggctgtctccccgctttgcgaaatggcaatcaccacatcactactgtcaatcaccgggtcccggtaacgaaattccgaagcatactccacttccaccggaatgcggcagaaactctctatcagatgtttgcctataagcgcagcgtgccacgacgtgccacaagccacaattacaaaacgtttggcagcaagcagacgttccttataatctataatggcggaaagcaccacgttagtaccctccagattaatgcgtccgcgcatacagtcatgaatacaatcgggttgctcaaaaatctccttcaacatgaaatgcggataaccgcccttctccaactggccgagattgagcgccaccgtctttacctcgtgcgggcactccacattcttgagattcaccactttcagtttctccccacaacgaataacggctatctcctcatcttccagatagaccaccttgtccgtatattccacaatcggagtggcatcggatgccaagaagaattcatcctgcccgatacccaccaccaacggactgcttttgcgcgcagcaataatctcatcaggattctccctgtcgagcacggcaatggcatatgcaccgataacctcctgcaaagccagttgcacggcagtcagtaaatcgatgcggtttataacctgaatgtattctatgagttgtatcagtacctcggtgtcggtactacttttaaaagtatagcctttggcttggagtttgtctttaagggcggcgtaattttcaatgataccgttgtgaataagagcgaatctttcggaagaggaataatggggatgagcgttaacggaacaaggttctccatgtgtagcccagcgggtatgtgcaatacctatactaccggaaatatctttttgagtaacgaaagtttctaaatccgaaacctttcctttcgtcttgtacacgttcagttctcggtcatcactgattaatgctacccctgcactatcgtatccgcggtactccaaccgcttcaaacctttgataagaatggggtaggcttttctttgacctatatagcctactattccacacataatatatcagtatttgatttgcgctgcaaagatatatattctttagaacataaagttaaccttttcactatttatttgtcaaaagagtagaaaaaagttattttattatcaaaaagacaaggaaaataatattttaaaagcaaaaggtctaatttataatcttaaagcaaacagacgaaatctgatttaagattagaagaaaacaaagggtattttctatcagattataacttcatcccccggtgtaagtatttagcaaggcacaaatcgaggaatattgttatcaatttgaaactaaatatatatatttgcaaaacattttgatacaacaaataggtattacataaattagagtaaaccaaaaatggaaaacaaagagctttttaacaacaaaacaaaggaacaacccgcacaacgacagcccatgcagttgggcctgtacgatgccaccaatgaacacgacgcttgcggtgtgggaatgttagtgaacattcacggcagcaaatcacatgaattggttgaatccgcattgaaagtattggagaatatgcgtcatcgcggagcggaaggtgccgacaacaagaccggagacggcgccggcatcatgttgcaaataccgcacgaattcatcctgctgcaaggcatccccgttcccgaaaaagggaaatacggaacaggactgctttttcttccgaaagatgagaaagaccgggcagccatcctgagtatcatcattgaagaaatagagaaagaaggattgacgctgatgcacctgcgcaatgtgcctacctgccccgaaatactgggtgaggccgcacttgccaacgaacccgacatcaaacaaatcttcatcaccggatttacggacagtgaaaccgccgaccgccgtctctatataataaggaaaagaatagaaaacaaagtacgcaggtcggatatagccgcacgagaggatttctatatcgtgtcgctgtctacgaagaacatcatctataaaggtatgctctcttccctacagttacgtaactacttccccgacctgacaaacaactacttcaccagcggactggctctggtgcactcccgtttcagcaccaacaccttccctacatggggactggcacagccgttccgtctcttggcgcacaacggtgaaatcaataccatacgcggtaaccgcggctggatggaagcgcgtgaaagcgtcctgtcctctcccgcccttggcgacatcaaagaactgcgtcccatcatccagccgaacatgagcgacagcgcctcgctggacaacgtactggagttccttgtcatgtccggcctcagcctaccgcatgccatggcaatgctcgtaccggaatccttcaacgaaaagaaccccatcagcgaagacctcaaggccttctacgaataccactctatcctcatggaaccttgggacggacctgccgcactactcttcagcgacggacgctatgcgggtggtatgttggatcgcaacggtctgcgtcccgcacgctaccttattacgcacaacgacatcatggtagtggcaagtgaagtcggcgtaatggatttcgaaccgggcaacatcaaagagaaaggtcgtctgcaacccggcaagatacttttgatagataccgagaaaggcgagatttactacgacggcgaacagaaaaagcaacttgccgaagccaagccctaccgcacttggctcgccagcaaccgcatcgaactgaacgaactgaaaagcgggcgcaaagtgccccacaacgtggacaactataacagtatgctacgtacgttcggcttctccaaagaagatgtcgagaaaatcatcctacccatggcatccaacggcgccgagcctgtcagcgcaatgggtaacgacaccccgcttgccgtactttccgacaagccgcagctactatacaattacttccgccaacagtttgcgcaagtcaccaatccgcctatcgaccctatccgcgaagagttggtaatgtctctcaccgagtacatcggcgcagtgggcatgaacatactgacacccaacgaaagccattgcaaaatggtacggctgaaccaccccatcctgacgaatgcgcaattggatattctctgcaacatccgctacaaaggcttcaagaccgtaaagctgccgatactgtttgaagtctccaaaggacgttcaggactgcaggaagcgcttgaccgcctgtgcaaggaagccgaagagtccgtcaccgaaggcgtgaactacattgtactgaccgaccgcaacgtagataccgtccatgccgccatcccctcattgcttgccgtatcggcagtgcaccaccacctcatttcggtaggaaagcgcgtacagaccgcattggtcgtggaaagcggcgagatacgcgaagtgatgcacgccgcactgctcctcggattcggtgcaagcgcactgaacccctatatggcatttgccgtactgaacgaactcgttgccaagaaagaggtacagttggactatgccaccgcagagaagaattacatcaaagccatttgcaaaggcctgttcaagattatgagcaaaatgggtatcagcaccatccgctcctaccggggcgcaaagatattcgaggctgtcgggctgagcgaagaattgagcaacgcttacttcggcggattaaaatcggctatcggcggcatccgtttggatgaggtggcacgtgacgccatcacttttcacgacgaaggagaagcgatgaaaaaggaagaaacgcgcatgaagaatgatggtggtgaagctcccctattgccgaacaaaggactgtacgcataccgtaaggacggagaaaagcacgcttggaacccagagactatcagtaccctgcaaatagctactcgtctgggcagttacaagaaattcaaagagtttacccgcttggtcgatgagaaagaaaagcctatcttcctgcgcgactttctcgacttccgtcacaaccccatttccatagacagggtggaaccggtggaaagcattctgaaacgtttcgttacgggcgccatgtctttcggagccatcagtcaggaagcgcatgaggcaatggcggttgccatgaataaactgcacgggcgaagcaatacgggtgaaggcggtgaagatgccgcacgcttcggaactgaaatgcgcagtgccatcaaacaggtagcatccggacgtttcggggtcactacggaatatctggtgaatgccgacgaaatacagataaaagtggcacaaggcgccaagccgggtgaaggcggccagttgccgggattcaaagtagaccaagtgattgcccgcacgcgccactccattccaggtatttcattgatttctcccccgccccatcacgacatctattccatcgaagacctggcacagcttatcttcgacttgaagaacgtcaatccgaaagccaaaatcagcgtgaagctggtagccgaaagcggtgtgggaactatcgccgcaggtgtggcgaaagccaaagccgacctcatcgtcatctccggcgccgaaggcggtacaggcgcatcacccgcaagctccatccgatatgccggcatctcgcccgaactcggactgagcgagacgcaacagacactggtactgaacgggctgcgcggacaagtgctgctgcaagtggacggacaactgaaaaccggacgcgacgtagtactcatggccatgctcggtgcggaagaatacggtttcgccaccgctgccctcatcgtattgggatgcgtgatgatgcgcaagtgtaaccaaaacacatgtcccgtaggtgtagccacccagaacccggaactgcgcaaacgtttcatcagccgtagcgaataccttgtgaactactttaccttccttgcccgcgaagtacgcgagtatctggcagagattggagtggaaaagctggatgatatcatcgggcgtaccgacctcatcatccgcagaccggatgacggcatcaagaaacatcaactcatcaacttcgacaaagtactggcgcgtgtggacaacggagccgccatccgccacatcataaaccagcaacacggcatcgaccgcgtaaaagacgtggaaatgctgaatgccgccgccaatgccgtagacgaacagaaagaagtttctctcgaatataccatcgccaacaccgaccgcgcctgcggtgcgatgctctccggcgctatcgccgccaagtacggcgcaaaaggcctgcccgaacatacactgaacgtcaagttcaaaggctcggccggacagagtttcggagcattcctcgtaccgggtatcaacttcaagctggaaggtgaggccaatgactatctgggcaaagggctgagtggcggacgtatcgccgtactaccccctgtacgcagcaacttcgaggccgagaagaacacaattgccggaaacacccttctgtatggtgcaaccagcggcgaagtatatatcaacggtcgcgtaggcgaacgctttgccgtccgcaactccggtgcaatagccgttgtagagggtgtgggtgaccattgctgcgaatacatgaccggcggacgtgtagtggtgctcggacagacgggacgtaactttgccgcaggtatgtccggtggtgtggcctacgtctggaacaaagacggaaacttcgactacttctgtaacatggaaatggtggaactaagcctcattgaagaaacctcataccgcaaggagttgcacgaactcatccgccagcattatctctacaccggttccaaactggcgcgcatcctactcgatgactggacgcactacgtagacgagtttatccaagtagtccctatcgagtacaagaaagtgctgcaagaagaacagatgaagaagctgcaacagaagattgcggatatgcaaagagactattaaattaaaaattgagaattgagaattaaaaaatacagaatagtgcgtacttacaaattccacgttctttttaattttcgattctctgagtattatttcttaattttcaatttttaattctcaatttatcaatcatgggcgattcaaaagcattcttaaatatcccccgccaagaagcgggctaccgtccgatacacgaacgtatcacagatttcagccaggtggaacagacgctgaacagtcacgaccgcaagctccaagcctcacgctgtatggaatgcggtgtacctttttgccattgggcatgtccgttgggcaacaagcaaccggagtttcaagacgcactctgcaaaggaaaatggcgcgaagcctatcaagtactgaacgagacgaatgatttccccgaatttacgggacgtatctgccccgcactttgtgagaagtcatgtgtgctgaaactctcctgcgatgctcccgtaaccatccgcgagaatgaggcagccattgccgaagccgcttttcgtgaaggatatatcgtgcctgtccgccccgaacgcaatggctggaaaatagctgtcatcggtgcagggcctgccgggctgagcgttgccgcacggctgaatgcccgtggctacgaagtcacgatattcgattccaaaccgatgccgggcggactgcttcgctacggtattcccaatttcaaactacccaaagaagtgatagaccgtcgcatgaatgtactgaaagccgaaggtatccggtttgaaatgggtgtctgcatcgatatgcagaagctgcccgcaggtttcgatgcttacgccgtctgcacaggcactcccactgcccgtgaccttaccatccccggccgtgaactgaaaggtatctactttgccctcgatatgctggctcaacagaaccgtatcctcgacggagagacattcccgaaagagcagcttgtcaatgcccgtggcaaacgggtgcttgtcattggcggtggcgacacaggctcggactgcatcggcacgagcatccgccaaggagctacgagcgtgacacaaatagaaatcatgccacaaccacccgtaggccacaatgacgctacgccctggccgcaatggcccgttgtcctgaaaaccacttccagtcacgaagaaggatgcacacgccgctggtcactggcatccaacagattcatcggcaagaacggaaaggtttgcggcgtggaagtggaagaagtggaatggcttccggcaaaagacggtggccgccccaccatgaaacctacgggtaagaaagaagtcattgaagccgatatggtgctgttggctatgggcttcctcaaaccggaacagccgacatttgcagagaatgtattcgtggcgggagatgccgccaatggtgcaagtctcgtagtacgtgcactggctgacggtcgcaaagtagcccggcggattgaccaatacttcaaccggtagttttgcggcaacgaaaaaagtttcaaagagggataccaagagtttcaacgcatgaaactttctgtcccccggtgtgaaacgactcgtttcaacgcttgaaacaatccgttccaacggacgaaactgccagtctcacccgatacaactaacatcatcccgatatcaacttctaaaacaactacaaccatgtgtggaatagcaggtattttcaacataaaatcccagactccggaactcaggagtaaagctttaaaaatggcacagaaaatccgccatcgcggaccggactggagcggtatttatgtaggcggctccgcaatccttgcacacgagcggctttctatcgtcgaccctcaatcgggtgggcaacctctgtactcgcccgaccgcaagcaaatccttgccgtcaacggtgagatatacaaccaccgcgatatccgtgcacattacgccggaaagtacacctttcagacgggttcggactgcgaagtcatcctcgccctctacaaagacaagggcatcaatttcctcgaagaactgaacggtatcttcgcctttgccctctacgatgaagagacggacgattacctcatagcccgcgaccccatcggagtgatacctttatatataggccgcgacaaggaaggccgcatctacttcggcagcgaactgaaagctctcgaaggcttctgcgacgagtacgagcctttcctgcccggacactattaccggggacgtgagggtaaaatgcaccgctggtacactcgcgactggatgcaataccttgccgtaaaagacaactatcatactggttaccctgacgtcaatgccacaacctaccaaactcaggtttctgccgtacatgatgccctcgaagccgccgtacagcgccaacttatgtcggacgtaccttacggcgtgttgttgtccggcgggctggactcttccgtaatctcggccatcgccaagaaatacgccggaaaacgtattgagacggacaacaaggcagatgcgtggtggcctcaactccactcttttgcagtaggcttgaaaggtgctcccgacctcatcaaagcacgtgaagtggcgcaatacatcggcactatccaccatgaaataaactacaccattcaagaagggctggacgccattcgcgatgtcatctacttcatcgaaacctacgacgtaaccactgtccgcgcatccacgcccatgtacttgctggcgcgtgtcatcaagagcatgggcatcaagatggtacttagtggtgaaggtgcggacgaagtattcggcggctacctctacttccacaaagcgcccacaccacaagccttccatgaagaaacagtacgtaagctctccaaactgtacctttacgattgcctgcgcgccaacaagagtcttgccgcttggggcgtggaaggacgtgtcccgtttctcgacaaagaatttctggatgtagccatgcgactgaatcctgccacgaagatgtgtcccggaaaagaaattgaaaagaaagtggttcgcgaagcctttgcggatatgctgcccgaaagcgtcgcatggcgtcagaaagaacaattttctgatggtgtgggttacagctggattgatacgctgaaagctgtcactgccgctgccgtcagtgatgaacagatgcggaaagcctccgaacgcttccccgtaaacacaccgatgaacaaagaggaatactactaccgcactattttcgaggagcacttccccagcgagagtgccgcccgcagtgtacccagcgtaccgagtgtagcctgttccaccgccgaagcattggcatgggacgtctcattccaagggaaaaacgaccctagcggacgcgccgttgccggtgtgcacgaagaagcctacaaggactgaaccttaaaaaaagtaaccacacggcaaatgcaacggatttttaatatactttctgtttcatattcgtaagcttatgctacctttgcgaaagaacgatgaaaataattaattctaaagcccatgaaactgaaaagccttattatcacttccgccctgctacttgccgcttgtggctatacacaggcacagtccacccaagtcattgctcaccgcggcttctggaaaacagacggttcggcacagaattccattgccgcactggtgaaagccgactccataaattgttacggttccgagttcgatgtatggctcaccgccgacaaccaacttgtagtaaaccacgatagcactttcaagggagtgaatatgcagaaatccaccgcacaacagtgtaccgccgtcatactggacaacggagagcaactccccaccctgcggcaatacttggagaaggctggacaactgaaaacgcgccttattctggaactgaaatcccacaagacacccgaacaggaaacacgtgccgtagaaagtatcgtgaagatggtgaaagacatgggattggagaaccgcatggaatacatcgctttctcgcgacacgccaccaaagaatttatccgtcttacccccaaaggaactccggtatattatctggaaggcgacctctctcccaaagaactgaaagaatggggatgcgccggacccgactatcacttcagcgtattcaaaagacatcccgaatggattaaagagtcccacgacttgggcatgaaagtaaatgcttggaccataaacgatgccaaagacatgaagtggttgattgaccacggtgtggatttcatcactaccaacgtccccgtagaactgcaagaaatattacagtaaaagcatcagcttacaatacatttagaaagttattacagacaagctgcttcattatgaaaacaatgaagcagcttttatatttcaaaaaggtagtaataagcgaataaaacaatcatttttattatttccccgcaagagtgcaagagcattatattacaatctttacgaatatagcatcatatacttttaaattgaaagggaaatcatatatatttgcactgaatgaaagcaggaatagaaataaatagaaaacagatatcaatatagataaaaatcatccaaaacgtcgtatatttgcattgaaataagacaaaaggatatagtcaactaaccaagtaagtacaaaatgacaagaagcataaagtttaccaagatgcatggcgcaggaaacgactacatatatgtagacactacccgctatcctatcgagaacccggagaaactctcgaagaaatggagcgcaccgcatacgggaatcggcagtgacggtctggtacttatagggcgctccgacaaagccgatttcagcatgcgcattttcaatgcggacggttcggaagccaagatgtgcggcaatgccagccggtgcatcggcaaatacctttatgactacaagctgacttccaaaacagaaatcacactcgataccctgtccggcatcaagattctaaaactacacgcgacaggcgataaagtagacactgtaaccgttgacatgggtattccgtctgacgaacccgtgaactatgacggcaaggggagcaagccgatgacagaacatcccatcgaaatagacggcatacgctatacgggtactaccgtatccatgggaaacccgcatctggtaatcttcgtgaacgacattacgaaggtagacctctcctctatcggccccaaactggagaatcaccctctcttccccgaccgcaccaatgtggagtttgcccaagtattggaagagggaaagataaggatgcgcgtatgggaacggggttcgggcgtcacccgagcctgtggaacaggagcctgtgccacagccgtagccgctttcctcacaggacgtgccggaagaaaatcaatcatcggcatggatggaggaacactcaccattgaatgggatatagccaccaagcacgtctttatgacgggagaggcaaccaaggtgttcgagggagagatggagacggatgaagaattatgaatgaatatacgcttttgtgccacatggcaattcttcattattaattcatcattattaaataattaaaccaacagagatatggcattagttaatgaacattttttgaaactgcccggaagttacttattttcggacatagctaaaaaaattaatactttcaggataacgcaccctaaaaaagaagtcatccgtctgggtatcggagacgttacccgtccgctgccgcaagtttgcatcgaagcgatgcacaaggcagtggatgagatggctgatgccaagacattccgcggatacggtcctgaacagggttatgactttctgattgatgccgttatcaaacacgattacgcgacacgcggcgttcatttcagcccacaagaaatcttcatcaacgacggagccaagagcgatacgggaaacataggcgacatactccgccatgacaacagtgtgggagtaaccgaccctatctaccccgtctacattgacagcaacgtaatgtgcggacgcgccggcatattggaaaaagacggcaaatggagcaatgtaacctatatgtcctgtacggccgaaaacaactttatccccgaaataccggacaaacgtatcgacatcgtctacctctgttaccccaacaatcctacgggtactacccttaccaaacccgaactgaaaaagtgggtggactatgcccttgacaacgacacgcttatcctatttgatgccgcctacgaggctttcatccaagaggacgatgtgccccactccatatacgaaataaaaggggcgaaaaaatgcgccatcgagttccgcagtttctcaaagacagccggatttacaggcgtacgctgcggctacaccgtagtaccgaaagaactgaccgccgctacgctggaaggtgaacgtatctccctcaacaaactgtggaaccgccgccaatgcaccaagtttaatggtacaagctacattacccagcgtgccgccgaagccatctacaccgcagaaggcagacggcaggtaaaagaaacgattgactactatatgaacaacgcccgcaccatgaaagaaggactggaaacatccgggctggaagtgtacggcggtgtgaacgctccatacatctggctgaaaaccccgaacgacataagctcttggcgattcttcgaacaaatgttgtacgaagccaatgtagtgggtactccgggtgtaggcttcgggccaagcggtgagggatatatccgcctgaccgctttcggcaaacacgaagactgtgtggaagccataaaacgcatccgcaactggctgaaataaaagtgaagaatataaacatcctactatttaatagttcaagcacaatactatactaacagaaccggactgatcatccgcaatttttctaactaaaaaggtaagaaggtatgaaaacaagaaacacaaaattaggagtaatagcaataacgttactatcagttgcaatgcctttcacggcaaaggcacaggacaaagtaaaagcatccgtaggcgcagacatcgtaagcggctacatctggcgcggacaagacgtgggcggtgtaagccttcaacccaacgcatccatcgcctataaaggtttgtctttggaagcatggggatcggtaggtattgaaaagacagatgccgacggttacgatgctaaagagttcgacctcacactgggctactccaccggtggttttagcgtatcaattactgattattggtataataccggagcaggttacttccactacggtgcccacaatacaacccacctgtacgaagcccaagtgggttacgacttcggaccggtagcagtaaactggtacaccaactttgccggagacgacggtgtcaaggagaatggtgacagagcctattcatcctatatttccatagccgctccgttcaaattgggcggacttgactggacagccgaagtaggcgccactccatgggaaacggacttctacggagcaagcggatttgccgtatgcgacgtcagcctcggagctacaaaggatatcaggataaccaattcattctccctgccactctttgccaaagctacttggaatccctgttcggaaagagcatacttcgtagtaggattaagtttttaagaacaataaaacacttaaggtatgaaaaagattgaagctatcatccgcaaaaccaaattcgaggaagtgaaagactcactcctcgaagcagatatcgaatggttctcttattacgatgtaagaggtatcggaaaatccagacaagcccgtatttaccgtggtgtactgtacgacaccagttccatcgaacgtatcctcatctctatcgttgtacgcgataaaaacgcagaaaagacagtacaagctatcatcaaagccgcacaaaccggcgaaatcggcgacggccgcatcttcgtcatccccattgaagacgctatccgcatccgcaccggagaacggggtgacattgccctctataatgccgaacaggaaagataaccggcagcactcaacccacaggattttcattgagcggcgtgctcagtgaaaaacaaaatacaagtacaactaaaaacccaaaagattatggacaaatatatgaaacgcagtttcacaaaactgcgtacggcccttgctatactcatagcttgctgcctcacaacagatatgtatgcacaaaccgccgtagctgcggatagtgtggcaaccgataccgtcgcccagttggtttccggtgtcaacaccgtctggatgttacttgcagccatgttggtattctttatgcaaccgggcttcgcattggtggaagccggtttcacccgcaccaagaacaccgccaacatactgatgaaaaactttgtggacttcatgttcggctcacttctttactggctggtaggtttcggcatcatgttcggtttaggcgacttcttcggaactcctcacctcatgagcctgttgttcgatagcaatggcctgcccgaccccgcttcattgcctaccgaaggtttcctcgtattccaaaccgtattctgcgccacttccgccacaattgtttcgggagctatagcggagcgtacaaagttttccatgtatctggtttacacaatcttcatcagcgtactgatttatcccgtttccgggcactggacttggggtggtggatggctgatgaacggtgaagcaggttccttcatgacggaaacattcggaactaccttccacgatttcgcaggttctaccattgtacactccgtaggcggttggattgcattggtaggtgcagctatcctcggtccgcgcatcggcaagtacggcaaagacggccggtcaaaagccatccccggacacaacctcaccattgcggcactgggcgtgttcatcctatggttcggatggttcggtttcaaccccggctctcagttggcggcagccactaccgaggatcaggtaactgtctcgctcgtattcctcaacactaacttggcagcttgcgctggtggtttctttgccctggccgtcagttggctgaaatacggcaaaccgtccctgtcactcacgctgaacggtattttggcgggattggtaggcattacggcaggatgcgacgccgttgctccgctgggtgcggtcatcatcggcgccatctgtggcgtactgatgatatatgccgtagaattcattgacaaagtactgaaaattgacgaccccataggcgcatcttccgtacacggcgtatgtggtttcacgggaacggtacttaccggactgttctctaccagtgaaggtctgttctacggtgcgggtgcgggcttcctcggagcacagatattcggtgcggtaattgtcggactttgggcggcaggtatgggcttcatcatcttcaaagtactcgacaagatacacggcttgcgtgttccggctcgcgtggaggaagaaggacttgacatctacgagcacggagagtccgcttacaactaaaacaagtttttttattctatcatatatttataaaccaacaattacaattctaaggtattatgtcaaaattgagattcagagtagtagagacggcgttcaagaagaaacccgttgcagtggcagtcccggcggaacgtccgtcggaatacttcgccaagtatgtattcaacaaggaaaagatgttcaggtatctgccgagcaaggtatatgccaaactgattgatgtaattgacaacggtgcgccgctggaccgcagtattgctgatgaagtggcggcgggaatgaagaaatgggcgcttgagatgggagccacccactacacgcactggtttcatccgctcaccgaaggcactgccgaaaaacacgacgcttttgtggaacacgacggcaagggcggcatgatggaagaattcacaggcaagttgcttgtgcagcaggaaccggacgcatccagcttccccaacggcggtatccgcaacacgttcgaggcacgcggatattcagcatgggacccctcttctcccgcgttcatagtagatgatacgctctgcattcctaccatcttcattgcctacacgggtgaatctcttgactacaaagcgccgttactcaaagcactgcgtgcagtggacaaagcagcggtagacgtatgccgctacttcaacccggacgtaaagaaagtagtggcgtacttgggctgggaacaggaatacttcctgattgacgaaggcctttacgccgcccgccccgacctgttgatgaccggccgcacactgaccggacacgatagtgccaagaaccaacaactcgaagaccactacttcggcgccatccctccgcgtgtggcagcctttatgaaggagttggaaatcgaagcgttgaaactcggaatccctgtcaagacccgccacaacgaggtagctcccaaccaattcgagttggctcctatcttcgaggaatgtaaccttgcagtagaccacaatatgctcatcatggctctgatgcgcaaggtggcacgtaatcacggcttccgagtactgttgcacgaaaagccattcaagggtgtcaacggcagcggcaagcacaacaactggtcgttgggtacggacacgggcatcctgctccatgcccccggcaaactgcccgaagacaacctacgcttcatcaccttcgtagtaaataccttaatggcagtctacaaacataacggattactgaaagccagcatctccagcgccacaaacgcccaccgactgggagcgaatgaagcgcctcctgcaatcatatccagcttcctcggcaagcagttgagtcaggttctggaacatattgaggaaagcactaaggataacctcatcagcctcagcggcaaacagggcatgaagctggacattccgcagatacccgagctaatgatagacaacaccgaccgtaaccgtaccagcccgtttgcctttacgggcaaccgcttcgagtttcgtgccgtaggttcggaagccaactgtgccagcgccatgattgccctgaactccgctcttgccgagcaactggtagaattcaagaaggatgtagacaaacttatcgggaagggtgaaccgaagatttcggctatcctcgacgttatccgcaaatacatcaggatatgcaagcccattcacttcgacggtaacggctacagcgacgaatggaaagccgaggccaaaaaacgcggtctggactgcgaaaccagtgtacccctcatcttcgacaactatctgaagcccgaaagcatccgtatgttcgagtctgtaggcgtaatgacgcaaaaggaactggaagcccgcaacgaagtgaagtgggagacctataccaagaaaattcagattgaagcccgcgtgctcggtgacttggcgatgaatcacatcattcccgtagccactcaatatcagacggatttgatagacaatgtctacaaaatgaaagacctcttcccggtagagaaagctgcaaaactgtctgccaagaatttggaactcatcgaagagattgccgaccgtaccaccttcatcaaggaacatgtagataccatgatagaagcccgcaaggttgccaacaagattgaatgtgaacgcgacaaagccatcgcttatcacgacaacatcgtaccgatgatggaagaaatccgctatcacatcgacaagttggaactcatcgttgacaaccagatgtggacattaccgaaatacagggaactgttgtttataagataaagagctatttcagacatacaaactctgaaaccggaaattatctatttcttttgttggttgttttaagtttgcaggggaaagaagtgccgtgatggtagttctttccccttttttatccggcagacagcagcctgaagaggaaaacagattatctttgtccccaattacaaataaacacattatgaaaggcctgcgtacacgccatacagcattgctgctgtttacattcttgctggcatcggtatccttatccgcacagaccggcttacagcagaaactaagtgagatttccgccataacggaaacccaaccgttggaatctaccgagttttcggagaagtatgtaacctatttcacccagccgctcgaccaccggcatcccaagaaaggaagtttccgccagcgggttatcgtggcgcatgcgggcttcgatcgtcccacggtcattataaccgaaggatatggagccgcctacgcgctcaagccccaatatcgcgaggaactttccaggctcctcaatgccaatatggtatttgtggaataccgctatttcctggaatccactcccgaacccaaagactggcgataccttacagccgaaagttccgccgatgatttgcacgcggtaacaaccgcattcaaaaacatatatcccggaaaatggattgctaccggtatcagcaaaggcggacagaccgccctgctctaccgcacattctatccggacgatgtggatgtatccgttccttacgtggctcccctctgctacggaacagaggacggccgtcacgaaccgttcctcaaaaaagtgtctacggatgaagaccgtaaaagaattaccgacttccagctggaaatcctgaaacgcaaagcggccttactcccccttttcgagaaatactgcaccgaacaagagtataagttccgtgctcctatcgaagagatatacgactattcggtactggaatattcattcgcgctctggcaatggggtactcccgtcggcagcattccgctacccacagccaccgacgcagaactcatagcccacctgctggccatcagcgacccgtcctatttcacaaccgacagtaccaacgcctctttcttcgtacaggccgcacgcgaattgggctattacggctacgacacccgtcctttcaaaaagtatctctccatcaagtccggcaaaggctacctgcatcgcctgatgctttccgaggaactgaaagatatgccttttgacaagacactcagtaggaagattaagggattcttgcaaaagaacgacccgaaaatgatattcatctacggtgaaaacgatccctggacggctgccggagttacctggctcaaagagaaaaagaatattcacgtattcattcagccgggcggcagccatctggcacgcatctccacactgcccgaaaaggagaaagaagaagtgatgaagctgctaaacgaatggttgcggtaaacgcacccgttctttcgcagcatcctgtttctgccgcataagggaaaagacacaaacggaaaagggctgcctcagcgattgagacagccccttttatatcaaacataccactcttaccactcaaggaactttcccctctccctgcgcttctgcaactcctctttcaggaagcgctgacggtctttggctatataacggcgggcaaagatgttgggaacggctacccccagcgcaatgcaaaggataatcaacgaagcgttgataccgttggacacagccaccgtgacctcgcccaccactccgtgcatattgatgagcgccaccagcgcacggtacatcaacactcccggaatcatcggaatgacggaaggaatggtaagcacgtgattaggcacatgaaaccagtggactgccttcaccgccaccagactcaccaccatggctcccatgaaagaaccgatgaccggaccgagccccaactcgaagttgacgaaattacgcgtacacacggcaaggattccccctaccgcaaccacccacagcagacggcgctggatattgaatatcatggagaagcccatcgcggatatggctgccgcaatggcgtatatataataaggatcgtgcggaaccatgctcagttcgctgaacttcttgtcaatcaccacatcttccatagccagcaggcgcatggccatcacaatgccgaacgccatggcacacaccatgagtaccgtattaacggcacgcacgatgcccacctgtatgtagttgtcaatcatgtcgtccacaaagtttataatgggaactcccggcacaatgaacagcgcgcacgccagtagcggatggtaaggcgtgcccgaaagccctgtaaaggtagtgatataagccagacatgtggacaccagcgccgcaatggtgatgctcatatacagattgataccgaactctatgcagcgcgcacggacacggaaacctgcaaaagcggcgatagaggcaaacagaaaggcaacccagtcgctgccgaacagcttgcagaagccaccacaggcaaaacccgcaccgatggcaacaagatagggggtgtagttccgcttcttgttttttatcttctccagctcttcctcgtagcggtcgagcgaatagtcttcctcaatggcacgccaggacagcttgctgatttcggatatggccgtcatgttgataccatgtttctcgcacttctgaaatttggaataagagtgcgattcgtcactcaggttcaccaccagcattgtataagtcacgtcgatgtgaagattctcctcaggtagtcccaaataagccgccacacgattcatattgcgtacaatgcgattggtatcggcagcactctccactaatattttccccgtacgaagcaataaatcaagcttcctgcgcaagataatctcttgctcgaccattgttttatccatcaaactttccactaactaatatctgatttttacctattttcaaaaaggagtacaaaagtacataaaaagcatgagtttcctacaccggcataacaaagaaatcattttttctttagaggaaagaaaggcaaaatagggaaaagaatttcatatctcatcggaaaccgatacctttgcacacattttcggacaaaagaaaacgggcagagcgaatgttcatcatatctcccggaaacaaaagctgacttatatggaaacattttggaacaccatcgcacagtataatgaaagcacctggtgggcgcagattctcattaccgcagcgggcatcctgctgactgcattgctataccgtcgtcccaccgtctggacaaaacgctcaatgaaaatatatatggtattcctcaacggctggatagcgctggtgtactacgcaatgtactgcgacacgcgcaactatcactacgttctctccgcattctggggaaccgtcgcattgatttggctgtgggatttatttaccggttacactccgttcgagcgtaaccccaagtaccctatgctggcaggagtgctctatgcgatgcccttcctatacccgctcctttcgtgggcgcgcggcatggagttcccgatgatgacgaccacagtaatgccctgctcggtagccgcatttaccatcggactgctgttggcgttctcgcgcaaagtcaatctgctcgttatcctcttcctctgccactgggcgctcatcgctttctccaaagtgtatgtgtacaagattcccgaagacctgctgctggcaagcgccaccgtacctgccatctacctgttcttcaagaattacatagcccaaaacctgcacaaggaaacgaaactgagcgcacgcctcatgaactggttcctgattctgatgtgcatcgttatcggggtattcctgagcatcacgctctttcaagaggtaggaaaataaacggaccggcacacgtattcatcaccgtttgcccatataataacaccctataaaaaaacagaccatccgtttcgggtaaacggatggtctgtctgtatcaaacggatgatgcgtttcataccaacgcatcatctgttttgttatcttatcttagatgaaccagcgaacatagcagaagtcctgacggtgaggcagttctgcgttcttcgggaacatacggtaagctaccttgaagctgcctgcgttctccagcttatgtgttgcctggaacgtatagaggtcgccctctttcttcactacttcaaacggtgctacggagtaaacgtgctgcttgccgtcctgagctgtataagtagtaaccagttccagaccgatagcatcgtccagacccttctcgtcgataacgtaggtaatggtgtattccttaccgctttcgagagagcctttcaccagttcttccgtcttttcgcaggatacgacttcgatgctgtcccacttggccacaacttcttccttccatgctgcgagttccttggctttggcatagttgttggcagccaatgccttgaagcgttttgcttccttggtgtagaacttgctatagtaatcgtccaactgacgcttcattgtgtagtgaggcgcaatctgtgcgatggagttcttgatagttctgatccagccttcggaatatcccttcttgttgcgtgcatagtacaacggcaggatttcctgttcgaggatgctgtaaatggtagcggcatccaactggtcttggtattcctgattctggtaagtacgcttttcggtcaacgcccagcctgcaccttcacgatagccttccagccaccatccgtcgagcacggagaagtttaccacaccgttcatcaacgctttctcaccggaagtaccggatgcttcgagcggacgtgtcggagtgttcagccagatatccacacccgatacaagacggcgtgccaactgcatgtcgtagttctcgaggaagataatcttacccaggaattcgggacggcgggagatttcgatgattctcttaatcaatccctggcctgcaccgtcgtgcgggtgggccttacccgtaaagaggaactgtaccggatagtcggggttgttcacaatcttggacagacggtccaggtcggtgaacagcaggtgtgcacgcttgtaagtggcaaaacggcgtccgaaacctatcagcagtgcattcgggttaatcttgtccagcagagacacaacacgtgaggggtctccctggttgttcagccatgtcttgcggtattccttacgaacgtagtcaatcagtttgttcttcatggccatgcgcgtcttccagatctcttcgtcgggtacactgtagatagcttcccaaatcttaggattggactggtcgtaccagaagttttcatcgaagtgcttggcatagagctgcttccactccgttgcgctccatgtggggaagtgtacaccgttggtgacgtagcccacgtgcatttcttccgggaagtaacctttccagatgggagcaaacatctcctgggaaacctttccgtgcaaccagcttacaccgttcacttcctgagaagtgttacaggcgaatacggacatgcagaagcgttcgcccttgtcgccggggttgttgcggccgaggtccatgaggtcgtcccaagtgatacccatacgggcgggataaccgcccatgtacttgccgaagagaccttcgtcgaagtagtcgtgaccggcaggaaccggagtgtgtacggtgtacagagaagaggcgcgtaccaactcgatggcctggtcgtaggtcagaccttcggctacgtagtcgcagatgcgctgtacgttaatcaacgctgcgtggccttcgttgcagtgatatacgtctttcttgatacccagcttcttcagggtaaggataccgccgataccgagcaggatttcctgcttcaaacggttctcccaatcgccgccgtaaagctggtgagtgatggaacggtcgaactcgctgttcatctcgttgtccgtatcgagcagataaagggaaatacggcctacgttcactctccaaagataagcatgtacgtagtaatccaggtaaggaacatcgactacaacctgctttccgttttcgtccaatacacggtcgagaggcaactggccgaagttctgggcttcgtagttggcaatctgctgtccgtccatagacaaggtttgggtgaaataaccgtaacggtacaggaaacctacggcacacaagtctacgttgctgtcggaagcctctttcaaatagtcgccggcaagtacgcccagaccaccggaatatatcttaagtacatgattcaaaccgtattccatactgaaatatgcaacggaaggacgattgctgtcgggttttacatccatgtaattgcggaacttggaatatacatcttccattctgcgcaaaataaccttatcttcagcaagcgcctcaagcttggcatagctcatacgttccaacagcagaacagggttctgtcctacttctttccaaagagcagggtcaaggtctctaaacagttcggtggcttcaaagttccatgaccaccaaatgttacgtgcaagttcggataacttctccaattcagcggggatgtgagatttaacgttcacatctttccagttcggagtgtttacattactaactttaatcttcattgtatgattacttgattgataaatataattctttttatcagcccaactgacgcttcatcgcattgcgcaacgcaaggtcgtaggcttcataataatattgtatgaaatgcttccataaggcctgctctgccacttgggcggcacgcttacggatttctttgatttccgcatctgtctttgtagagaacaaagttatggtgtccttgataccgtccgccacttcggaatagttatagtccgaacggtgcagcacctctactccatcgttgataccgtgctgattcttcaggctgttcacccaaagtccgaagccggcaaggtcggtcgtaatggtgggcacgcggaaagccacgctctccaacggggtatatccccacggctcatagtaagagggataaacgctgaggtcctctcccagtatcaggtcgtaataatgcttgttgagaatgccatccttaccgtccagatagcagggaacgaagattaccttcaccttgtcttcgggacggttgcccataccgaggtacttcagcatgtccagcacctggtcgtgcgtcatgttgtgcagccagtgcgtgatgaaaggtacttccaaaggagtggtataatgctcgtctttctttttcagacgctgctgcaggtcttcgcgggggtcacccacccaaccgggtacgttgacaaaagccagcactttcttattcagattcttatcacggttcaaacggttcaatgattccaggaacacatcgatgcccttgttcttgaactcgtaacggccgctggttccgatgataagcgtatcatcatcaaattcctgtcccaacaggctgtttgccacacgcaacatagtggaacgcgcccgcttgcgcttaccggtaaatgtggagcctttcggaacgaaatcgtcttcaaagccgttcatcaggactacatcggcaggcttgtcgagcagttccttgcactcgttgttggtgatttcgcttacggtagtgaaacagtctacgtaatgggcggtctgcttttcgatggaatgtttggactccatattcagctcctgcgccatttggtcgccgttgtaggcaaaaagataatcgtatagcggtttgttgttgcccgcaatagaacggcctatcgaagtggcatgggtggtgaatatcgtagcgatttcaggaacggcagtctgcaagtaaagcgcagccataccggtcatccactcatgtgcctgaaatacaaccttgtccgtttccgtcaggttataccggtagaaactctccaccacctttccggtggcgtatgcaaacatcgaggcttcatcgtagtcaccgtatgcgtgcagtgaatccacctgatagtgttcccacatctccgcataaatttcattcttttgtgcaaagaaaggttggaagtcaaccaatatgacaataggttcgcccggaatgttccagcggcctacgcggacagagaggttgtctttttcaatagcatatttcttccatgcggcacaaaggttatcggactcgataaataaagggttctctttaccttgccagaagtccgggcctacaaaaaatactttatcgcggaattttgtctgcaaagtgtttgctctggtagacaaaactgtatagataccgcctactttattacatacttcccagctcgcttcgaagatgtaatcgggggtaagtagttctttaaccatatatgttataatctctttatcgtaattgtggctgcaaaagtacgcattattctttgaaaaatagccttttaatcgaaaaaactgattaaatgtgcataaacaatcgtttgcataaatactaccggcaaacgctaaaagcccaccaatacagagaagagcgaagattaccgatgaaaagagaaaaaacagaaatttgtacggaatagaaggaaaagacagagaaaaagatatgaaaaagagggtatatcaaaacttaaactcgcttgctgtctgtttctttttaggcacggattacacggaaaacgcagattttctttgttctttttccgtataattccgtgactaaaagaaatcagcaagtatattttgacaccctcttctgttatttcaactgctatttgtgcagtcggtaattgctgtttatgcggtcagcgcactgccaatcaagaaagtggcagccaaagctacaatcgcataaagttcggggaatacggcaagaatcagcgtgttgctgaatacgtcgtgtccctggccgatagcggcaataccgttggcgcaaacctgtccctgacgaatagcggagaacaaggcaaccaatcccaaagcaatacctgcacccagaatggcagcagcctgaatggcagtcatgcccggagtaaggatgccgaaaatagtctggaacataaagtagcctgcaaaaccgtacaagccctgagtaccgggaagagcggtcagcacaaggaagttaccgaaagcaccgtcgttcttcttcagcgcaccgatagccgcattaccggcaattgtcacaccgtaggcactaccgacacccgacaaaccaatcatcactgcaatgccaatataggcaatcaataaattcatttccataatcttattcgttttttattgtttatattttatttgtttctcttgtttgtttctcttgtttgtttctcttaaagatttcttttgaagaattctcctgaagactctcggagaaaagatcacgccatctctgcgcaactcctatcttcctcttttatcaatcctttattctctatttctcaatttaaattttcaactttcaattcttaaacggcttgtattccttgccgccgccttcgtatccggaattcttgaagaattccacaaaggtcagacgcatggggtgaaccattgcaccgagcacgttcataaagatattgatggcatggccgataacgaatatcagtaccattacgatgggacctgcaatgacattgtcaggactcatgcccaccgccaagctgttgaacacccctgcaaggataccacccgacagtccgagggcaaacagacgtacatacgacagcacatcgcccagcaatccggtagccatattgtaggaatcccaaagcccgagcccgatattgaggaatatgttctttcccggactgttgtagagaaatatcatggctgccgccacaccgaggatgcacagatgcaccgtaccgcccaatggcatgacttccggcagcaaggctcctactccgcaggaaaccagcaatataatccagccaatcgtagccacggcatacttgaacccgaactgaataccctggttcaccgctttcagcaccataccgaacaatatctgcaccacaccgagtatcaacgacaactggaacatatcgttattgtccatgaacaaggccgctttcattttttggaagaaaggcaggtcgatatcgtaaatgttcgctccgaagaacgtgccggtcagcaatccgcagaagaaagtggatgccgccaatacctgcaccaatgagaggacaggtctcatcgcagcgctgatgttcttggcaaacagacggtacagggttgctccgagaaacaggaacagtccgtaaccggagtctcccagacacaagccgaagaacaccataaagaaaggtgcaaagaacggcgtcaggtccagctcgttatacttgggcagcatatagagcttgcatataggctcgaaccaggcaaagaaacctttgttgttcaactgtataggcacgttgtcgcccggtacgggagagattacctcgtagtacacgtgctgcgcatcgagccattcggagatttctccgactctggatgccggcgcccagccttgcagcagcatcagtttctctcctgccgtagcttccgtattcagcattactttggagaattccatgtcggtgttcacctctttcaaggctgcacgcaacgaagggatttctctctcggcaagcactttcattttttcctcgttatccgccagagcctgttccgtctcgtcacaaagcacttgtacgcgctccaatgagtaaggcggcagcttggcctgctccgcatccaaatccggttcttccgaactaccggttacggtaacgaaatagacgcgagaggcctggaggctgataaccatcgcattataggtatcttcccaggttgcgtcgtaattgccttccgagcaactgtaaaagcctactgtcagtccggcatcgtgcagacgcgacagacttgcgggttcaaagttaccccatggctccagcgcagctttttccttctgataggtctgcaactgctgttgcaacttattcttttcagcttgcaactcgtccacttcgttcagcacttccagtccgcgggctgccgaggcgggtgtttcctccaccgccggtctggcgggcttaaacgcctgcaacagcttttccgtagcctgcagacgggcagacagacggatactgtcctgcaactccgtattgtcggcaacaccttgctgcttttcggccacatgcaccacaccgaggtcgcgcacaccgttcaggaatgcttcgtactccttataatatacaaggaacgtgagcttcttcattttcgtaatcatgcttctgcctccttccttttctcttggtgggacttcatgattttctgcgacgacttggagaggttctcctcgtcttccataaaccgcttgattttgcgcagtgcatcctgatagcccggaatctgtactttctcaaaaagattcaccttttgggtggtctttttacgcgcatgttccagcaagttcagcttggccacggtaaactcccgttcaatggccgtgtgtgccagttccttgagcaaatgcaacccgtctgcataccatttgggcgcattgaacaagctgtaagggcgtatctcgaaatctacattctcgagcaacggcactcttacgccggcaatcttcttcacaccgagatgaacatcgctaacctttatcaatgaggcgtcgaactcattccaaagggcgaacatggcttcataagcttggatttccttttccaacctcgcgtccagcgcggcagcatcggccttgcagcgcttcacttccatacgcagggcgctctccttgttcttaatgatggggagcgtgcgcacacgtactttcagttgcttttccaactgctggagcgacgttttattatattgaaacttaatagccacttcgttagtgattaatggttaattataagtgattagttttctgctttgggccagaattcgtccacaagttctttcttgatgttcacctcttccggacggaaatacttgccgaacaagctccaggctacgtcgagcatctccgtggtgtcgaggtttacgtcgatagccagcaactggttggagtaatccttggcaaaggcaagcgtacgctcgtcgtagtttgtcaggtcgaaaccgttctccagcttcgtcttggcattggcggcatcggcatacagacgtacggcggcattcatcacctgcggatggtctttacgggtcttcttaccggtaacaagctgtttcagacgggacaatgaacggaacgggtcgacgataaccttaccgatgtcactgtcacggcgaaggaacaactgcccctcggtgatataacccgtattatcgggcacagcgtgcgtaatatcgccgccggacaaggtagtcacggcgataatcgtaatagaaccgccgctggggaactgcaccgccttctcgtaaatcttcgccaaatccgaataaagcgaacccggcatggagtctttggacggaatctgatccatacggttggacacgatggccagcgcatcggcataggacgtcatgtctgtaagcaataccaataccttttcattgttgttcaccgcaaagtattcagcagcggtcagcgccatatccggaatcagcagacgttccacggggggattctcggtagtattcataaagctgacgatacggtcgagcgcaccggcattggagaatacattcttgaagtacaggtagtcgtcgttcgtcatacccataccaccgaggataatcttatcagtttccgcacgcagggctacgttggccatcacctggttgaaaggctggtcggggtctgcgaagaacggaatcttctgtccggacaccaacgtattgttcaggtcgatacctgcgataccggttgcaatcagttcggacggttgcttacggcgtaccgggttcacggacggaccgccgatttccacttcctgaccttcgatggacggaccgccgtcgataggatcgccgaaagcgttgaagaaacgtccggcaagctggtcgctcactttaatggtaggagccttgcccagaaacaccacctctgcattggtggggataccttcagtaccctcgaaaacctgcaaagtcacatcgtcaccggcaatcttcaccacctgggccagcttgccgtttacggttgccaactcatcataccctacccccgtagctttcagcgagcacgtggctttcgtaatctgagtaatcttagtatatattttttgaaatgcttttgttgccatcttattatttatgctttacgttcttcaatcaattcctgcaactgtttgtagaaattgtcatactcttccgatttgaatttcgagtagttcatctgcttgcagatgttaatcattttcttgaagtaatccattacctcgttgaagttgtcgaactcaaattccgtatggcagatgtcgataaccatgttcaggatttcttcctgacgttccatgggagttacggcgtcaatctcgtcgaaagcatcctgttgcaggataacgaagtcaatcagttccgatttccagaaggttacgtgatattccacgggtacaccgtcatcgccgagaatgttgatttgctccgcaatttccttaccgcgttgcagacgggtcttgacttcgtttaccttgccaatccattcgccgttgatacgcttggttatataatcctcgaattcgggatactcgatatatttggaatatgagtcgatagggtttacggcaggataacgcttcttatccgcacggtcttgttcgagggcgtagaagcagcgggccaccttcttggtattttcggttacgggttctttcaagttaccgccggcaggcgatacagtaccaatgaaggtaatggaacccgtttcgccgttgttcagcttcacgtatccggcacggccgtagaagttggaaatgatagaagacaagtccatcgggaacgcgtccggaccgggcaactcttccatacggttggacatttcgcgcaatgcctgtgcccaacgggaagtagagtcggccatcagcaacaccttcaatcccatgctgcgataatattccgcaatggtcatggccgtgtacacagatgcttcacgggctgccaccggcatgttggacgtattggcgatgataatggtacgctccatcagcttacggcctgtatgcgggtcgaccagttcggggaattccgtaaagatttccacaacctcgttggcgcgttcaccgcaggcggcgataattacgatatcggcttccgcctgtttggaaatggcgtgctggagcactgtcttacccgtaccgaacgggccggggataaatcctgtaccaccctccacaatcggattgacggtatcgattacgcgcacacccgtttccaacaatttgaaaggacgcggcttctctttatagttcgtcatggcgcgcttcacgggccatttctgaatcatattcacttttacatcgttaccttcttcgtcggtcaggacagcaatggtatcctcgataccgtaatcgccttcctttacgatggacttcacggtacatacacctttctgcccgaaaggaaccatgattttcaacggctggaagttttcatccacctgccccagccatgcagcggcttccacttggtcgcctgcctttgccaaaggcacgaaatgccatttgctttccttatccaacggatacgtatattgtccgcgcttcaggaaaacgccatccattttatcgaggtcgttttgcagaccgtcatagtttttagaaagcataccgggacccaatgtcacttcgagcatgtgtccggtaaactcagcttcggctcccaccttcagtccacgggtgctttcaaacacctgtacatagacctgagtgcctaccactttaataacctccgccatcaatcggtctccgccggtcgagatataacaaatctcgttctgtgccacggggccgtcaactacgagggtcaccatattggctattacgccactaacagttccttttgttgccatataattatgtaatttattttatctgaattctgcgggtatccgtacttcatccttcaacgcagcaattatgctgcggaacagttggctacccttttctttatccaacgaaatccaacgttctatcatttcgagctgtaacaggaacacaaacagacgttccactgtgaaatagtcgaagaaagtagtctcttccatccagttccaccgcaaccggtctatctttttctcccgctccaccagttcttccgtctcgctgattttcaccagttgctccagccattccacttcaccgcccagtccgaagtccctggccccggatgtgcgcaaagcctcacaaacttccgtatctcccactatcagaggagccacgtccattttaaactttcgcgccgtcagtgcaaccagcacattgttaatcacaagattaaaaccgaaccaggcagatacaaacttgtttttgcacttcatggcataggcataataaagcgcaaccaaacggtcttcatgcaagaagccatcttctgcggacaagttgacatattcggagataaagacagaaaggtaagagggaaacacgcgatccgatacctcgccgccttctttcagcaacgagatatactcggtcagttcttccgccgagtagtttccccgcggatcaatcgcagcgtccttgtctttcaataatttcaagacattcgcattgtcgaactgaagataaaacaagtctatcagccttttatcatcctcagacaaagccggatacaattccgtcctgaaatcagctaccgtatagctcagtttgctatcctctaaagtgagttccggcaaaccggctaccaagtaatagtatttactcataatcctgtggggaattaaaacagcatttccactaattgcggacgcaggaattctttgaaatagttcataaattcctcttcgccgaagttcactttgtaagagccgtcggccggtgaaacagagaagagtgtcttgtttccattcacctgctcaatcttcacgcccttatccaataattcttttgcctgagcggtgaaatactttttcaagccttccgcatccgatgtggaaatcacgataggttcgtccacactccatttggatgccagcgctacgatgaaagcgttaaggaaatctttgtttgcggcaaaagctttcacatcggcgtttacgattttatccgttaccaaagtggcaatttcagatttcagggcgttcacagcctgaccggcaaacagtttcaactctgatttggtattctccgccagctcatcggctgatttacgagcagcagccacaatagagtctgcctctttctgtgcattctctactattttttgggcttcttcctgagcttttacgataagtttttgggcttcttcattacctttttccaccccttcacggtaaatcttatcggttagctcttgaatcttgttttccatattttacaggagttattatatgatttattacaatattaattgcatgatttttttcagtccttattagattcacgccaaaattacgaaaaaccatttgatattaaacaagaagaatggaataaaagtaacccattttcataaaaaatatcgtttttcaccagttttgttccgtaaagataacaataagataacaaggaaaaaagaaataaagagtaaaaccggaaaatagacagatgaaaggggcaaataaatggatgcatagcattcttgtagacataagaacagaaagacataagaggagatgcttgccagatatatgatgtgatacgggtatgatacgatataatatcctaaaagcaaagaaagaaaaacacttcacaagtataagaataatccccactaaaaatctgctgaccccaagaaagcaagcaaaacaaagaaaagaaaagaaaagaaaagaaaagcaagcaaaacaaggcaagtataaggcaaggcagacaaaatagcccaaaaacaagaaagcccctgcatcttccgatacaggggcttctctctctaaaaacggcgactacctactctcccactgttacgcagtaccatcggcgtgactgagcttaacttctctgttcggaatgggaagaggtggaac

SEQ ID NO: 4197 - DNA, 674 bp, Unknown
  gut microbiota DNA sequence
ccgtaaaaaaaagaatcaccaaaaggaaaaagacatcaccggaagcgtgaaaagggcaaaccacaacaaaggaagtatgattgtttccgatccgacggaacttgttcagccgggtggcaacaatcattcttcccggtttgtccggctgtgtgtgggcgcctgtttcattcatggggcaggctgacacactctgcattcactttccgcttccggcaaaagagacagcgaaaaaagaaaaatcatttgaaaacccgtaaaagcacctcttggcataggcgcaaaagaaaggggcattgcttcatctgtctaaacatcgtttaggcgtgaggcaatgcccttttctccagctatgcggtagtcggcacacgtttgttccaaactcgttttgggcaatggtgtgccgacggacaataccgcttttacggaaaattcttatgaatgaggggataaaaaacgggagtttatatcaaaatctcgaattaaatagctacttttgcatacgaagagttctttgaaggttacgcaacgcgcagaaggataatgcagtagataactaactaaatcgtaacctattactatcaagagcaattaacctacgctcatttccaataaattacactcttttcgtaacttcagtgacgcaaagatacaaaacatatggatatatagctata

SEQ ID NO: 4198 - DNA, 3471 bp, Unknown
  gut microbiota DNA sequence
caattgcagtaattttgtgcaccgttcgtgactctattttcatcctttagcaataaattactatggtatttaatcaaacagagaagcaagaaagaagctatttgcagcaaataatcactcggctgaaacagataatcagccatactgatatgtcagtaaaaaaccatgcagatacattggcggagtacaaagactatctttggaacaataaagatattgatccgcatgagatacgctccatgcgtgaaagcatcctgaatcattttgccataggcgaaagtgtaattgacaaacgccgacggcttgcccaaatagtggatattccctacttcggccggatcgactttcaagagaagaacgagaaccgtccggtaatccctgtttatatcggtatccatacctttcacgatactgaaagccgaacaactgtaatttatgattggcgggctcctatttcaagtatgttctacgatcatgaactgggcgaagcatcttatcaatccccatcgggagaaattaatggagaaatttccctgaaacgccaataccgaatccaagctggaaagatggaattcatgatcgaaagtgcgctgaccgttcacgatgatattctgcaaaaggaactgagtgctaatgcggatgataaaatgaagaacattgttgccaccattcagcgggagcaaaaccggattatccgtaatgaggaagcccgaacgctcatcattcagggggtggcaggttcgggtaaaacttctattgccctgcaccgcatcgcctacttgctatatacttttcagggtagtctctcttcaaacgacatcttgattatttctcccaataaggtgtttgccgattacatctccaacgtgctacccgaactgggcgaagaaaccgtacccgaaaccagcatggaacagatactttccgaagtactgaatcacaaatacaaatactttagcttttttgagcaagtgaatgaattactgacaaaaccaacaccggactttatcaagcgaatcgaatataaatcatctttcgatttcatcgccagtctggatcgctttattttgtacatcgaaaaccactactttagagcagaggatgtgaagctaaccaaacatatcaccgtcccggcagaatttatcgaagagcaattccaccgtttcaaccgctaccccatacgccaacggttcgaggcaatgacggattatattctcgatatgatgaaagtacagtatgcttttactgtgacgactgccgaacggaatttccttaaaaaagaaatcaagcgaatgtttgccggaaacaatgacctgcaagtctataaagatttcttcgcatggatgggtaagccggaactctttaaaatgcggaagaaccgcatacttgaatatgccgacatagcaccattggcgtacctgcatatcgctttgaaaggtggtacaaagaactatgtcaaacatttgctggtagatgaaatgcaagattattctccaatccagtacaaggtgatgcaaaagctattcccttgtcggaaaacggtgttgggagataccagccaatcggtcaatccttatggttcatctactgcagatatgattcagaaagcccttattatgggcgagataatgaaactatgcaaaagctaccgttctacttgtgaaatcacagagtttgcacagcaaatacggacaaataccgaacttgaacctgtcgcacggcatggaaagaaaccgcaagtattacaattcgataatgagaaagaagagctgtctgccattaaaaatttaatagttactcatcaggcatccgcttacaaatcacttggaattgtctgcaaaacagaaacgcaagcttgtgaaatggcagagaaactacaaattcccgatatccatttcctatcgaatcaaagttcggcttttgtacaaggtatcgttatcacctctgcacacatggcaaagggtttggaatttgatgaggtgattatcccacaagtagatgataaaaattatcattctgagatcgaccggagtatgttatatgtggcggtaacaagagcaatgcaccgtttaacgctgacatatagcggaacaaaacacacgccattcatctgagtttttgacttactctattggcgtacggggattaacctctatatttaccgtcacgcgcacagcagagtaactttcagagataagaacagaaggatataagaggagatgcttgccagatatatgatgtgatacgggtatgatgtgatacgatataatatcctaaaagcaaagaaagagaaatacttcacaagtataagaataatccccactaaaaatctgctgaccccaagaaagcaagcaaaacaaagaaaaacaaagcaagcaaaacaaggcaagtataaggcaaggcagacaaaatagccccaaaacaagaaagcccctgcatcttccgatacaggggcttctctctctaaaaaaaacggcgactacctactctcccactgttacgcagtaccatcggcgtgactgagcttaacttctctgttcggaatgggaagaggtggaacctcagtgctatagtcacctgaataaggcagacatgatgtaaaaagtaaagaacaaccggtaatgaaaccggtaaactgaacgtatataccacccatacacggaaagaccaaaagtgaacgggcaattagtaatgctcggctatgacatcgctgcctgtacacctgcatcctatcaacgtcatcgtctgtgacgaccctaagaaatctaatcttgtggctggcttcgtacttagatgctttcagcacttatccaatcccgacttagatacccggcaatgcacctggcggcacaaccggtaaaccagaggtcagtccaacacggtcctctcgtactagtgtcagagccacgcaaatttcatacgcccacgatagatagagaccgaactgtctcacgacgttctgaacccagctcgcgtgccactttaatgggcgaacagcccaacccttgggaccttctccagccccaggatgtgacgagccgacatcgaggtgccaaacccctccgtcgatatgagctcttgggagggatcagcctgttatccccggagtaccttttatcctttgagcgatgtcctttccatacagaaacaccggatcactatgctctagtttcctacctgatcgacttgttagtctcccagtcaagcgcccttatgccattacactctgccgacggttaccaatcgtcgtgagggcacctttagaagcctccgttacgcttttggaggcgaccaccccagtcaaactacccaccaaacagtgtccccgcagccgcgggttagaactcaaataatcaaagggccgtatttcaacagcggctccacaaatactggcgtacctgcttcgaagcctccggcctatcctacacatcaattacccaaattcaatgttaagctatagtaaaggttcac

SEQ ID NO: 4199 - DNA, 220 bp, Unknown
  gut microbiota DNA sequence
ttactttttgaaagcgggtgcaaaggtaagaactttatttcatatcttccaaatgttttcggaagttttttttcattctgctttttcaaaggaggaatttcagaaagaaacaagccccaagcagaagaaatatgtaagagttcctacgccgttcctgtcagaatgtcaaaacatcgctgctcccgttctcgaaagcgggtgcaaaagtaggactttataa

SEQ ID NO: 4200 - DNA, 1078 bp, Unknown
  gut microbiota DNA sequence
atacaacggatgtttccactttcaccggaagtgaaacagatctgggcaatggaatgaaagaatacataaataatagctgtggcttcagttgccaatatccgtcaacttgggaaacaataggaaaatccgatacggaacagatattgcaacttcgaggacatggtgtcagcagtttaaccgtcagctacattaaagctccttctaagggagcaatggaacatatgtatgatttattgattaattccatgaaagagtcccggtcagaaaacataaatatttatggaaaaacattcgaaaggatttcgggaaagatggaatgcgctgtagcaggcggtggaagtatccatataaatcagaatattgttatccatatgaatgaggagacactggaaaacttcatcattacttccacaacatctgatgacagttctgaatccgaagttcaggagattataaaaaccataagaataaattagacagtgaaaaatataaagtattcaacgcttatgaggaaaagactattatctctgctgctcctttcaatttgcgggagtatgctctttgcacaagagccgctggatattgatgatgtggaacaagttccattgggagatttcacataccaatggcggaatatatatgaccgtactccactacatggaaagtgccggattatattaagctacagatcttacacgatagcacatttcaacaaggatggcattctcgatggattatatgaaaaatatgaagacaatcatcttgtacagaagctgacctatgtaaaaggtatactaaggggaaaaggatatgaatattacacagacggcactgtgaagaaagaatgtgtctggaacgaacaaggaaagatagacgggttgatgatagaatacaaccggataggaagaacggaatgggactacaagaatggcgaagtggacggacaacaacgaacatttgacaataacggtcaattaatcacgttcgtttcgtacagcaaaggtatgcagcatggtcctttccgcatctatgaagaaggcggtactgatatgccgccttttataagagaggggtatgc

SEQ ID NO: 4201 - DNA, 651 bp, Unknown
  gut microbiota DNA sequence
catcgcctgccttgcaggcttcttcgactcctttctcgcttaaatccacgtccgtccatccggtaaaacggttttctttgttccataggctttcgccatgacgtaataacactattcttttcatggatacttctcctttatgcaatggttattgaagaatccagatatacgtcctgaatggtgttcagaagttgaactccgtctttcatcggtttctggaaagccttacgaccgctgatcagccccataccacctgcacgcttgtttactactgccgttacgacggcatcatgcaggtcggattccccatgggattccccgcccgagttgatcaatccgacacgtcccatatagccattcgccacctgataacgacaaaggtctatcggatggtcagtggtcagttccgaatacatacgctcgtttgtctttccgaatccgatagccttgaaaccgccgttattggatgggagcttctgcttcacgatatcggctttgatggtaaccccgatatggttggcttgtcctgttaaatcggcagcggcatgatagtcggttccatcctttttgaagctgctgtttctcaaatagcaccataaaatagtagccattcccagttcgtgggcatattcaaaagcctgtgacacttct

SEQ ID NO: 4202 - DNA, 357 bp, Unknown
  gut microbiota DNA sequence
tcttcggatgtcttgtgagttttcgtagaccttgagaaacctagtaaagttttctttagccagttctcttttagcagttccgataccgatgatagtttccgacagttttttggcagaggaaacatggataggcttgccattcaagaaactaccttcttttttgactgcagagaaaacctcatcatggtatgggtcatagacaatgcctaatacaatttcattttgttggcaaagcgccaatgatactacgctgtggtgatagtcgtgtatgagattggttgttccatccacggggtctagaatccaataactatctgtgttcatctgttgcaagccggtttcttctccgagaaattg

SEQ ID NO: 4203 - DNA, 230 bp, Unknown
  gut microbiota DNA sequence
ggggacgaaaactgccgtttccccctgggaaggcgtgaagaataccgacattaccaacaggtcctgcggagattcaaccggaaactcaaactactggcggcagccctcagactgggcagaaagctgtcgtcctacaccgcaaggcacacatgggcaacaacggcgttccacaccagagtcgccgtgggagtaataagcaacgcactggggcattcatcggtaaaggttac

SEQ ID NO: 4204 - DNA, 656 bp, Unknown
  gut microbiota DNA sequence
aaatgccgtaccaataccgtgtggggctacatgattgtgttgaaacacatcgtttccattgcgaggaacgacggacgtttgccctttaatccctttgccggatatatcaactctcccgaaagcgtggacaggggctacctcacccgaacggagatacagacgctcatggacgcaccgatgaagaacgccacccacgagcttgtacgggacttgttcgtcttttccgtgttcacgggtctggcgtattcggacgtgaagaacctcaccgccgaccgcctgcaaaccttcttcgacggcaatctttggataatcacccgaagaaagaaaaccaacaccgaatcgaacatccgccttttggatgttcccaagcgtatcatcgagaagtacaagggactggctcgggacggtcatgttttccccgttccgagtaacggaagctgcaacaagatactcaaagagataggcaggcaatgtggcttcaaggtacgtttgacctatcatgtcgcaagacacacgaacgccacgaccgtgcttttgtcgcacggcgtacccatcgaaaccgtaagccgccttttgggacacacgaacataaaaaccacccaaatttacgccaaaatcaccgcccagaagataagccaagacatggaaaccttgtc

SEQ ID NO: 4205 - DNA, 968 bp, Unknown
  gut microbiota DNA sequence
catggagaagaatatctgccgagccatctaattaaaagcagaataccgatgaaagaagaaaggaacattatcacgatggacgagcggggcaatatctccctgccgagcgatataggtgcaaccgccatgaccgagtgggaaatctgcgaactgttcggggttatcgccccgacggttcgggcagggataaaggcactctgcaaaagcggagttttgagtatatatgacataaagcgcattatccgcatatcggacagatacagcgcggaggtttacaacctcgaaacgatagccgccctcgctttccgtgtcgaatcgttcggggcggcgaaagtccgcaaggcattgctggaaaggattatgcacgtgcgaaaagaaaaaacgacggtgttcgtgtcggttgtttcggacggcaagcccaacagccgttggaaagcgtgatgatataccaacatagcaacatgcaaacgtaccagcatgccaacatgccaacatgcaaacctatcactatggtgatatatattgcagggtctatttctcttttcagaagaaagcggagcaatcatttccgtttacaaaggcaaagcaagcacggggctttccgtcggctaaaaggtcgggcggctgcgccgtttcccgataaatcttcctctcgcttcgctgcgagtgtatttatcgggaaaaccttgtatccgaccgccccatgcaaaagagcctttgaaaacgaaaacgaccgccccgccacccaccgaccgaaaggggaaaaataaggtggggttatatgggtaagcagacggcagggacagccatagccgaaaggcaggcagacggcacgccgcagggtatttacggagaaaataccgtagcttattagggaattttccgagccgcaatactacgtatcgctgaaaattccccaataaggcaaggggcaagcccctctgcacaccccatcggggacggcattt

SEQ ID NO: 4206 - DNA, 197 bp, Unknown
  gut microbiota DNA sequence
tctgcatctgtcctatggggcaaaggatgcggaggataggcaccaggaatgtgaaaaccgcatccggatatgtcagcgaaaatgcacggtacagagctgtcaggtgtgaaggctgtcccctgcgatgccgctgttttaaagcaaaaggaaacaggacgatagaactgaatcataggcttagacaatacaagcggaga

SEQ ID NO: 4207 - DNA, 419 bp, Unknown
  gut microbiota DNA sequence
ataaaatctgcgggattcccacaaatgaagtatctgcatgaacttgtcatggaagacatgcccaaagaggcacagataatattgcctgaattggaaacactggacttcatcagggagggaagaaacatagtcctgtatggaaatccggggacgggaaagactcatattgctacggctttaggaataaaggcctgccagcaggattttaccgtattgtttacttcagtccctgtcttgcttacccagataagggaagccaaatccgcaaagacactgcgggcgttgcaattacggtttgaaaaatacgatctggttatctgtgatgaattcggatatgtcagttgtgacaaggaaggaggagaactgctttttaaccacctgtcgttaagagccgggaaaaaggctacaatcattactac

SEQ ID NO: 4208 - DNA, 696 bp, Unknown
  gut microbiota DNA sequence
atccgcatcaacgtatcgggaacgcacgaggacatgaagcggatagaggaagaggggcgtttggacgagtggtgcgccgacaatctgaaatacttcgccgacacgttcggaaaggagaacatcgtggcggctcacttgcacagggacgaggaaacgccgcacatacacgtcacactcgtccccatcgtcaagggagagcgaaagcgcaggaaacgggaggagcagacgaagaagcgataccgcaagaagccgaccgacaccgtgagactgtgcgcagacgatattatgacacggctgaaattgaagtcctaccaagatacctatgccgaagcgatggcgaaatacgggctgcaaaggggcatagacggctcgaaagctcgccacaagtccacgcagcagtattatcgggatatacagaaactcgccgacagtctgaaagcggaggtggtggatttgcagcagcagaaagaaacggcgcaggaggaattaaggcaggcgaaaaaagagatacagaccgagaagctgaaaggggcggcaactgctgcagccgccaacattgccgagagtgtcggttctctttttggcagtaacaaggtcaagacgttggaaagggagaacaccgccctgcatagggaggtagccgaccacgaggaaaccatcgaagccctgcaagacagaatacagaccatgcaggca

SEQ ID NO: 4209 - DNA, 432 bp, Unknown
  gut microbiota DNA sequence
gccgttgccgtcgggtaccagcttcagcgtggcatccattgtcaggctgaggaccgaaatatggagtttcagcggaacgatgcccgtttcctttccttgcagcaacagttccatgttgccttccgcttccagttgtttcttactgatacctgcggccttcagaccgtcccagtcgatatcttccgtcttataaatatgacgggtattctgatccgtattcatacgattcgtttttttaggtttgtatgattgattctgtttctctccgggcaggtctatactgcctgcgatgcacccttcttctgctcctgctgttgtccctgtgcggtctccgtctgtgcggcacggcgggaagtgtccctgcggatgtccggattttcctgaaaatactgcaactgcccggaatagggattgactttcaggtaggaactg

SEQ ID NO: 4210 - DNA, 230 bp, Unknown
  gut microbiota DNA sequence
ggggacgaaaactgccgtttccccctgggaaggcgtgaagaataccgacattaccaacaggtcctgcggagattcaaccggaaactcaaactgctggcggcagccctcagactgggcagaaagctgtcgtcctacactgcaaggcacacatgggcaacaacggcgttccacaccagagtcgccgtgggagtaataagcaacgcactggggcattcatcggtaaaggttac

SEQ ID NO: 4211 - DNA, 667 bp, Unknown
  gut microbiota DNA sequence
taagagttcctacgccgttcctgtcagaatgtcaaaacatcgctgctcccgttctcgaaagcgggtgcaaaagtaggactttataacatacacaccaaatatatcaggggattttttcgcgtttctcttgaacatttttataaaacgctgattgacaaatgtgttgaagaacatgttttttaaggaggatggaaagtctggcaaaagggatacattataatatatgcgcatgcgcgaggaaagaaacaacggaaggctgaaagaaaacacggagatacggaagggcattgcatgacacccgggtcttgacatgtctgacatccgggtctcggcatgttcgacatccgggtctcggtatgcacgacacccgggtgtcggacacaagaaaaaggcttacgggagaaatgacacaggaaggaaacaatacagaaacatgcaacgaaaagaaagacagaaagaaaaagtgaatactatgtttaaagagtatttctattcattgtttttgtgcagcagaccaatcatccatttttttgaacagtatattccacttgttcacacttataatccacttgttaccaacattatataccatcaacagcattacactttcaatttccttggattctttttgcacaatggagccgagctataatctacctggctaaag

SEQ ID NO: 4212 - DNA, 7367 bp, Unknown
  gut microbiota DNA sequence
ctttatgctctttcaacttgataatgtgacagaaaccaatattgaaataattcaatacactcctaaagtcactaacaaaactttatctgtcactatataccttgctttataaccggaagccccaatccgccctgacttaaagacaaggctttcggctgccctttctgtgcattcctataaacggcacgagaaacatgcaatgtttttaccgtaccattatcaaaagctacttcgagataatattcatagcgcataccatcggatacataacgatgctttcctaccttgcgccgtttttcatgttgctccatacgtttatcgagtacggttacagttacctcatactcgtcagcgtccgccaacaaattgttgcctgaaagaaacaatacataacagaaagaacccacgcataccaaatgacacagtacattcacaatcccattctctacggtcgtcagccatatccacttccgatagagaggaagagtcaacatacctgccgccaatgctacgccaacaggtatccaccaggctgccaatgttttctcagaaatcacatatcccatagtgcccgagaacaatacggccaagaccacaaaaatgcgtaatattttaataaacagaatccccatcgctttaatttgtattttcctgcaaatataaaaataaaagtgacattgcaaattctcacacacagcattccgcatgaactaacttacctaacagagcgttataactgtacaaacttaaagaaacgaccattatggaaaagaacttgattcatagtaatgaattgcatttcattgataagaaacgcattcatcgggcggtagagcagttggttgagtcattggaactggcagcaggttccacaacgggatttaatctgtatgcagtagtagagagttatttcactgacttgaacaaacgaaaggaaataaaccgtttgcttaatcttgagcaaaatatttgtgaagaagtagaagaagaactcggagtgtacgaaatgtaaaacaatgtatacatatcagtgaggctatatccaaactaaaattcgcctattatttgtttctttccgagcacgggattacacggaaaacacagatttttcttcattctttttccgtgaaatccgtgtaattccgtgcctaaaagaaatcatcagatgtattttgacctcaatattctttcaacattcgactttcctatcaatcctttgcctgatgcactgtcagttgcgggaacgggaaaccgattccttcttcgttgaatacagtataaatagtcttgttcatatcaaaataaactccccaataatcgctgctcttcacccaaacacggataacaatatttacacagctggcatccaaagcatgaagggcgacaaaaggcgccggagcattcagaatacgactgtcggtagcaagtatacggcgtacggtactttccaccttatcgtaattctcgccatattccactccaataacccagtctacgcgacgggtatcctcacgactgtaattagtcacagtaccgctactcaaagcaccgttaggaatataaatcaccttattatcggccgtagtaagaattgtatggaatatctgaatctcgcgcaccgtaccggacacaccctggctttcaatccaatcacctaccttaaacgggcgaaacagcaagacgataagtccgccggcaaaattctgcaaatttccggataacgccatacccaccgctacaccggcagatgccaacaaagctgcaaatgaagttgtttcaactcccaacttgccgataacggcaataattaacagaattgtcagtagaatattcaccagactcttgacgaaactttggatacccgcatcaatgtgccgcttcatcagtagtttagacactagttttttaatgaaagaaataaggaaacgcccaaccacaaagattataactgcccctataatacgaccgccggctcctaccccccaatcaatcagttgctgcataaaaatctgaagcttgctgaatccctcttcagaagcctgggcgacaaacgccgccattaataaagatgataacataatgattatagtttaatggattaatgaatacaaaattaacaaataaatccatttttcgttcacattatttgtacctttcgaccaaaagaaatacttttgcctctgatttcaattaaggggtgccctaatattacgggctgagatcatacccattgacctgattcgggtagtgccgacgtagggaaaagaagaaaagttccccttttctgtagtaatctttaatagttcaaattgcaaatgaaaaagtatgcaatgacagcatgcctgtttatggcagcgctgaatgtctgcgcacagacaaaggaaaaagacagtttgcgggtaatagacttacaagaagtagagattatctctacacgcgccacaggaaccactccggtggcatttaccaacatcaacaaagaacagcttaaaaaacagaacttcggacaagacttgccgtatctgttgagtatgactccctctgccatcactaccagtgatgccggagcgggtatcgggtataccacattgagagtacgcggtacggacggaacacgcatcaacgtcaccgccaacggtattcctatcaatgatgccgaaagccacaatgtattttgggtaaacctgccggatttcgcatcgtccgtcaaagacatgcaaatccagcgtggcgcaggaacttccaccaacggtgcaggagctttcggagccagtatcaacatgcagaccggagacttctcactgaaaccgtatgccgagctgaacggttcgtacgggtcgttcaatacacacaaagaaacggtaaaagcaggaacaggacttatcaacgaccattggtctttcgacgcccgcctatccaatatcagttcggacgggtacatcgaccgcgcatcggtcggactgaattcttactacctgcagggcggatattacagcgacaacacttctatcaagttaataacatttggcggcaaagagcgtacctaccatgcctggaattatgccagtaaagaagaaatggagaaatacggccgccgttacaactcttgcgggtatatgtacaccgacgacaacggcaccgaccatttctatgaagaccaaacggacaactacgtacaaaagaactaccaattgcttttcaaccacaacttcacttccgcctggaatgtaaacgtaggtttgcactacaccaaaggagacggctactatcaagaatacaaaggcggacgcaaactggtggaatatggcctgttgccatacgaacatgacggtgaaaccgtaagcaaaagcgaccttatccgtaaaaaagcgatggacaactggttcggcggcggcatcttctccgtaaattataagggcaaccgccttcatacatccctcggcggcggactgaaccgctatgacggcgaccacttcggcaaagtgttgtgggtgaaaaactacatcggcaacctcgacccagacaaagactactaccgcaacaatgccacaaagaacgacggtaacctctatctgaaagccaactatgagttatgcagcggggtcaatgcctatgcagatttgcaataccgccacatctcttataaaatgtacggacagaacgacaagtggaacagcgttaccaatgacggtctgcaacaacttaccattcatgaaaagttcgacttcttcaaccccaaaaccgggctgtcatggcaaatcaaccgcaacaaccggatatacggttcgttcagcgtagcccacaaagaaccgacacgcaacaactatacggacggcaagtttaccgaacaccccaaagcagagcgtctgttcgactacgagctgggatacacctttgccaattcctggctgactttcggcaccaatctatactacatggactacaaagatcagctggtgctgaccggtgaactgaacgaaatcggtgaagccgtagccgccaacgtacccgacagttaccgtatgggtatcgaactaatggcaggtttaaagctgccttgcggtttccaatgggacatcaacgccacgttaagccgcaaccgtgtagaaaactttaccgaaacactttatgaaaacgaagacccgaccggcgacacatggagcacttatctgggcgatacccacattgctttctctcccgactttctgctgaacaaccgtttcggatacacctacaaggggtttgaagcatctttacaatcgcaatacgtcagcaaacagtacatgagcaacctgaattgcaaagaccatattctggatgcctatttcgtcagcaacctgaacctatcgtacacattcacgttgcccaaaacaaaatcgataactgtaggctgtaccatctacaatctcttcaacgaagagtatgagaacaatggctacgcaggcagcggcttctattatgagaacggacagaaagtgcgctacaattatgccggatatgccgcacaggccggcactaatgtattaggacatatctccttgagtttctaaatttgattatggagcagacactcgaaattatcggaacacttgtcggtcttctctacctctggctggagtatcgggcaagtatatatctttggatagcaggcatcataatgcctgctatctatatcttcgtgtactacaatgcggggctgtatgctgacttcggtatcaacatctactacctcggagctgccatatatgggtggatgatgtggaaatacggagcattcttacaccggacaatcctgaaaaggaaaatcccggatatggaaaaccaacaacaagagcttcccataacctgcatgccgtcaaggtatctgttgccgcttattgcgatatttgccgttacgcttgccggcattgcctggttacttatcaactttacagacagcaatgtcccctggctggactccttcactaccgcgctcagcattgtcggcatgtggatgctggcacgtaaatatgtagaacaatggtgggcctggattggcgtagatgctgtgagtacaggattgtacatctataaaggactcgattttaccgctgcattgtacggcctttacacaataatcgctatctttggctatttcaaatggaagaagctgatgaaaaaagaggctgatttatgatttataaattccgatttagcaagtatcaactatgaaagtggaagctgtggttttagcaaacggggaatatcctaccgctcccctgcctttgcagatattggcagatgcgccttacgtagtctgttgcgacggcggtgcagacgaatacatccggaacggacatacccccaatcttattataggtgacggcgactccatcagtgaggagaaccgcaagaagtacgggcatctgcttcaccgcattgccgaacaagaaacgaacgaccagaccaaagccgtcaactacctgttatcgcaaggcaaacgccggatagctatcgtaggcgccaccggcaaacgcgaagaccatacgttgggaaacatcagcctgcttatggactatatgcgtgcaggagccgatgtgcggacttatacagatcacggtatcttcatcccttgccggaacacatgtacttttacctgccaaccgggacagcaagtatccatcatcaacttcaatgcccgtaaattgcatggactcggcttggtataccctctcagcgacttcaccaactggtggcagggcactctcaacgaatgcatcggaacagagtttacgattgaggcggaaggggagtatctggtttttttgaatttccctcagccacttccacaaagtacacgctgatacaaatcatagcaatggcaacggcctgtgtccaactgaaccggtcctgccccaaagaaagcgagacaaccgtggtcactaccaatatcagatagctgtaaatagcgacaacggtagtcttcaggtacttcaacccgacaggaaccaggaagtaactgagataagtagggaaaataaggataaatgcaagtacagcccacgccgtccaatgccactcgcctttccaggcttctgcaaacatcggtgcatcccaccctgcaacggacgaaacgattatgccggaaacagcagctccgccaaatatatatttcatcattgtcactactcctaccttctccagcagtttcttgcttacaatcagataaacggcaaatacaaacgaactgatcatacaaagcaaattgccggtaaaggcatcgcgtgccaaatcatcgctgccctgcgtcaagatacacaacatcgcaccgccaaaccccaaagctataccgataatcttcattaccgtagctttctcgtgcagaaagaaaacggaaatgagaaatacccatataggctgcatcgaattgaatatggcgctcgaaaccggagtggttttgctgatgcccagcagatagcagaacataaatccgtaaagcccgaacgccccgaggcaaaacagcatgatgcgttgcttcctggtaaccgccgcttcttttataaaacaacccgtcaaccaaaaagccactgccgcaaacacgcaccgtatggtaacacccgttaaagctcccaaccacaaaggcaataaatacttcaatccgttcatgttcagacccgccatgacacgggatgcaaccatactgagattggcttccagctttttatctttcatgagactatctacattgagttcaaggtagtgagaacgcatagcactgggaaatgttcggaaacatacggagcgttatcctaaacaattcgcaactttgcaatgtttttagggaaacaggagactgaaaaatgaaagaaacagaacccaaacaggcatcaaaccccaccaaacaagtgctcgtattctccacccgcctacgccaggatatccaaaccgcttgccggcaactggaaaacggagaagggcaagaagatgttacaatcaataaggaagtaaaatcatggttaaacaaataaattggtcgccacttgccaagggggaactgagaagcctgctgttatcctcagtgcagaggtttggaaacaaagaacagggaaagattatatactcactcttccagaatgcacttcatcgcattactctaaatcctttcatcggacaagccacggaagtggataacatacgatatatcactccttgtcccgactatacgctattctaccgccacagccttctgaaaatagaaatactcgtgctttgggataatagccataaagtcggaaagataaaaagcattcccataggggaacaagaagaggcgtcaaaactcctttgatatttttttagttttgacacctcatcctatcagaaacaac

SEQ ID NO: 4213 - DNA, 20527 bp, Unknown
  gut microbiota DNA sequence
taccacactccacgttcctcaactactattggccgcctctgcttctgctgttctacctggctctggcctgagtcggggcggcttgggagcggaggcgcccgccgcaggcataaaacaagcgccgtcccggcggggacggcgcttgcttgcttgttatctctttcggccggagagcagcagacccagaacgacgcccaccccggcagggagcacccagcccagacctacgtccgccaggggcagggcgtccagaaagtccagaggcaccttcagacccttcagggcaaagagtacgctgaacaccccagtgcacagtaccgccgcgggatacacccagcggcggccctccagccaccgctggaagaaggacagggcgatgagcacgatagccaccgggtagatggcgctgagcaccggcgcggacacttccaggatttgggtcaatccagcattggagatggccatgctcaccaaagcgaagagcaccgcccacccccggtagctcagccgggggcagatgctgtggaagtactcgccgcaggagctgataaggcccacacacacattgaagcaggcaatgaggaagatacccgccagcaggacgctgcccacggtgccgaacagcaggcccaccacattggtgagggcctccgccccgtcggccgggttggggagtgcgccgccagacagagcgccgatgtgggccagcatgcagtagaccaccagcagcatccctccggcgaccacccccgcccggacggtaccctgcaccacggcgccctcctcctccacaccccgggcgcggatgttcaccgcaatgacaatgccgaaggccagggcggcgatggtgtccatggtctgatagccctcgatgaagcccttgaccaccgcatgggtcgcgtagtccccggtggccggaccgtagccctccagcgggttgaccagacagcccacaaaggtgacgacgatcagcgccaccaggatggggcagagaatcttgcccagccggtcggtgagcttctccggccgcagggcgatgaacagggcggcggcgaagaacaccagggagtagaccagttgatacaccccgatgggggcgtccgctcccacgaagggagggacggccatttcaaaagaggtggtggccgtccgggggatggccaggcaggggccgatggccagataggccacgatggtgaacacccgggcaaaggcgggatgcacacggctgcccagggcatccagcccgccggagcgggccaccgccaccacccccagtaccggcagccccaccgcgctgagggccagccccagcatggcgggccaggtttgggtgcccgcctgggccgcaatattgggcggaaaaatcagattgcccgccccaaaaaacatggagaacagggtgaagcccaccagaagcagatccctgccctccagccgtctctctttctctctcacggtcgtttcctttcccgcaatttaaaaacagcggcataccgcacggcatgccgctgtttttcacttacgtaccaaaatcagccctgggagatggcacccgtggggcaggtatcggcgcaagaaccgcagtcgatgcaggaaccggcatcgatgacgtagtgctcgtcgccctgggagatcgcgcccacggggcagttgccctcacaggcaccgcagctcacgcaagcgtcgctgatgacataggccattggatacacctccaaacactcaagctaaagtcattgtaccataactttttaaaaatgcaatgctaaaatgcgccgactgtgggtatattttttcacagtgggaaaaaatagaatccagccacccgaaggaggcgtatttttccatggacaaatcctctcaatttcacatggaggcggccgggagcctaaccccggagctggacggcgcgccgcgcagcggtctgcaccagcacagaacaaaagaaaaggggcgtggcacagcggatgaagcccgtcaaaaggcagtggaggctcctcttttggagacggagcaaacgaggtgaacacatgagcgaaaccagatttaccgagcgggcccaggccgccctgcggctggcccaggagtgttcggccgagctgggccacggctatgtgggcagcgagcacctgctgctgggcctggcccgtgagggcaaaggggtggcggccaaggtgctccagtccgccgggctggagccagagagcctgaaggccgccatcgcccgcatggtgggggtgggcgcccccggcggcgcgccgtcccaggggctcaccccccggtgcaaaaagatcatcgagctctccctcaccgaggccgcccggctgggccaccactacgtgggtaccgagcacctgctgctgggtatcctccgcgagggggacggggtggcggtgcgggtgctctccggcaccggcgtggagccccggcggctccacgccgacgtggtggccgccatggggggcgaggcatctccctcccccttccggggcggcggcaagacacgggagcgggagtacggcggcgacaccaagctgctggaccagttctcccgcgatctcacccggctggccgccgggggcatgctggacccggtggtgggccgggacagggagatcaaccgggtcatccagatcctctcccgccgccagaagaacaatcccgccctcatcggcgagcccggcgtgggcaagaccgccgtggccgaggggctggcccgccgcatggtggccggggatgtgcccgacgagctgcgctccaagcgtctgctttccctggacctgtcctccatggtggcgggcaccaagtaccggggcgagtttgaggagcgggtcaagaacatcctggcggaggtgcgccgggtagggggcatcatcctcttcatcgacgaactgcacaccattgtgggcgccggctccgccgagggggccatcgacgcggccaacatcatcaagcccgccctgggccggggcgagctgcaggtcatcggcgccaccaccaccgacgagtaccgcaagtatatcgagaaggacgccgccctggagcggcgctttcagcccgttctggtacccgaacccgatcaggacaccgcccgggccatcctccggggcctgcgggaccgctatgaggcccaccaccgcctccagatcaccgacgagtccattgacgccgccgtggccctctccacccggtacatcggggaccgccacctgccggacaaggccatcgacctcatcgacgaggcctgctcccgggtacggatggagcggctggccaccccgccggacctgcgggagctggaggagaaggtggagcacacccgccgcgagaaggaggaggccatccggggccaggactttgagaaagccgccatgctgcgggacgcggaggaggacttccgcaaggagctggagcagcagaagaccgcctggcgctccggccagaacaccggcgcggtgaccgccgaggacgtggccgccgtggtgtcgggatggacaggagtccccgtcaccaccctcaccgaggcggaaagcgcccggctgctcggcctggaggaggccctccaccgccgggtggtgggccaggaggaggcggtacgggccgttgcccgagccgtccgccggggccgggtgggactcaaggagccggggcggcccacgggctgcttcctctttttgggccccaccggcgtaggcaagactgagctgtgcaaggccctggccgccaccttatttggcagcgaggaggccctgctccgcttcgacatgtccgagtatatggaaaagcacgccgtctcccgcctcatcggctcaccgccgggctatgtgggccacgaggaggggggccagctcaccgaaaaggtgcggcggcggccctattgcgtggtgctctttgacgagatcgaaaaggcccacccggacatctggggcatcctgctccagatcatggaggacgggatggtgacagacgcccagggccgcaaggcggatttcaaaaacgccatcgtggtgctcacctccaacgtgggggccgcgcgtatcaccgccaagggcagcaagctgggtttctccgctaccgagcggcgggacggcgagacccgccccatcgaggagctgaaggccgcggtgctggacgacctgaaaaaagtgtttcgcccggaatttcttaaccgcctggacgagactatcgtctttacccagctcggccggacggagattcaggccatcgcccggcgcatgctggaacgtgtgggggagcgtatgaaggctctgggggtgaccctccgcttcactgaccgggctctggagactctggccgaccagggctttgaccccgactacggtgcccggcccctccgccgcaccatccgcgcccaggtggaggacgtggccgccgagcagcttctcagcggcgcgctccaggccggggacacggcactggtggacggcgcggaaaacggcctgcgtttgtatgcccagcccgccgagacccaggccctgaacacaaaggagaacgaactatgaaattgcagcgcacactccccctgttgctgctcctggccctgctggccgggtgcggtacgtccagccagccgagcgccctcaccgccgaggagcgcacccagctctaccagaccgccattgagagcgcccgggacgccgagatgaacgaagccattggtattctcaccgacgccggagacgacatggccgacgtgatctttgagctgctgggggtcaccgccgccgacatgagcgccttcgccctgtcggtctcccccatgaatatcaaggcctacggcatcgccgccatctaccccgccgctgggaagtcggacgccgtgctggagggtctcaacgccttcatcgaccggcagaagcagagctttgagcagtatctggcggatcagtatgaaatcgccggcaacgcccgtctggagactctggaggacgggaccatcctgctggttatgtgcgaggaccaggacgcggtgtttgacgccatccgagacacgatcgagggcgcagcctgaaccaaaaagtcgtttgattcaacccgaaagggaaccctggcggttccctttcacactatccttccctccgaagcctttggcaggagggttttcgacagtctgacagctccgccaggcaggggttgcggcggccgcgccggtggattataatggagcatactacagtccgttccacattggaggttttggtatgcaagcgcgcgcaagcggtatcctgcttcccgtcttttccctgccggggccctatggcatcggcaccctcggcgctcccgcccggagcttcatcgactttctggcccaggccgggcagaagttctggcagattctccccctggttcctcccggcggcggtgattccccctacatgtccccatcctctttcgcgggcaacccctttttcctggatctggaggagctgaaccgggagggcctgctcactcaggaggagctggatgccgcccggcgggccgaccccgaccgggtggactatgcctggctgcaccagacccgcatccccctgctgcggcgggcatgggaacgcggcagggtgtgctacgcccagccactggcggaatttatggtggaggaggcagactggctgcctgactacgccctgttcctcgccctgcgtgagcgctttggtggcaaggagctgaaggactggcccgacgagatccgcctgcgccatccgtcggccctggcccgttatcgggccgagctggcggacgagtgcgccttccacgccttcctccagctcctgttcttccgccagtggaccgccgtaaaagcctacgccaatggcaaggggatctccatcatcggcgatctgcccatctacgtctcccctgacagcgcggaggtgtggagccgcccagagctatttcagctcaaggaggacatgactccttccggtgtggcgggagttccacccgacgccttctccgacaaggggcagcactggggcaatcccctgtacgactgggactatcaccggcagaccggcttcgcttggtggcggcaccgggccacccacctggcccggctgtacgacgtggtacgcatcgaccacttccgggccttccacacctactggtgcatccccgacggggcggccgacgcccggggcggccactgggagcccggccccggcatggagctggtgaaggccctgcgctccgtccccggcctggccttgatcgccgaggatctgggggatctggacgccgacgccctccgcttcatcgcagacagcggcctgcccggcatgaaggtgctggtctacgcctttgatcctgcgggcgagagcgcttacctcccccacaactgcccccgggacgcggtgatctacaccggcacccacgacacccccacctttgtccagtggctctttgagcaggccgcccccgccgagcgggactatgccttcgactacctgcgcctgcgggaggacgagggcttcggctggggcgcggtgtgcggggcgtggatgtccccctgtcgtctggccatcgcccccatgcaggatctgctgggcctgggtggcgacgcccgggtcaacaccccgggcacagccggcccccggaactggagctggcgggtacggcaggaggccctcaaccccagtgtgttcggccgcctggcccacatcacccgcacctaccgccgatagcataatccgcccgccgcaaaacccaggctttaagaaaagatgttttcttatctttcagcagagggagtatcttgaggtgctccctctgcatttttactccaggttgccgatgcagttaaaatagaaatcgacccaatccttttttcttccgcccttcggaacgctcatgcaccaggatgcgctccacgaactcatggagaatttccggcgtcaactcttgaatattcaggtaacgatccacgacctgcaagagctgatccactccctgaatgttttcctcctgatcctccagttccgtttccatctgtgggatgtgcgcttcacactcctcctgctctgcatggcacggaaccccttgtgctgctgagcgagatgttacacgatattcaagaggggcaccgctgtcttttttgcttcggaacatgttctatgatttcgcagtccaacagagtcgccaggcaagctgctcctcggctgtaacgacgattgggaagtatgccacttcatgtggagtaatttgaagaaagaaactccggggcagctttgactgcctagtttcttatttttcggtccctgattctatctcactccaacccttgctgagatagtccgcaaccgtaccgcggggatctgccgccctgcctgccggtaatccccccctcctcatctaagtaaactcagcagatgccagggttccgcaaacagaatcgtctttttcacctctatttcatccgaccaaagcctctgtatctggtttagatgaagcccataactccagaataacaatggtttgcatgtcataaacagtccgtggaccggcgcaaaaaacggcgccggtccacgcgctgtcatcccatggccgtgccgctgtaagaggcgcatggccaattttgttatgcttgtgcatagcaaaacaccccagtctgaagaatgacgattatttgttcagactgggtagggccgttcgaaatttagttgaaagtatttccactgttttgcaaagcctgcgcctcctataataaaaagtatcacttaagatggaggtcctctatgcaatcaggaaaaatatatggttacgcgcgcgtatcctccaaacatcaaaatgaagaacgccagcttattgcgctgcgggcctttggcatcagggacagggatatctactgcgacagacagtccggaaaggacttcgaccgccccaactatcaaaggctgctgctccggcttcaggctggcgatgtatttgtggtaaagagcattgaccgtctgggacgaaactacaacgaaattctgtaccagtggcgtctcctgaccaaggaaaagcaggtctttattgtcgtactggacatgccgctgctggatacccgcagcacacgagatctaactggtacactgattgcagacattgtgcttcaactgctctcttatgtagctcagacggaacgtgaatttattaagcaacgacaggccgaggggatagcggcagcgaaggagaggggggtacggtttggcgtcccccccaagacgcggccggaaaaatttgaacaaataaagcagtcctggcagtcaggaactctatccgcgcgggaggccgccaggcagttgggaatttgtcacaagacctttttgcgctgggtacgcagttaaatgcgagaaatcgtgaccgttaaagctatgctgcatattctacaaacaaaaaaagtgatgaagcaaaaattttggttataaaggttgagattttgcaccggtcaaaatagggggaagaatgaacgcaaagccaccttaactattcatagttaaggctacctggtcacaatcttgaagctccggtacaacaaaagaaacagccgggttgtcaggcattacagcagggaaatacatctttcttttccgcccaagattgcggaattatctgggagcttggaaagcttctttattttagcaccaggtggggcataaagtcagctttatgccccacctttttatttatgtaaaagggcatatctactccgtacacaaacggacagccgggtttgaaggaatttgcttgtgggaatacaggggcaaaatgaagagcagaaggagttgtatgcaatgagtggaaaagaacagtgggaagcagaaaccgtcgcaaaagcactgacgaagggcccggagagacgaaccgtctttgaaaccaccagcggcatcccggtagaacggctttacacgccggaggatgcggcaggcggctatgaggagcggcttggctaccccgggcaatatccttttacccgcggaatccagcccaccatgtaccgcgggcgcttctggacgatgcggcagtatgccggctttgccacagcggaggagtccaacaagcggtaccgctatctgttggagcaggggcagacgggcctgtccatcgcctttgatctcccgacgcaaatcggctatgactcggacgaccccatggcccatggtgaggtaggtaaggtaggagtggccatcgactccctggcggatatggaggtgctgttccaggggattcccctggacaaggtaagctcctccatgaccatcaacgcccccgcggcagttctgctggccttctatattgcagccgccgagaagcagggagtgccggcctccgccctcaagggtactatccagaatgatatcctcaaggagtacgcagccagaggtacatacattttcccaccggcgccctccatgcgtctgatcacgaacacctttgaattctgctcccagaacgtgccgaagtggaacaccatttccatctccggctaccacatccgggaggccggctccacagcggcgcaggagatcgcctttaccctggccgacggcatcgcctatgtggaggccgcgctggaggccgggatggacatcgacgaatttgccggccggctctccttcttcttcaatgcacacaacaatctgctggaagaggtcgcgaaataccgggcggcccgccggctgtgggccaaaatcatgaaggagcgcttccatgccaaaaaggaccgctccatgatgctgcgcttccacacacagaccggcggctccacgcttacggcacagcagccggacaacaacattgtgcgcgtggccatccagacattggcggctgtgctggggggcacccagtccctgcacaccaacagccgcgatgaggcgctggccctcccgacggaggactccgtgcggatcgccctgcgcacccagcagattgttgcctatgaaagcggtgtggctgacagcattgatcccctgggcggcagctactatgtggagcgcatgaccgacgagctccaggccgcagccgaggcgtacatcgaaaagatcgacgccatgggcggagcggtcaaggccattgagcagggctacatccagcgagagatcgcggagagctcttaccagtatcagcgccaggtggagagcggcgagcagatcgtggtgggcgtcaacaagttcaccatcgaggagccgccggccaaggggctgctgcacattgacgcctcggtggcggccaaccagatcaagaagctgcaggagatgaaggcggcccgggacaacgtactggtgcgccagcggctggacgccctgcgcacggcggcggagggcagcgacaacctgatgccctatattctggactgcgccagggtgtactgcaccgaaggagaaatctgcggcgagctgcgcaaggtgttcggcgaataccgtccgatggaggtgctttgagatgagtgaaaagaagatccgggttctgattgccaagcccggcctggacggccatgaccgcggagccaaggtagtggcccgggcgctgcgtgacgccggctttgaggtgatttacaccggcctgcgccagacaccggagcagattgtggaggcggctgtgtccgaggacgtggacgcggtaggactctccctgctctccggggcccacaactatctgttcccacgggtgatcgagctgctgaaagagcaggaggctgacggtattttggtgttcggcggcggcgtcatcccggaagatgatattccagagctgaaaaaggccggtgtgtccgaggtctttacgcctggcacacccactgcggagacggtgaagttcctgcaggatcactgtggtgccagggatgacggatgactttgcagcactgctggagcggggccggacgggtgataaacgcgcggtggcccgcctgatcagcctcatcgaacagggtggggaaacggcgcgctccgtcctcacccaactctggccccacaccgggcgggcccgcatctttggcatcaccggtcccccaggggcgggcaagagcacgctgaccaacgccttgaccaagtgctggcgggccaagggcctgcgcgttggcatcatcgcggtggatcccacgagtccctttaccggcggcgccatcctgggcgaccgggtgcggatgggggatttgaccctggataccggggtgttcatccgctccatgggcacacggggacagctgggcggcctgtcgcccgccacggcgggagcggtccacgcactggacgcctgcggctatgacctgattttgctggaaaccgtaggtgtagggcagtccgaggtggcggtcatggagatcgccgacctggtgctggtgctgaatgtccccggattgggggacgatgtgcaggccattaaggccggtattctggagatcggcgacctgttcgcggtcaacaaggcggatcggcccggcgcggatcgaacggccaatgagctgcgggccatgctggagctgggagaggaggagaagcgcccgctgccagtgctcctggtctcggcctctcagggcacgggtgtgacggagctctgcgaggagctggagcgccagtacctcctcctggacgggaacggagagctggcccgccgccgcgccttgcgcctgcgcagcgagcttctgaccctggtgcgggagggcatcgagcagcgcctgctgcgtcccctgctggacagccccatgttcgctcagagcctggagcggttccagtccaggacagagagtccctatcgttgggcggaaaaatttgtaacacaaatcagtggaggaggtcccggttatgaattgcacaagagttgatcatgtcggtatcgcggtcaaggatctggcggctccggtgaagtggtatgaggagacgctgggcctgcacagcaagggcacggaagttgtccaggagcagcaggtgactgttgcgttcctgccctgcggcgacagtgagctggagctgctggagagtacctccccggagggccccatcgcccgcttcattgagaagaacggcgagggcattcagcacatcgccatccgggtggacgacattgacgccgccctggcggagctgaaggaaaagggcgtccggctcattgaccagacgccgcggtacggcgccggcggggcccggatcgccttcctccaccccaaggctacccacggtgtcctgctggaattgtgtgaaaggaagtgaggacaatgactacggcggaaaagctggctcagcttgacgcgcattcggcccgtgtgctgcggtgcggcggccctaaagcggtggagaagcagcacgcgctggggaagcggacggcccgtgaacggattgaattgctgatggataccggcacttttacagaggtggatcgctttgtgcgccaccgctgtaccgccttcggtatgggggataaggacatcccggccgacggcgtggttaccggttacggcaagatcgacgggcgcacggtttttgtatacgctcaggactttaccgcccagggcgggtctctgggcgagatgcacgcggccaagatctgcaaaatcatggacatggctctggaggcgggctgccccgtggtgggcctgtgcgactccggcggcgcccgcattcaggaggcggtggatgccctgtccggctatgggcagattttctaccgcaacgcctgctcttccggacgtatcccgcagatctccgtcatcatgggtccctgcgcgggcggcgcggtctactcccccgccctgacggacctgattgtcatggtggaaaaggagagtcagatgtttatcaccggtcccgcggtggtagcggccaccacgggcgaggagatctctgcggaggatctgggcggagcggatacccataccactatgtctggagtggcacacctttccgcgcgcagcgaagaggaggccctgggagcggtccgatgcctgctcagctatctcccctccaaggcaggagctcggccccccctaatggattttaccgagcatgaggaattacagcctctgctggacacggtgattcccgacgactcctccctgccctatgacatgcacgatgttgtccgcatccttttagatgaagacagcgtaatggagttgcagccctattatgccgacaacattatcacctgcttcggccgcctgggcgggcacagcgtgggcgtaattgccaatcagcccttttctatgggcggaagcctggacatcaacgcttcagacaaggccgcccgcttcatccagctctgcgatgccttcggaattccgctgatcaacctggtggatgtaccgggcttcctgcccggcgccgaccaagagcacgccggcatcatccgccacggagccaagctgctctatgtctactcggtggcggaggtgcccaagctgaccgtggtgctgcgcaaggcctatggcggctcctatctggccatgtgctccaaggatttgggcgcggattttgtatacgcctggcccaccgcggagattgcggtcatgggcgcggccggcgcggccaacgtggtcttccgtaaagagatccaggcggcggaggatccgaaagcggcccgccgggaaaagattcagctctattccgagcagtttgccacgccatatatggcggcctcccgcggcttcgtggatctggtcatccgcccctcggagaccagggcgcggctgctggaggcgctggagctgctgatcaataaggagcggcagccccatccccgggggaatatgccgctgtaaggagttgaaacgagatatgggtattattccatacacagccatgacctacggtctgacagcggtgatttccctgctggtggtggccatcatcgtgggtatcagcaagctgaccagccgcccgggccagacggacgacggagagggggagccgtaacatggagttctttatgcagctgtttcccggcatcggaaccttctttgcggtggaacccgtaatcgcggtggcccgtattgtcctcattgtattcggctttgttttggcctgcctggggttcaagcggactctggagccgctgatcatggtgccgatgggaatcggcatgatggcggtgaactgcggcatgatgttccttacttccggaaccgtcggcaatctgctgctggacccgcttgtctccgatgcttcggctattgtggatgccatgcaggtcaattttctccagccaatctataatctgaccttttccaacggtctgattgcctgtctggtcttcatgggcatcggagcacggagcgagatcagctttttgctggcaaagccctggagctccatgattatcgccatttttgctgaaatgggaacctttgccgcgctggcggcgggcgtactggcctttgggctgacgccggagcagtctgccgctatggctacgatcggcggtgcggatggccccatggtactcttttcctctttgatgatggctcctgagctgtttgtgcccatctccatcattgcatatctgtacttaagcctgacttacggcggatatccctacatcatcaagctgatggtgcccaaaaagtaccgcggcattgacatgtatgttgaggttcccgaggtctctcaaaagtccaaattcctgtttatcatcatcacctgtaccgtcctctgcctgctgctgcccgtagccgctcccctgctgctgtccttcttcatcggcatggccgtaaaggaggccaaaatcaacaagtacacggagctgctcgaggagggcctctcctatttcggcaccttcttcctgggcctgatcctgggggtgctgtgcgaggcctccaccattctcaatcccactgtgatcattattctggtcatcgggattcttgccctggctatctccgcggtgggcggcctgctgggcggctggctcatgtatttggtgcacaaagccaagcgcgaggactttaaccccaccatcggcatcgccggcgtttcctgcgtgcccaccaccgccaagctggcccagcacgccgcccaggatgaaaatcccttcgccgttatcctgccggtggccatgggtgccaatatctccggcgtcatcacctccgccattgccgccggtatcttcgtcaccaccataggcatggtgtaaaaacgatgcacagtgatatttgattaagggaggaacttattatggaaatcaaagcacgcatccccggcaccatcgtcgccatcaacgtcaagcccggcgacaccgtaaaggcccgcgataacctgggcactatggaggccatgaaaatggagcagcccatcccctgcccaaaggatggagttgtcaaggacgtcctggtctccgtcggcgacaaggtcaagtccggcgccgtgctgctgtccatcgagtgaccgtccggcgccgcccctgaggaagagaaccccctctcaaatctatcagaaaggatgccaggagcgcctttgggcggcttccggcgttggtgattcaaatgggagagatttttgagctcatcatggtcatttgcttcggcctgtcctggccgctgtctgtctataagtccgcaaagtcccgcaccgccaaggggaaaagcctgttctttgaggtgttcatctggacaggctacgtcagtgccatcattggcaagattgtcacccagaacctgacctatgtattctatttctacatcctcaacatcgtcatggtttccatcgacatctgcctctatttccgcaatcgccgcctggacgcgctggccagccgaaaggcgtaatgtatggaggcgtgaaatatggaacgtattgctgcatccctgcgcgataagatcaagagcgtggaagaggccgcggcactgatccagtctggaagtgtgattggctgctccggcttcaccctggtaggcgagcccaaggcggtgccccacgagctggcccgtcagaaaaaggccgaccacttgaccattctgaccggagcctcagtaggggatgccctagatggtgagctgaccagagcgggtctgctgtccatgcggtatccctatcagagcaacaagtccatgcgcaacgccatcaatgcgggcgaagtgggctactccgatatgcatttaagccatatgccggagtttattaaccgaggcggtctgcatattgactttgccttggtggagtgtgccgctgtcacggaggatggcgtgatcccgtctgcggcagtgggcgcttccgactgcttcttgtaccaggcggatcagattattctggaggtcaatgaggctcttcccttggagctgtacggcatgcatgacatctaccgagtaggacatgagccgatcccgcttacggatgccacacagcgcatcggaaccgctgcaattccgtgtgacttccgcaagattgccgccatcgttgtgaccaatgatccgggcggctgccctgtgtttaaagagccggacgaggtcagtgcggctatcggggcgcacatcatctctttcctgaaggaggaggtggcagccggccggcagccggcctcgttgtcccccatccagtcgggcgtgggcagcgtggccaatgctgtactggccggtctgggaagcagcggctttaccggcctgcgcatgtataccgaagtcgtacaggactctgcgctggagctgatctgggagggaaagatggcaggggcctccactacggcggtttctctctcccagaaaaagctggaactgttttatgaaaacattgatttcttccgggagcggctggtaatccgcccccaggagattgccaacaatccggagctggtccggcgcctggggctgatctccatgaatacccccattgaatgtgatctgtacggcaacgtcaactccactcacatcatgggaaataagatgatgaacggcattggcggcagcggagactttgcacgcaatgcgggactgaccatctttgccacagcctcggtggcgaaagagggggcgatcagttgtatcgtccccatgtgttcccacatcgaccacacggaacacgatgtgcaggtaattgtcacggagcagggactggcggatctgcgctggaaatcgccgcggcaaagggcggaactgatcgtggaacgctgtgcgcaccctcaatatcgtccgcttctgcgcgaatacttaaaggacgccgcaaaatatgggggccatactccccataatctccagcaggcgctctcctggcacacgagatatctggataccggaactatgctgcccgggtaggatacgtgccaaagtttgcagcctgtcaggcagccccattcggagctgcccggcaggctgcaactgatatctcgagaactgccgggtgtgcggaatgcagatgcaggaaggcggtgaggaaatgatgacgaaaaatgcggttcagcaaatcgaggaggctgaacacaaggcgaaagaataccaagctctggctgtggagcaggcaaagaaactgctctctgatgcggagcggcaggggcaggccgcactggagcaggcgctccgtgaggcggaggcgcagaggcgggaacgggatacacaagcggaacaagctgcgcagcttcgtgcagacgcgattatgacggaggcgcggcgcgcctgtgacgacctgcggaggcaggcggaagaacggcttgcagacgcggccgcacttattgtcagaagggttgtgggagactcatgtctattgtcaaaatgaaacggctgcgtatcttcggcatggcatccgactgtgaggaactccttcggaaactccagcatcttggctgcgtcgaacttcgtgcgccaacacagccaagttcagatccaggctggcagggttttaccgcaaagagcgacggggcgctggcaaatgcacagctcaggatggacgagtttcgcaccacgctggagcggctgaagcgctgttcccctacaaataaaaaaggtcgcttcccctcccggccccgaattacggagcgggaactgtttgaccgacagatagttctggaggcggaggaaacggtcgaacgcgttgccgcgcttgaaaaaaagcgcgacagcatctgtgctgaacagaacaagcttatcgggcagagagaggccctgacgccctggctggggctggacgttcccctggataccgtttctacgaaacatgtattagtgctgttcgggacgctctccggcctggcaagtcatcaggcggtggaggccgccctggccgagacgaccgagctctgccaggtacaatgggcgggccgggccggagagctgcaatatgtactggtactctgtcaccgaaaagcaggggatgccgcgcgggacgccttaaaaaactttggctttaccgccacaagctttcgaggttggaaggggaccgcccggtcaaacatcgatcagattgaggatcggcagaggatactttcacaggaactagaggcatgccgggctcggctggcacaggaggccggccaccagacagcgcttcagatctgcatagaccgcatgacccaggatatccaacgtatggaggcgaaagagaaactgctctcctctacatccacgttttttctggagggttgggttccggcggaacagctttccgacgtagagcatctgctctcgcagtactccgccgcctgggaggccactgatccggagccggacgaataccctcaggtgcctgtcaagctcaaaaacaaccggctcactcgccctctcaatatggtcaccgacatgtatgtctatcccgcctatgacggggtggatcccaacccgcttatggctccctttttcatcttcttttttggaatgatgatggccgatatggcttacgggcttctcatgctcgccggtggcatttttatgcgcaggaagctgcggccgagcggaacgatggagcatatggccgggcttttgatcctgtgcgggatcagtacgtttgtgatgggagcgcttaccggaagcttcctgggtgactttctcccccgtctggcgaagctgatccgcccggacacaacctttaccgctctgcccgcgctctttactccccttacggatacgctggctatcctgattggttctctggccttggggctgctgcaggtactgatcggtatggccatcagtgttgtgcggaaggtacaagcgggcacctggactgatgcgctgtgggacgaaggaacttggtggattattttggcaggggtggccctggcggtggtaggcatcggaaatttgggcggatatcccattgtccttttgattgggcttctcatgctgctctacgggggaacccggaatgcaaagggcttcgggaagctcactgctttgattgggacggtatacaatggagccaccggctttttcagtgatatcctgtcttacgcgcgccttatggcgctaatgctggctggcagcgtcatcgcgcaggtgtttaataccctgggtgaggtaaccggctcggtggcaggcttcgttatcatctccctagtaggaaacgcgctgaacttcatgttgaatctgctgggctgctatgtccacgatctgcggctccaatgtctggagttctttggacggttctacaaagaaggcggcaagcccttccggccgctgctcatcaacactaaatatgtagatatcaaggaggaagattgatatggctgactttattgcgcagtttggcggtattggcctggcgtttctgggtgccgctcttgcggtaggactttgctgtgtaggctctgccagaggtactggaatggtcggcgaggcggctaccggcgttttaagcgaaacccctgagcacttttccaaatgcctgattcttcaagttctgcccggtactcagggcctgtatggtttggttatatggttctttgcgctgtttaccatgggcgctttttccggcggcattaccgacctctccgtgacggacggactgaccatctttgtttcctgtgtccccatggccctcggcggctggctctccgcgctctatcagggccgtgtggccgcagccgccatcaatgtggttgccaaaaagccggacgactgggcgaaaggaattattctatgcggtatcgtggagttttacgccattctgtccctgctggcctctgtattgctgctgatgaacgccctgtaaggagcagcacgagggagaaaggtgggagcaaatgaacggaatccaagcgattacagcgcagattatcgctgatgcacagactgaggcagatcagattttggcccaagccagggccagagcgaaggaatgtctctccgcttatcaagaacaggcgtatattcagagcaccgccctgttggagcgcagcgagagggagtccgcccttcggaaagaacgcctctcccatgctgcaatcttagcggcacgcaatttacggctcagtaccgagcaggaaatgagggagcgtgcctttgccgcggcattaaagcaactgtcggaattgccggacggggaatacgtagggctgctggcggggctggcggcggaggcgtcgtccacgggacgggaggaggtcattctgtccc

SEQ ID NO: 4214 - DNA, 18837 bp, Unknown
  gut microbiota DNA sequence
cgtccacctctgcatgaaggaccctgcgctcaactccgcccccgtgggcggctgcccctgcggcggctgagccggcgctgaattccatcgaaagaaggcgttcccttgcagtacgtgctctacttcctcatcgccatcggcgccaccacggtgggctccctcaccggcatgggcggcggcgtcatcatcaagccgctgatggacgtgctccacggctttgatgtgcagaccatcggcgtgctctcctccctgacggtgttctccatgtcggtggtgtccatcggcaagcagatgctggcccgtaccaaaatccccttcggcaccgccatccccctggccctgggctcggtggcgggcggtctggcgggggagaagctgctccaggtgatcgtggacgccctccgggccaactccgccgtcaccgtggtgcagaacgtggtgctctccctgctcatcctggccgtgttcctctacatgaagaacaagagccgcatccccagccgggagctgcggggcgtggtggtgtccctgctggtgggcgtcttcctgggcatctgctcctccttcctgggcatcggcggcgggcccatcaacgtggccctcatcatctacctgttctcctttgacaccaagacggccacggtgtgctccctggtgaccatcctcttcgcgcagatctccaagctgaccaccgtggccctcaccaccggcttcggggtgttcgacctgtccatcgccccggtcatgatcgtgggcgccatcgccggcggctttatcggggccagcctcaacaagaagtgctccgaggcggcggtggagaaggccttcaacgccgtccagctcctggtgctggccatctccatcttcaatatcgtccgcaatctggccgcctgaggcggctgcctctccgtgcaggtccccggcttgacaaagccgggggacctgtgctatggttgagagcgtaccacagcaaggagaacagccaatgaactttcatctgactgacaaacgggtaaaaagactccgctctgcacaatccgaaccggtgaaacattgtgcagagctgcgcggctgaaccgcggttgggtttcatcgggaagcggtagggcggcccagagggcgctccggtttcccgtacccattttgcaggcgatggacgatgtttcgtccatcgcttttttggaccgcagaggagcgcgggcagaggggcgagggcccctctgcccgctttcgtttttcagaaaggatgacaagcaataccatgagtttgttggagatcacggggctgacccacgcctttggcgggcagcctctgtttcagaatgctgcctttgccctccaccggggggagcacgtaggcgtggtgggccggaacggagcaggaaagagcaccctgctcaagctgtgtaccggccaactggtgcccgacggggggcggattgtgtggcagggcggtatccgggtgggctgcctggaccagtatgccgccctgaacccggagcacactatgggggaggtgctgcacggggccttccgggccctctacgcgctggagcgggccatgacagagctgtacgaccgggcggcggcgggcgacggggcggccctggccgccgcggcccggcggcaggaggagctggaggcccgtgggttttacgaggtggacacccgtgtggagaaggcggcggcgggactggggctggcggagctggggctggaccgcccggtgggggaattgagcggcggccagcgggccaagctgctcctggccaggctgctgctggaggagccggacgtgctgctgctggacgagcccaccaactttctggaccaggagcaggcggcgtggctggcggacacgctgaccgggctggagcgggccttcctggtggtgtcccacgacgccgcctttctgaaccgggccgtcaccgccgtctgcgcggtggaggggcggcgcctcaccaagtatccggggaactacgccgcctatcaggccaaaaaggagtgcctggagggggagcgcctccggcagtataccgcccagcagcgggagatcgcgcggacggaggcctatatccgcaaaaaccgggcgggccgcaacgcgaagatggcccgggggcggcagaagaggctggaccgtctggagcggctggcggcgccggagggccggagcgccctgccggtgttcgagttccatccgctgcccgcgggccggacgggagacctggaggtggtgggactgtcggtagggtaccgcagtccggtgctggaggggctggacctctccgtgcatgccggacagaaggtggtgctgaccgggtttaacggagtgggaaaatccaccctgctcaacaccctggcgggccggctaccccctctggccgggcgcttccgcttctcggagcaggcggcgctgggctatttcccccaggccctggcctggacggatggaacacggacgccggaggagctggtgaccggggcctttcccaccctggaccggcaggaggcccggagggcgctggcccggtgcggcgtccggcaggagcacgccatccaggccgtggcgacgctgagcggcggcgagcaggcccgggtcaagctgtgcctgctcaccctgcggccctgcaactttctcctgctggacgagcccaccaaccacctggacggggcagccaaggagtccctggcccgggcgctggaccggttcccaggcacggtgcttctggtgtcccacgaggcggacttctaccgggcttgggcgcagcgcgtggtggaaatcgggggaaaggggcgatagcatttttccgccccctgtggtaaaatagagcgtggtaaagcgaggtgtatctatgccgagaacagcaacggtaaagcgcctgaccttcccggaggggcggcgggtgctggccatcagcgacatccacggcaatctgccgtttctcaagggcgtgctggccgccgcccattacggccccgatgacatcctggtgctggtgggcgacctggtggagaaggggccggacagcctcaccaccctccggttcatcatggagctggcggagcggaacacggtgtacggcctgcggggcaactgcgacaacctggtgagcgagtttgtggccgcgcgaggggaggaggagcggttctaccgccactatgtggacgtgtggcgggaccgctgtctgctggtgcagatggggcacgccgccggcttcgagacccgggggccggaggagctgcccgctctgcgggaggtggtgcgggcccgcttcggcccggagctggccttcctggaggccatgccggagatcctgctcacccccgactacctcttcgtccacggcggcgtggccgacgaggcgcacctggaggggctggacgcctggaagtgcatgaaaaacgacgactttctctcccagggacactccttccggcggtggtgcatcgtgggccactggccggtgaccctctatcacccccacgttccctccgccgccccgctgctggcggaggggcggcatatcgcctccatcgacggcggctgctccctcaaggtggacggccagctcaacgccctggtgctgccggaaaggcccggcggggccttctcctggttcgcctacgacggcctgcctaccgccaccgccctggacccccaggccccgtcggcggactcggtaaacatccgctggggccgcaacgccctggaggtgctggagcggggggcggagctctccctctgccgccacctggagaccggccgggtcttggaggtgctcaccgagtatctctatgtggaccggggagtgacccggtgtgaggactccaccgactaccgtctggcggtgcgccccggcgacaccctctcggtggtgcggcgcatctccgaccgggcgctggtgaagaaggacggtgtcaccggctggtacttcggacggctggcccactaggtgctgccatcccggcagaacggtcgcagccaacaacagaactccgttatggcgggctgatcggtacgaatttttctcttgacaaccaaaagaaaaataatataataatagtaattattattatttaaggagaatcaatatggatataaaagggacgcgtaccgagcagaacctgtggaatgccttcagcggggagtctatggcccgcaataagtatctcttttttgccgacaaggcccggcaggagggttatgctgaagtggccgagctctttgagcggatggcacagaatgaaggagtccacggcaaactgatgtatcagaggctgtgcggcatcggcagcacggcggacaaccttcaggaggcgatgaccggggaatatggggagtggaccaagctctatcccggctatgcccaaactgcccgcgaggaggggctggacgagatcgcggtgctctttgagcagatttctcaaattgagaaggaccatgaattccgttttatgagtgccttggcagggctcaagcgcaaccatccggaaaaggagtccgaacccgtgtcccaggagcaggtggtcacagtagacggttaccgctgtgtgttctgtggcgctgtcttcgaccaccggccggatgtgtgcggcgtctgtgaggccattggagcctttgagccgacaacataccggaaaaaggtgagccggtaaccaaatagaagaaaaaagcttgacttatcagatttgtgctgatatactatcagagccgctttgaatgggaacgaagcgcggagacacctgagagcagggcagcagcaaaacacgcagactgagagcaggccggacgcagtctggcagcagtttcagcggagtgttgagctgttggccgtcgcggagggtgcgcagcgcgacaaacaagtgagggaaacctcctcccccgacagcgagcccgtaatgaaggagttgaaactacatgcatgcgatcatcgagaccggcggcaagcagtacaaggtgaccgagggtgataccctgttcatcgagaagctggccagcgaggccggcgagaacgtgaccttcgacaaggttctggctgtcatcgacggcgacaagatcaccgtgggcactcccgtggtggagggcgccaaggtggacgcctccgtggtgaagaacggcaagggcaagaaggtcatcgtcttcaagtacaagccgaagaagggctaccgccgcaagcagggccaccgtcagccctataccaaggtgaccatcggcaagatctccgtgtaagatgactaccgtcacctttcacatggagggagagcgcattgtgggcttcaccgtgcagggccacagtggctacgccgatgagggaagcgatattatctgcgccgcagtcaccagcgccgtccgtctgaccgagtgcgccgtcaacgacgtgctgggcctgggggcatcggtcaaggtgcgggagagcgacgcttccatcaccatgaaaatccccggcggcctgagcgaggccaatgagtccacctgtcagacccttctggcggctctcatggttcactttgccagcctgcacgaggagtatcccgaccatatcagcgtgatggaggaggaatgacctccgtcacggcgacgtttttaacacacaagtttggaggtgtgacaccatgctgaacatcggtcttcagttcttcgcccacaagaagggcgtcggctccacccgcaacggccgcgattccgaggccaagcgtctgggcgtgaagcggggtgacggtcagttcgtcctggccggcaacatcctggtccgccagcggggcacccatatccaccccggcgtcaatgtcggcaagggcagcgacgacaccctgttcgccatgaagagcggcagagtcaagtttgagcgcctgggcaaggaccgcaagcaggtctctatcgttgagatcgcccagtaaatatgggtaaactagccccggacggattcccgttcggggcttattttatcggggcgcaggctccgggcggccgcaagggccgcccctatgggacgagccaccctgtggcaaggaggtttttatggcagcaccctttgtagataccgcccgcatcaccgtcaaggcgggcagcggcggcaacggcgcggtggccttccaccgggagaagtacgtggccgcgggcggccccgacggcggcgacggcggccggggcggcagcgtgattctggagatcaacgagcatatgtccaccctgatggacttccgctataagcgcaagtatgtggccgccaacggcatggacggccaaggcaagcgctgctcgggcaaggacggggaggatctggtcatcaaggtcccccgcggcacggtggtgcgggacgcggagacgggcgagattatctgcgacatgtcccaaaccgaccgctttgtgctggccaggggtgggaacgggggctggggcaacaagcacttcgccacccccacccggcaggtgccccgctttgccaaggcgggcctgcctggccaggagcggcaggtgattctggaactcaagctgctggccgacgtgggcctggtgggcttccccaatgtgggcaagtccaccctcctctctgtggtgagcaaggcccggcccaagatcgccaactaccatttcaccaccttgtttcccaatctgggcgtggtgtatgtggaggagggtgtctccttcgtcctggccgacatccccggcatcatcgagggggcggccgagggggcgggcctgggccacgacttcctgcggcacatcgaccgctgccgcctgctcatccacgtggtggacgtgtcgggcagcgagggccgcgacccggtggccgactttgaggccatccaggccgagctgaaggagtacggctccgggctggagaaccgtcccatgctggtggcgggcaacaaggtggacattgccgccgaccgctccgctctggaggccctgagaacccatgtggagggcctgggcctgcccttctatgagatctccgccgccgcccagcagggcacccgggagctgatgtacgccgccgcccgggagctggagcacctgccgcccatcacggtgtacgagcccacctatgtggagcgcccgccggaggtggacatgtccgagcccctggagatcacccacgaggacgacacctggctggtggagggcccctggctccagcggctcatggccaacgtcaacttcggggactacgagtcccgaaactggtttgacaggatgcttcgccagtccggcctgtttgaccggctggaggagatgggaattcaggacggggacatcgtctccctctataacctggaattcgagtaccagcggtaaagcagagcggccggtccggctacggaccggccgctctgctgatttggcggaaactgccggttgacaaaaaggggggccatcccgtaaagtagaggacagaaacggactggaaaagggggcaattgaatgagacagaaccgacactggggccgcaggctggcggctttggccctgtcggccgcgctgacgggttccgccgcgcccgccctggccgcgggggactactgggacgtggaccggttggactggtactatgaccgctggatcgacaacggcgcagaggcctggtatcgggaggccacggcctacgccttggataacagcctgattctccccttcgggaggagctttgagggcggcgaggtgcttaatcggggccagtttgtggccatactcagccgcctggagggcgttgacagggacgcggtggagcagacagggcaatttaccgatgtgacggctgccgactactttgctcccgcagtctactgggccagtgccagcggcgtggtggagggcacctccgccactacctttcacccggagggtactatcacccgggagcaggtggccaccctgctggcgcgctatctggaggaaaagggcgtcattctgcccgacgacgccggcgccccggcgcgctttcaggacactgcttccatcagcggatgggcggcggagagcgtggaggagatgcggcggtgcggcctgatggagggggacagcgccgggcggatgaacccggcccggccggtgacccgggcggagggcatgaccctgttcatgcgtctgaccaagcagctccaggccgccggcgcggaggtgggcctggacggccccgccacccctgcggcgcttgaagacatcacgtttaccgtggagcgcaccgagatggcggtgggggagcggcagcagctcacctacggcttccctatgggggccgttgtacccggcccattgagctttgacgcctactgcacctccgactccagccgggaggtggtgacggtcagcggcaccggcctcatcacagcggtggcccccggccaggcggctgtggtgctgaagatggaacagggcggtgacagcggggtacatatcaagacggtgctgcttaccgtgtcgggggaggaaaacccggagcggccggagcccgaaggccccacggaggaggcggtctatgccgccattaccgcgctgaaggccgactacccagagggaatgcgttggacgaacgacaacttttacgcctcccaggcgctgcgctccggcggctacggctgtgagggctttgccctcatctgtagtgatgcggcctttggtacgctgcccgcccgcactcaccggagctttgaggccatccgcgtgggagatatgatccgcatcggcgactaccacacggtggtggtgctggaaaagaaggagaactcggtgatggtcaccgagggcaactacaacagctccatccactggggccgggagatcacccggagctctctggaacgggagggcttctccgtgcgcacccgctacccggcataacgaacaggagcggaggcccaggtgggcctccgctcctcaggctgtcaatagaccctcctgtcaaaggggtcggagggaaggatagtgtgaaagggaaccgtcagggttccctttcgcgttggatcaaacgaccttttgaaaatttttcagagtttcaaaaggttcgtcagcctgtcgaaaagactttttcgacaggctgaggagcggaggcccaggtgggcctccactcctgtgttttcttttaaacgccctcaaagaaggcgcagggattgcccgtcagcaggcggtcgatgtccgcccggctcaggccccgctcctccagaagcgggagcacccggcggtgaatgaaggtgtaatcctcctccagatgcagccagtcggagtgcttggtggtctcccaactgtcccagaaggccagataggcggccagatcatggctgagcagcagccggtggccccagccggcccggcacagggcggcgatggtgtccacccggggctccaggcccaggtcccggtcgcagaagccgaagcggtccatgcccagccagcagccccgctccagcatggcggtcaggtactccaggttgtcggtgtcgccgctgtggcccaggatcacccgggaggcgggcacgccgcaggaggccagcaggtcgagaatcgccccgccggcggccgtggaggggtcatggtggcagaacagaggcaggccggtctccttcgccacccggccggtggcgtggagcaccttttgcagcaggggagtgaggccgccgcggcccacaccggccttgagtatgccgggtttgctgccggtgccggagatgccgtcggcgcagtcgcccatcagcaggtcgtagatctcctcctcgtcccggaagtacagccagggctcctcctggtagtagaagccggtggaggcgatgaagttcaggccggtgcggcgggccacctcccggatcaggcggatatcccggcccaggttgacgggggtgccgtccaccacagtgcgcacgcccagggctttggccttgccgagctgtcccgcggcgatctcggccacttggtcaaactcaaagaagcgggcgccgaaattcatgcgcatggaccagtcggcacaggtgatgtgctcatgcatcagggtctggcccagttcagcggtgtcgatggggcccagaacgccttggatcatcatagggattcctcctgtctgttattgctgcctctattataacacaggggaatggccgggccctatatgatctctttataggggtatatgcgcggcctatggacgggcggttatccggcgctgacggggaggacgatgtctcccacggtgacggaggccacctcgtccagggggcgcagctcgtcgaagatccggctcttctggcagacggtctccccgtctccgggggtgatgccgccgccggcgttggtgagatcctgggtggtgccgtcggtgtaggtgatcaccacgggcagggactcaaagtagcggtagctctgctcccggtcatactcgttctcccggccgctctcccggttttcgctccacaccagctcctgatggacggtgtagtccacctggatggacaggggagagagggtgacgccatccagggtggcgtccatgccgttgagggtgaaggactggccggcgggcagggagatggaggagtcctcaaaggcaaagtcgaatttcagcctccaggtgccctcagccagtgtctcgctggtgcggtagtcgttgtccgtgtagaccgacagatcctggaacttgacggaggcggtgcccggcttgaggggctggtcctgagtcatcatctccacgaactggatggcgttgtcggcggggtcggcgtcatagaaccaggaggagccgtgcgccccgccgccggatgtgcgcacctgagtgccgtaattgcggaatctcagggggagcaggccatcccgttcggctccggccgccagcgtctcgtcgctgaccaggggggaaccgtcgtcccggcggatggagtagacgatggcgtaggagtaggtgtcccccatgatggcatcggcggtgatggtgacgccgttgctggtggcgctggccccgatggggtagccgatgcggtcgatgatctccgtctcggcggggccgccgccgaacaagccggcaaaggcgtccccggcgctgcccagggcgccggtggcccccgccacccccaggctgagtgccagggcggcggccacccccaccgccgcgaagcggcggaaccggagggggcggcggacggaggagaccggcccggcctccatcaggcggtccaccatctcctgcttctgctcctgggtaaagtggagccggtccatggaatcccgatagcggttgctcatgtcattccctcgctttctaagagtgtgcggagctgctggcgtccgcggttgagctgggtggaaacggtggcgggcttttcgcccagaagctgggcgatctcccgggcggcgtagccctcgtagtagtacaggtaaataacggtgcggtatttggggggaagcaggttgacggcggagagaaggctgccctcctcctccgcgggggcgggtacggcctccgccgcgtccagggctacggtagcgcgccgccagccgcttttcagatggtccttgcacaggttgaccgccgtgcggatgatccaggccttctcatgctccggggaggaaaaggcccggggcttttggagcagcttgagaaagaccgtctggcagatatcctgggcgtcgtcggtgctcttgaggtaggtgtagctcaggcggaggatcaggtcggaataggcgtgcaccagccgttcggcctccccgcggtccagtgtgacgggcatgtgtctcacatcctttgctattgagtcaaagcgctttcacccctaatacgattgaggggcgggaaatctttcacccgggcgcaaaaaagaagcggaagcccagcggcttccgcttctccggccttcaggggcggccgtctccggcgggcgcgtcatccccgtcggtgtggagaaacttcttgataacgaagatcagggccacggcggccacgcccagcagggtgtccaccgcgctggagtggttgaccacaagctgccgggcgatggcaaagagcagcacgtcggtgaccgcccggggggtgtggagcatcagcattttgacaaattcgatgcccaccacgatggtcatggcgtcggcgaagaaggcgtcggcgctgaagctcccccccagcacctgggaaagggttccctcccccaggaggaacagctcaagcagggtgacggccagaatgaggacggcgaccaccagctccagaacccaggccgccttgagcaggcgcttgacaaagtttgaatgcatgggactctccttttttgatccataccaattgtactcccagtatagcgaaagccggtgcgcccgtcaaccggaaaaggtataagggggggcggaatggcccataatggaaaattagattgacttaaaggtgagactatgctatgataacagcagttgaaaagggagtagtttgaaggtatgccgtcaacaccacggtccgggtttccggcctggcggcatgcgcccaatgcggtaacaagacttttcgacaactgctgtggcatgcagcggttggcggaaggtctttttttgtcgcctctccgccggagaacactgggaaaggaacgagtgatatgacacaggcctattacagaaagacaccgcagcaggccctggaggcgcagaacgcctccgcggaggggctgtccgcccaagaggcccgccgccgggcggagcagtacggccccaacaagctctccgagggaaagaaaaagagcacgctccaggtctttctggagcagttcaaggatctcatggtactcatactcattatcgcagcggtgatctccgccttctccggcaatgtggagagcaccatcgtcatcttcgccgtgctggtgctcaacgcgatcctgggcaccgtccagtatgagaaggcggagaagtccctggagagtctcaaggccatggcctcccccacggccaaggtgatgcggggcggtgtgcgggtggagatcccctccgccgacgtggtgcccggcgacatcgtcctgctggaggccggggacatggtggtggccgatggccgggtgctggagaacttctccctcaaggtcaacgagtcctccctcaccggcgagagtgagggcgtggacaagacggccgaggccatcgatgccgaccaggtggccctgggcgaccagaagaacatggtgttctccggctccctggtgacctacggccgggccacggtgctggtcaccggcaccggcatggacaccgagctgggcaagatcgccgcccttatgaaccagacccagcagcgcaagacccccctgcagcagagcctggacagcttctccgccaagctggccatggtcatcatggccatctgcgcggtggtgtttgccctgtccatcttccgcaccggcatgggcattttggactccctcatgtttgccgtggccctggccgtggccgctatccccgaggccctgtcctccattgtcaccatcgtgttggccatgggcacccagaagatggcccgccagaacgcgattatgaaggatctcaaggcggtggagagcctgggctccgtctccgtcatctgctcggacaagacgggcaccctgacccagaacaagatgacccctcagaaggtgtacgccgacggctccctgctggagggagaggatctgagcctggtcaacgacgtacagaggctgctgctcaaggcggccctgctggccagcgacgccaccaacaacgaggaggagggcaccgccatcggcgatcccaccgaggtggccctggtgatgctgggcgaaaagttcggcgtggacgaggagagctaccgcgcccagcacccccgtctgggcgagttggcctttgactccgaccgcaagctgatgagcaccctccacgacattgatggggtgcctaccctcttcaccaaaggagccatcgacgtgctgctgaaccgctccacccacctgctcacccgggaggggaaggtggagatgacccccgagcggagggaggagctggcccgggtcaacatggagctgtccatggagggcctgcgggtgctggctttcgcctataaggagctggacgccgtgcgccccctcaccctggaggatgagaacggctttaccttcattggcctcatctccatgatcgacccgccccggcccgaggccgtccaggccgtggccgacgccaagcggggcggcatccgcaccatcatgattaccggcgatcacaaggtgaccgcctccgccatcgcccggcagctcggcatcttccgggacggggacgaggcggtgtccggcgtggagctggacggcatgactgacactgagctggacgagcgcctgccccacatttcggtctacgcccgggtatccccggagcataagatccgcatcgtcaacgcctggcagcgccggggcaatatcgtgtccatgaccggcgacggcgtcaacgatgcccccgccctcaaaaaggcggacatcggagtggccatgggcatcaccggcacggaggtgtccaaggacgccgcctccatgatcctggccgacgacaacttcgccaccatcgtcaaggcggtggtcaacggccgcagcgtctacgccaacatcaaaaacgccatccagttccttctctcgggcaacaccgccggcattttctgcgtgctctacgcctccctgctggccctgcccgtgcccttccagccggtgcacctgctgttcatcaacctgctcaccgattccctgcccgccatcgccatcggcatggagcccgcccggaagggcctgctggaccaaaagccccgggaccccagggagcccattctcaaccggcccctcctggcccgcatcggcggccagggcctgctcatcgccatcgtcaccatgattgccttctacctgggctaccaggggggcgacgctgtaatggcctccaccatggctttcgctaccctcactctggcccgcctgttccatggcttcaactgccggggctccgagtccattttccggctgaagctatccaccaacaagtactccgtcctggccttccttgccggtgtggtgcttctgctgctggtgctcttcacccccgggctcaagagcctctttatggtggcccccgccttcggctttgccaacctgggcgagatcgtcctgctggccttcctgcccaccctggtgatccagctcgtcaagctcgtctgcgacgcccgccgggggaaataaacgtatataacgagagccgcggcccgctgtttgcgggccgcggccttttattgtatgctgtccagagcgaagagggcggcgcccagggctccgcagagatccggctcgggggggagccacaggggcgcgcccagacgggcctccagcgcctccgtcacgccccggttgcgggccacgccgccggtcatcatatagggccctttggcccccgcgcggctggccagggcggcggtcttggcggccaccgactggttcaggccgtggacaatgtcggcggcggagtggttgtccgcgatgagggacaccacctccgactcggcaaagacggtgcacatgctggagatggtcagctcctgctcccagtgcaggccgacgcgggccatctcatccaggttcagctccagggtgcgggccatcagctccaggaaccgtccggtgccggcggcgcacttgtcgttcatcacaaagttggtcacgccgcccgactcgtccagacagatgaccttgctgtcctggccgccgatgtccacgatggcccgggcctccgggtacaggcggtgggccccccgggcgtggcaggtgatctcggtcacctgcccggtggcgaaggggatgttgttccggccgtagccggtggccacgatggcggccatgtcctccggggtgaagccgcccagggcggcgaaggccttctccgcgccctggctggcctttgggccggtgcggacgatggcggaggcggccacgttccccgcccggtcgagcaccaccacgttggtggtggtggagccgctgtcgatgcccgccacataggccccccgccgggcggcggaagcaggggcggggcggagctccagcccctccagaaaggcctccagccgggtggagagctgcccgctggacaggggggtgaagtcggtctccaccttgagcaggggcagggcggtgcgcctgcgcaggttctcgtactcgaaggagtagaagtcgcagaacttgacggtgtggtacaccaggcccttgaggccggggtggttcagcagctcctcccggcggcccaccgcgtccatgcgcaggcaggggatctgccccagcagagccccggcgtaccagtccagcaggccgtccaggccgtccagcccctccggcgggggcggcaggctccggttgccgccgcaggtcagatcggccaccggcaggggggagacccgccgcagggcctccagcaggcccgccccggcccgcgccccggtgacggccaggaaggggccgtccggcagggggacagggggcgcgaaggcggcccggagggccgcttcgtccagggtggcgccccggtaggccccgtactccgccgccagccgctccagctccccccggagccgggccttggcgcagccgtcgtcgtggtggggaaggtccagcaggaagaggaaatccagcccgccctgggcgcggagcacgtcgtagcagcggcggatggagtcgcagcagttgaccagcaccagctccctcacgccgtcccggcggcactcctccagcaccgccttggcgtggcagcagaagtggttgtgggtcagcgcctcggcgtgggagaaggcgttagcctcccggttgagaagggccggctggccgcccagggcggccagcagctccacgggggtgtatttacaggtatatccgatcatctgcatccctccagcagctccagaaaggcctggagccgggtgaccatctggccgtcgttcacgttgccgctgtcgcagccatccccatccagcaccagggtggggaacccggcggcctccagccggcgtttgacgagctgggccgcgccggaggtctgcttgcagccccagtggcagaagtacaccgccccgtcggcccggaggaggcgggccagctccgctgcccgctccgcccggcgctccgcaccgccgttgaaggaggagcagaccagccgccgggccatggactcataggggcgctccggctcggggagcacatcggcatccagggccatgtcgcaccccacaatctccacgtcggggcggaagttcagcagggcgcgcaggctgtcctgccagtgggggagggtgtgcagccacagaatccgctttccacgccgcccctccggcagggcggccacctgggcgcagagctgctcggtgtagcgcagggcctccggcgaacctagcatggagtgggtggcgaagacggagagcatctcggaggtcatctcgtcagagagggagcgctccgcccgcagggacaggtagcggtggtagccctccacggtggcccgggagcgggccaccgcggcccgcagcgcgtcctcctccagggggcgccccccgtgggcctggacaaaggccgccatggcccggagctgttcggccacctgggcgacactctcctccgagggggcgtagggcacgtccaccgtgaagcgtgggacgtcccagaactccgccagccggcggaaggtgagctggttggcgtcgcaggccagggaggtgttgaggatgaaccggggcctggccatgacgccggtctcggccaggccaagcaggattttgtggtaggagcagtagctctccggcacgccccgctcctccgccgcctccacgaacacccgctccgccgccgtggacaccagatagcaggacagcccctcgggcagcaccggggggatgttcagggcgtggagcacctcgcaggggaggaagatgttgacgcaggccgcccggccggggcggcccagggcggcggccatggagcgggccgtgtccccctgcatggcgcaccgggcggggagcacgtttttgggcgggaagtacttcatctgtacccccaccagggtgtaggccgtgcggagcagggcgcgggcacggtcagggtgcccggccacctggcgggagatcaggcggcccagggcctcgatggaagagcttggcatagagactcctttccgaaaaaacgggccgcccgctcgggcggcccgaagcatagggttctttcttacagaggcttcaaggaatcgtaagaaaatctttcttgccagcggcgcgggatatttgctattctatacccacgcagacgaaagagaggtttttctatggaaatcatatgcagtaccacttatgaccggagggcgctgtctgcgctggccagggctctgcgtaaaaccgtccgcaggacgcgctcacggctgctgcgcgtctggtgctgggtgctcctggtgctgagcctgctgtcggcctgggtctcctggggcgagtggggaactgtggcgctcaatggggcggtggccgtcctgatgctggccgttctgctgggggaggacgcaatcaacgccttctttgccaggcggaatgccctgccggggatggaggtgtgcacggtgcgctttttggaggaacactatgaaaccaaaatcgccggcgcggccactcaatggaaatatagcaagctcctccggctggcggagaatgaccgttacctggtgctcattctgggaaagaaccacggccagctctgcgataaagagggggtgacgggcgctgccccggaggagctccgcgcctttctggagaaaaagacggggttgacggttgaacggttccgatagcgggggccgccgcttcg

SEQ ID NO: 4215 - DNA, 3416 bp, Unknown
  gut microbiota DNA sequence
acgagaacgagcgcgccaacaccatccgcctcatgaaggtcaaggacatgttactgaaagaggccatcgaggagcgcagagaggaagatgctagagccacaaggacttttgggtcttccggtaaagcgccccgggaggtataaaggacggttttacccaaatttaccgctactacgatggaacaaaaaggaacaggcggtatcccatgggactacatgggataccgcctgtttttatttattattgtctcttatttgatgttttacccgctggttttgtctcgtacaagcatctttattgaataggccgcgattatgcggcgggcggcttttttagggatatttatgattcccattgggcggtgaaggccccaccgcccccggcggcggccacggccatccaggtgctcccctccggcacctccaccgtgttctccccctcctccagctccaccacagtgtcgtcgggcagtaccagcaccacccggtagtcgccgcactcctgctcggcataggtcacgtgcaccgtccgcgcttcgtttcccggcagggtccagaggtactccaccccgcggaagctctcccagctcgcctcgcaggagaaggtatcgctgtagctctgccagagaaccgccgaatatcccatctcgtttgccacgatatccgcatcggtgatatcctccagggcatgcacccccatgtgccccaccccgcaggccgtcagcagcagaaacagcacggccagacagggaagcagccgctttttcatggattctgccccctctcatattctgtccaaagaatagcagccccagctttaaccgttctgaaagagagattaaaatcttatgaaagccccgtctgttcggtgagctggccggtaatgtactgttccccgtagagcatgtcataaacgatgttgcgccacgccgccaccaggggttcgcaattctctggaggcgtgtgggagggggtgccgtcggcggctacgaaaagccgctcccggtagagggtcatctcctccatagcggcggacacccactggaaatacaggggcttgggcagccccgcccaccccagcagatacgtccccaggccggtacagctcacctccgccggcgcctccagttccgccccaaagttgttccacaccaggaagtcggtgctgtgcatccgcttgagctcctccgcgtcccagcttccggtatccgccgaggacgcatagccgaggcgggtatagagcgtatcgtccccgcccagtgacagtcccggcagatgatcccccagaaagaccaggatagtgggctcctctgcctgggcgaagtagtctgtcagcttgcccagggcggcgtccgcgtcggtcaggccgtgaaccagagcgtccagcacccccgcctcctccccgctcaggttgtccgccgacgccgccaccggcgccggggtgttaaacttgccgccgaagtagggctggtgattttccatggtcaggccgtagagaaacaccgggccgtcccccttggcctcgaagcgggcaatcagctcgtcggccagggtgtcgtcggagacatagcccccggcataagtcttgtccacaaggaagtcgtcctgataaatgatctggtcaaagcccagggcggggatattgcgtgcccggtcatagagctcgtcgttgtaggagtggacaaagagggtctcataccccgccgccccgaatacccgggccagcgaaggcacacggcggtaggccgacgtatcgcccaggccggtgagggactcccccgcccccaggaaggcggaagggatgccggtgaacagttccatctccacgttgccggtacccccggcgtaggtgttggacaggaagacgccgctggggaacgcctccgccagggtgtggaagttgggcaccgggtcggcggaaaaggacacgcccggcaggcgggtggggtcaaagaagctctccgacaccaccagcaccacattgggcttgaccgccggctccgccgactgctctgcctccgcccggagctggagcaggatgcggttcatgccgtcctcgctgtagctgtccggctcggccatggcgctctcccgggcggcgctgtaaagcccggccagaaggcccagccggtcgttgcgcatggactggctctccccctcctccccggccagcagcacggcggaggccggactcagcagcacccaggccagcagggcggccagaagtcccagcacgcccagccgccgccggccgtccaggggccgggccgggcgggaccagacaaaggccgccaggaacagaagcgccgccagggctatgcccccccaggtgccctcccccagctccatgccggggcggaggaaacccgccacctgccccgcctgccccgccatggccaggtcgctgaccagcagggggacaccgttgaccgcctgcttcagatggctggcgacggacagcagcaggcagggcaggagggtgaggagctggccgcagagcaggctgtcggtcagggtggtcaccaggagctgggccagcagcagcaccagataggtgtaccccgccgcaccggcgtggctccccatccacgcccacgccgccgccggctcctggagggtgaccagttggcacaggtagaccccggccaggggaagcagcagggccagcaaggcccgcccctggggatcggtgcgccggtaccaccggctctgatgcggctgcagcggttccattctgccccactccctcctttcgcgttctttctactatagcagaaacgcggccccgccgcaagggcggggccgcgttttgaaacagagagcgctatccgccgaattccacccgcacatcccccatatcactggtcaccttcaaggaatgagggccgccggggctggtcatgaccgggcgctgttccgagccgttcagggtcagctctcccatggacaggtgcatgtccaggccgtagtcgtcgatgggttctccggtatacagctccagatcccccatggacagggtgcactccgtattcccccggaaattcccatccagatagacgtcgcccatagcattctccacggtgcaagagctgcgggtggtcaggccctccgccgtcagatcgcccatggaaaccgcgagcgcggcatccgccgcctccacgccatagagcgccagggaccccatttcactccccgcagccagggtcccggcggtcacccccgtgagcgtcacatctcccagagcggtgcggatgtccgccgactccagggcaaccccctcgggcagcgtgatcaccgccgcgacctcgtgctcccagtcagacagctcccaggcacccgccccgctgcgtaccttgagggtatccccgtccagctcatactccaactgaattccgccccagccggtcagggaaattc

SEQ ID NO: 4216 - DNA, 12294 bp, Unknown
  gut microbiota DNA sequence
ccccacgggagcccagcggagcgggtcgcgtggggaagcggagggacaagggagtggaatggatatccggcgcacagcgccggatgaaatggagcggactttgtcccgacgccgtttcacgtgaaacaatcagcccagccactccatgagggactggtaggcctccagggggttgtagtcctgtcgctgctggccggtgagcccatcggccaccgtacccagtaccccctccatgccgcccgctccagccagagcggcctcggcggcggccgccgcatcccgggcatcggagtagcgcccgtcgttgtatagggcgcgaatttggttcaaatagcagagcgcctccagctgcaccagggcggcctcgccgtcggaggcgctttccgcgtcctccagcgcttcctggagctgggccacctgctggctcagggcctcgttttccaccttgagggtctcgttttcctggagaatgttctccagggactgggtagccgagtcggaggtctgctccagcttgtccatggcctcctggttggcccgctgctgcatgaagtaggacatcagcagcaggagaaaagccgctgcaaagaggatgaccaggtagagcagcaccgagctgcgcttgtggggccgctcatgctccgcctcgtgctggaggcggctgcgctcctgcttgtcggaatcggtgctcaaagggaaccccctcctttcccggcggagggaagctgctccagcagctccagcagagtgttcaaatcctctggattgtagtattccagctcgatttttccctttttccggccgttgatgatgtgaaccttgcggccgaagcgggtggccagggtcttttccgcctcccgcagatagatggacaggtcagggccggcggcggacttgggctccgcagcttctctgggttccgcggccagccgcttggccagggcttcggtctgccggacggagagctcctccgcgatgaccttctgcgccagctttttctgcagctccccgctgggcacggccaggatggccctggcgtggccggcggagagcttgccctcctccagcagcaggtgtaccgggtcgggaagggccagcagccgcagggcgttggccacggcggggcgggacttgcccacccgctgggccacctcctcctgggtgagaccgtattcgctcatgagcaccttgtagccgttggcctcttcaatcgggttcagatcctcccgctggaggttttcgatcaggccgagctccatcaccttgcggtcgtcggcctcgatgatgacggcggggatttcgttcaggcccgccagcttggcggcccgccagcggcgctccccggcgatgatctggtagtagcccgacgagagccggcggacggtgaggggttgaatgatcccgtggatgcggatggagtcggccaaatcctgaaggctttcctcgtcaaaccgctttcgaggctgcttgagccccggttccacctgggagatggggagggagagggagcccccctcctgggactggagggcggcgtcccccagcagtgcgcccaggcccctgcccaggccgcgttccaatgccataggtcaatccttcctttccacacgggtgacggcgtattgattgtgctccagcagctcctgggccagggcatcgtaggcctccgcgccccgggagagggcgtcataggcggacaccggcttgccaaagctgggggcctcggacaggcggacgttacgggggatcaccgtggcgtacacctggccggggaagtggcgtttgacctcctccgccacctgcatggagagattggtacggccgtcgtacatggtgagtaccaccccctccagggcaattttggggttgagggatcgcttgacaatgcgaatggtggagagaaggtcgctgagcccctccagggcgtagtactcacattgcaccggtaccagtacggtatccgctgcacacagggcgttgagggtcagtagttccagggaggggggacagtcaatgaagatgtagtcatagtgttccgccacctgctccaaggcgtttttcagccggtactcccgctgctccagggcgatcatctcaatggtggcccccgccagcgccttgttggaggggagcacatcgccgtaggaggtggaggagatggccttagcggtctccgtcccgttgagaagcacgtcatagatgttgggcgaggtggtcttgtctacgccgaagccggaagtggtgttggcctgggggtcaaaatcgcacaccagcacccggcagccctgattttttagagccgccgccaggttgacacaggtggtagtctttcccacgccgcccttttgattcacaatcgcaatggtctttgccatagcacacctgcctttttgggtcgttgcaaagggtcaggttctattatatagcggcggtagacgtaattcaactgaaattcgcactgtttcacgtgaaacaggaaaaaaaagaggatggagctgtttcacgtgaaacagccccatcctttcagaaaaaccgccatggcctccgcgtacggcgcgcctctacttgggaatagtgatggtcagcaagatggagtcctccgtctcctggcgcttgcagttggcctgtacgcccgcgctcttcatcatggacagtccccgagtcacggtgttgagaaacagccgcacatccttaattacaaaggttggttttttgcgggcgggcttgtctgccggatgaagcagggcttccacatactcctccgtccgggccacagtaagcccctgctctgccacatgccgggcggccatgcgctggagctccggctcctccaggcggagcagcgcccgggcgtggcgctcggtgcagccgcgctcccgcagcagagtgaggacatcaggcgggaggcggagcaggcgcagcttgttggccaccgctgactgggacttgccgatgcggcgggccgcctcctcctgagacagatggtaggtctcgatcagcttggccagagcggtggcctcctccacaaagttgagatcccgccgctgaaggttctccaccagggccagcaaagaagagccctggctgtccacgctgaccagaatgcagggcacctcggtgagaccggccatgcgggaggcccgcaggcggcgctccccggaaatcagctcgtagccgccgttcttggaccggcggacggacagaggctggagtacgccaagctcctgaatgctggcggccagctcctccaggccctcccgggaaaagcaggtgcggggctggtccggattgggggaaatggcggcaatggggagaaacagcactttggtgctctcaaacagtccttttcgacgcagtaaggacatcggaaagcctcctttgcggtagaatattgactaaccatatattaccatattttggcgcaaaaaaagccgaatgccgtcgattgggaaatattttccaaaatgacagaaagcttcgtgcgcacagggcgtaccgcgaaacgacgcaaaggctcaggcgcatgaagtggttgcgtatgtgggccgtaccgacccacgcgctgtcatcccatggccgtgccgctgttaagcggcacagggctaattttgctctgctcctgcacagcaaaaaagcccgcccggcatttaggtccgggcgggcggagaatcagggctgtaagaagccctttccaaagatttcactggagttggctacaatcagaaaagcatggggatcaatctttttcaggtagcggcgcagaagcacggcctgccccctggtgaggacggtgagcaccacgtggtgctctgcgtgggtataagcgccctgggcctgccatacggtggcgccccggcccagggtatgggtaatatagtcgcacacatgctccgggtcgtaggagatgacgaaaaaggccttgcgccggttgaaggactcgatggcgctatccaccagcaccgacttgagggccaggcccagcagggagcacagtcccgccgtgatgtcaaagacaaagagggcggccgccgcgatgaccacgtcggagaggagcagggcacgccctacgtccaggccggtgtattttttgagaatcatggcggcgatatcggtgccgccggaggaggcgtctatgttgaaaaggatggcggagcccagggcggggaggatcaccgcgaagaacagctccagcatgagttggtcggtgagaggacggtccatgggaaacgcccactcaaagagctgaatgagcccggcggagagaatggaacagtagaccgtccgggcgccgaagcccctgttgagcattacaaagcccagcaccaaaaagagcacattgatgatggtgttgaaggtagagggggagagctggggcagcagctttcccagcagcaccgccaggccggacacgccgcccatggaaaaatggttgggaaatttgaaaaagtagacccccaccgacaccagcagggtgcccaggttcatcagcaggaattcgcgcagcagttccttgcggttggtcatccgtttcacttcctaagtagatggtaagcgggtcagcgctgggtcagcagggcgctccacacgtcgtaggtaccgtccgccggaatgttgccgatgcgccacagggagactcctgtgatgccgaacatccgggccagcgccaccttgtccagcacgctttgctcgttctcgtaccagaccttgtaacggctgccgtcctcggtagtgtagagggcgcagggattgcggaattcctccgagtagaccacctgagtgtcgggctgggccaggcgcagggccagggtggagggggcggggtggtagatagtggtctccagcaggcggtcctctccgtccacgtggaagcccgccgagccaaaggagatctgcagggccagcttgctccggtcggccacgccggtggccgggtcggtaagatcacgcagagcctcgtacacgctggcgaagggggtgacgggggagtcggtgttggtagtgcctacataggagtcggggacggaggtccactggtagtcgtgggccatgaggatcaccttgtcggcggcctcgccaatgccccggtagtcaaagccggtgtaccaggtgtcgggctggacgcagacatagagggttttcccctggggcaggacggcatccagctcttttagaaaggttacataattcggttttatggtatcccccttcaggccctcaaagtcgatggtcaggcccgcgtagtccgcgctggcggccgccagggcggccacggcctgggcccggacctcgggcgttccggtcaccgccgccaccgtggaggtggtggtgccgtcggggagggggatggaatcgcccgctgaggcatatacatttaagttgtaggggaggctgcgggcatcccagtaatcggtggcgggggtggggtcgtcggggcgcacccagtcgttgccgttggtgcgggaggagttgaggacgggcccggcggcggggtcgtactccatccgggcccagcctacgctcaccgcgtccatggaggcggtgagatcaatctgggaataggaggagaaggcgtaaaagccgtggagccagtccagcttggaggtgtaccgctcgtacacccgcaccagcatggcggcggcctcctcccgggtggcggagtcgcggggcaggaacttgagctggccgcccgccccggccacgccggtgatcatgccgatgtcgtaggcgatggcgatgtacccccggttgtccgtgatgtcgtcaaagggcagctccagcccggacagggactgggccagcgtgccgtagcccagggcccgcaccagcatgaccgccatctcctcccggctgatatagtcctccggacggaaggcgccgccggcatccatcacgccgtgggccagggcggtctccacataggagtaggcccagtgagaggcggggcagtcggaaaacgagggcgcgcccggggaggcggcatcccagccgaacatgcggcagagcacggccacaaactcgccccgggtcagctccttccccacgccaaaggtgccgtcggggtagccgttcatcaggccatagccctccgccttttcgatgacctctgcggcccaggtgccctccgcgtcggaaaatgcggcgctggccgcgggggagaggggtgcggcgctcaaaagcaaaacggcggccagggctgccgcacagaaacggtgtttcataacaataaacctccttgctcaaaagcgatcaacagcattgtaccaaacccggcgcaaaagcacaatgaaaaaaccggaaagcggggagaacctccgtacaaaatttctaaaaacaggtgacgaaagcaatcttttttgatagaatataggcagttgcagttgtctgtcaaattcgatacaatagaaataactttttcttgtggagtaaggagagggacataatgaaactgctggaggagcgcattcggacccacgggaaaatccgtgaaggcggcgtgctgaaggtggacagctttctgaatcatcagatggacgtgaagctgttccaggaaatgggcaaggagttcctgcgcttgtttgggaactgcggggttaccaagattttgaccatcgaggcatcggggatcgggatcgcatgtgtaaccgcgcagttttttgattgtccggtgatctttgccaagaagaacaagacccgcaacatcgccggcgatgtctacacctccaaggtggaatcctttacccacggcaaggtgtacgacatcatcgtgtccaaggagtttctgcaccccgaggaccgggtactgctcatcgacgactttttagccaacggctcggccctgcagggcctcatcaacctggtgcaggatgccggggccaccctggtgggtgcgggcatctgtgtggagaaggccttccagcccggcggcgatttgatccgcggtatgggagtccgggtggagtccctggcccgcatcaaagccatgagcgtggagggcggcgtggagttctgctgagcccacagctccagccgccgcatcccgtaggggcggcccttgtggccgcccgccgggagggcgggggaaagaaagcgaagagaaaagcggaggcgggcgcctccgccggatgaaccgaggtcttacggttcgtcggggagcctccgggctcctgttttacacagcaagaccggctgccgcaggcggaggacgtccctccgtgatgagcggatgattttggcgttcggcgcgtatggcgcccgtcggtgagcaggggggagtgccccccgtgttcaggcagccgttttgaatagaggacccgattgattgagagacacaattaaggaggaacttaaacgatgaaaaagagactgcttgcactgctcctggcgggcgctatgtctgttggactggccgcctgcggcaacagcggggacgagggctccgccaacaccccggccggcggggagaccaccccggtgactgacggcactggtgagccctccgccgagggtaaaaccgtcaaagtgggcatggtttgcatcggcgacgagaacgaccagggttatacctataactttatgaaggccgtggaggaggccaccgcccagttggccgagcagggcattaccgtggagtggagctacaagaaaaatatcctggaggactccggctgcgaggacgccaacatcgagctggccgaggatggatgtgatattatcatcaacaactcctacggcttcgagccctttatgctgaaggtggcccccgactaccccgaaatcgagttcatctcctgtaccaaccaggcctctgccgtggacgatctggacaacacccacaacgccttcgccaacatctacgagggccgctacctggccggcgtggccggcggcatgaagctgcagcagatgatcgacgagggcaccatcaccgccgaggaggctgtcattggctacgtggccgctttcccctttgctgaggtggtttccggctacaccgccttctaccagggcgccaagagcgtgtgtccctctgtcaccatgaaggtcaagtacgtcaactcctggtccgacgcgccccaggaggccgccgccgcctccgccctggccgacgagggctgcgtgctcatttcccagcattccgacaacaccacccccgccacctccgcccaggacgccggcgtgttccactgcggctacaacaacgacatgaccggcgtggcccccgaggccagcctcatctcctgccgcgtggactggacgccctatttcgtctatgccatctccgccgtggccaacggtgagagctttgaccaggactggacggccggctacgccgatggctccgtcaagctgaccgagctgaacaccgccattgccgcccccggcactgaggaggcgctggaaaaggcggaggccgatctggcgggcggcctgcacgtgttcgccggccccctgtccggccacccggcccagaatcctgacggcgaggtgtggagcatcggggagggcgagttcttccccgaatccgacctgagccaggagggcggcctgtccgcgcctcagttctgctacgtcatcgacggcatcaccgaggagtaaacaaaagatcaaaccggaagcaaaggcggggccggcccaggcgggccggccccggatttctcccccgcgaccgcgccgggggcctttgccgcgaggaacagcgagtgcgagagaagagaacgcttcggccccgcgggggccgggaaaggaggctgggtttggaacaggtcagcgcgatccagctcaaggggatcaccaagcggtttggcagcgtcgtggccaacgacggaattgatctggaggtccggcgcggcgagattctctcccttctgggggagaacggcagcggaaagaccaccctgatgaacatgatctccggcatctacttcccagacgagggacacatccaggtggggggaagggaggtcaccatccgctcccccaaggacgcctacgccctgggtatcggcatgatccaccagcacttcaagctggtggacgtgttcaccgcggcacagaacatcgtcctgggcctggaggggaagggggccttcgatctccgggccgccgcccgccgggtgaaggagatcagcgagaagtacggctttgacatcgatcccggcaaaaaggtctacgacatgtcggtgtcggagaagcagacggtggagatcctcaaggtgctctaccggggggcggacatcctcattctggatgagcccaccgccgtcctcaccccccaggagaccgaaaagctcttcgccgtcctgcgcaacatgcgcgccgacggcaaggccatcgtcatcatcacccacaagctccacgaggtcatggccctctccgaccgggtggccgtcctccgcaagggcaagtacatcggcaccgtccacaccgccgacaccgatccccagaagctcaccgaaatgatggtgggccgggcggtgagcctgaacatcgaccggccggaggccaagtaccgggatctccgcctggaggtcaagggcctgacctgccgggatcacgagggggtcaagaccctggacgacgtgtccttccaggccttcggcggcgaaatcctgggcattgcgggcatcgccggctccggccagaaggagctgctggaggccatcgccggcctccaggccgcggaggcgggcagcgtgctctattacccgccccaccccaacagcgacatcgccggctaccacgtccccgtggaccgggacggcgaggagctggtgggcaagacccccatgcagatccgccgtgtgggcgtgtccctggccttcgtgccggaggaccgcctgggcatgggcctggtggcgggcatggacatggtggacaacatgatgctcaagacctaccgggagcacaagggccccttcgtggaccgcaaggccccccgggcgctggcccagcggctgattgacgagctggagatcgtcacccccggcgtcggcactccggtgcgccggctctccggcggcaacgtgcagaaggtgctggtgggccgggagatcgactccacccccaccgtgcttatgaccgcctaccccgtccggggcctggacatcaactcgtcctacaccatctacggcttgctcaaccagcagaagatgaagggcgtggccgtgctcctggtgggggaggatctggacgtgctgctggagctgtgcgaccggatcctggtgctctgcggcggcaaggtctccggcatcgtggacggccggaataccacaaaggaagaggtgggcctctacatgacccacgtgggcggcggaaaggaggcgggcgagcgtgcatagcagcggcaaaacacccctgatccgcctggccaagcgggacggcatggccggcgcgggccagtggggcatccgcatcgcggccatcctgctggccctggtggtgggcggcctggtgatcctgctctcgggcaacaaccccatccagggctacgccatcatcgtggagggcgccctgggcaagacctccggcatccggcagaccgtgaagaacttcatccccctgctggggaccgccctggccatcgccccctgcttcaagatgcgcttctggaacatcggcgccgagggacagatcaccgccggcgccatgtgcgccacctatttcgccctcttctgggccgactccatcccccaggtgcccctgctgctcatcatgtgcgccgccggcgccatcggcggcggcctgtgggcgctggtgcccgccttcttcaaggcccgctggggaaccaacgagactctgttcaccctgatgatgaactacatcatcatcggcgtggtgaagtggctccagggcggcccgtgggagaagatcccccggggcagccagcagattgagcagttcgcctccaacgcctgcctgccccgggtggccggcgtgtactgcggctggatcgtggtgctggccctcacggtgttcatgttcctctacatgaagtacaccaagcacggctatgagatcgccgtcatcggcgagagtgagaacaccgcccggtacgcgggcatgaacgtgggctgggtcattatgcgcaccatgttcctctccggcgccatcgccggcgtggtgggcttcctgctggtctccggcgccaacaacaccctgtactccggcgtggccgccggggcgggcttcaccgccatcaccgtagcctggctggcccagctcaaccccttcgccatggtgggcatttccgccctgctggccatcctccagaagggtgcggacaccctcaacacccagatgggcgtccccgcgtccctctctgacgtcatcaccggcgtgctcctcttctttatgctggggtgcgagttcttcatcaactataagctggtcttccgcggcgcggaggagcgccacaagaggaaggaggcggcgaaatgacctttctgctcaacctgatcacggccgccgtcctctacggcacgcccctgctctacggcaccagcggcgaaatcctcaccgagaagtcgggcaacctgaacctgggcgtcgagggcatgatgttcatgggcggcgccctgggcctgggcgcggcgttctactatgagaagctggcgggcgcggcggtgtccgcccccctggcggtggtcatcgccatcgccgcctccttcctggctggcgcgctggccgccctgctcttcagcttcctcaccatcaccctccgggccaaccagaacgtcaccggcctggccctcaccatcttcggcaccggcgtgggccagtacatcggtgaattcatgcgggtgcgggagggcacctacgtggccgtcagcaacaccctgaagggggccttcaacggctcgcccttcccggccttcctccaggagctgccggtggtgggcaggctgctcttcagccacagcattttcacctatctgggcatcgccctggccgtggccatgggcctgtacctccaccgcagccgctccggcctctacctgcgcgcggtgggcgagtcccccgccaccgccgatgccgccggcatcagcgtcacccgctgcaagtatctggccaccgtcatcggcggcggcatctcggccatcggcggcatggtgtatatcatgaccgtggtgggcggcgtttggaaccacgagggcctctccggcgtgggctggttggccgtggcgttggtcatcttctgcctgtggagcccctaccgggctatctggggttccatcctcttcggcggcctgctcattctctacctgcgcatgcccatcgacctcatccccgaccaga

SEQ ID NO: 4217 - DNA, 32395 bp, Unknown
  gut microbiota DNA sequence
ctgtaaaccattgatatgactgagtttttccagatcctataattacacccggaccaagcgtagagaggcggacaggataaaatcctgtccgcctctcttgtttcatatctgtctttctgtagcccccttcatatgctgatgaaccagttatataattattgttgaaaacaaaaatacaataatattgattttttaaccgcatgtcgacaaaaagtcagcatttggggccctgtttttggaagataacacgcccatttacgcaaaaatgtggtatattgaatgtaaagttatatctaataatgaattccattatgtcagttcgtttttccgccatgtcagtaccctattttcgacgattttccctaaaatagtagtcgtatactatctacgggaggtaaatctatgaatttcgacaaacagcttgacgtattttccagaaacctgtccgaaatccgccggaacggccgctactcctaccaggcattctctgaaaagcttcgggttgggaagtccacggttcaggccatcgaaagcggagactacaatattacgctgagtacgctcatcacaatcgctaattccctggaaatccatccggcactcctgttgatggatctgccgatagagttggatctaacagggacaaaccgctattatgccaacttactcatgacctactccgccctgccggaggaacagcggtcccagttccgaaacatgatccaacgcctggaatgcagcctggatggggaccatttagagcagaacgacaccggagtgaactgaaatggaaattgcagcccgcctgcgccagcttggattcccaagcaactatgtggggtttccctaccttgcctgcgccatctcattggtgcagaccgagccggagtacctatatcaggtattcaaatgtctttatcccgccgttgccgcagcgtttcaaacctcggcagcctgtgtggagcgggacatacgcaccctgctctgcgcatactggcgctccggcggccagccattattgcaggccatctctccgcgtccgcttaccgcccgtcccacggtcagtgagctgattgccctgctgtccgggtatttccaggatgtcggagacctataattcggggcgcatcatggcatactgaagctgaggtgatttccatgttgacagaagcggaattgctccagtatatctaccagactacagaaatgggccgggacggcattcagtccgtcctgccccacgcggaggacgagacctttcaccaggcgctggagcagcagctcacggagtatgaaaagctctacggcgccaccggaaagatgctgcgggaacgtggccaggagcccaaggggctcaatcccatggtcaaggcatcctccgagatgatgagcgcgatgaaaaccatggctgaccactctacctccaagatcgcggagatgatgattcagggcaacaccatgggcatgactaagagcctcaagcacctgcacgactaccatgggaaggacgaacgggtacgggatctggccaacaagctgctgaaaaccgaggaggccaatatccagcagatgaagaagtttctctagtctcctcaagggcggcgtcgaattggcgccgcccttttttgcgcttgctgtcacaaaaaccggaacatatccgttataatgggtgaaaaccggttttctatccagcagacaaggaggaggaggctatggacgaggcggagctgagccgggcgttccccatcggggacggcgcctgtctggaggcagtcatcgcccgctatggacaggccctgctgcggtactgccatcatatcctgtgtgactaccatgaggcccaggacgcggtgcaggacgcgctgctgcgggcctggagtcgccgcaaccgcttccgggcgggcaccaatctggaggcgtggctctacaagctggcctatcacgcctgtatcgacctgctccggcagaggcggcggcaactctttgcccctcccccgccgtccgggcacaacccagattacattgggccggagctgcgggcggccctgtccgtcctcacgccggaggagcggggcctggtcttcggacgggtgatggagggccgctcctatgaggagctgtcccagatctacggcccgtccgccgccgccctgcgcaagcgatacgagcgggcgcggaagaagctggccctggcactgagcgaatcggaattggatgaacagaaggaggtcgttccatgaagcggacaccagaggaggagcgcattttccgcgccctcgctcagatcgaaacaccagaggccgacctatccgccgcactccggcgggcggaggagccgcgccgcatccggcccgtccgtcccctggcggcggcggctgtgctgtgcgccctgctgaccatcggcgcggcggcggtgggcttttccggggcgtggcggtactttgccccctccctgccccagaacgccgtgcagaccgtgggggccagccagacctccggggactacaccctcaccgtggaggaggtggtggtggacgacagcaattttatgctcctgctggccctgacccgggcggacggagagcctatcgatccagaggcatcgctgaccaccaacagcatggatctggaagtaacggtggacggccactattttggccgcgccaccgactaccagctctcccctgacggaaaaaccatctacatctgctacgaaaacactggcgcactgaccgagacatccattttgggcaagcctatcaccctcacggccgatggagtggccgtaaggctttttgacgatgacggaaatattcgtatccagtgtgacaaccctatttccctatctgcgcttacggaatgggggactccggacttctctgccgtacccctggtggatcatgtagaggagattatccaaactgcagcaaatggcggggcagctcttccgttgtttacggtggagggagttcccctcctgacacttcgcggtgcggccctgacctcggagggactggccctggtgacgcaggatgcctcctacgtctccggtgacctggcgtatacgagaagcagctgtgaagccatcatcgatacccgcaccggagcacgctatctttgccgctccggtcacggagcagcattagaggatggcacctgggcctttctggaggtattcgatgactgcccctttaccctggaagatcttccctatcttgaagtggaggtgtcctataccgtcgaccggattctctctgaccagccgttttcgctcacttttacggtggaaaattcatccgggtggaaactcccgctggatggtgccctggaattagacgggctcaccctgcatcctttggaactgcggttgtcagccctggatctgcaagtctatttccaagatgaagcggaggcggccttctccctctatcgggacggtaccgctccggtgctccatctggcaaacggcacagatatcaccaccacctggcatggaggcagacatctggactctgctctgcctatggtgtcattccaaaccattgatgccaacggcgatcggctgttcatcgaccccgcacaggtggtttccatcacctttggaaatctggagatccccgtggagcactgacctgtttccctccccaaaaacggcgcgcccggtttagggcgcgccgttttccattgcccggccccggcaaatctgctatgattgtaagagatttgtcagaattgtctcacgctctttgacagaaagggctggtaagatagcgtccataggagggatttgtgtgaacgagtgtattctggtggtggatgacgatcccgaaatcgtccgtgccatcgccatcctgctggaaaaagagggctatcaggtgctcaaggcctacaatggcatggaggcgctggagcaggcgataaaccccgccctgcggctgatcatcatcgacgtaatgatgccaaggctggacgggctttcggcggtgatgaaaatccgggaaaagcgcaacctgcccattattgtgctcagcgccaagagcgaggactcggacaaggtgctcggcctgtccatgggggcggacgactacatcgccaagcccttccatccccaggagctggtggcccgggtgcgcagccagctccggcgctatacccaactgggcgacgtgaacgcccagagccagggcggagagatcgtcaacggccgactgtgctaccgcccggaggagcgggtgctgctggtggacggggagccggtgaagctgacggccacggagctgaaaatcgtggatctgctcatgcgcaacctggggcgggtcttccccgccgaggagatctaccgacgggtatggaacgaggaggcctatgccacagagaacaccgtcatggtacacatacggcgcatccgcgaaaaaatcgagctcaatccaaaggaaccggaatatctgaaggtggtgtggggcattggatacaaaatcgagaagcgttaagcccgccctggcctttctggccttcgttctgggcgtcacgctgctggtctacagcgcagcggcggctgtgattgtgaccgttgccagcaggggttctttctacatcccctggcgcgacatattctggaccgactaccagactacggacagctttcacagctttatcaaggatcggctctatgagctggccaccgccgccgataccccggaggaggaaaatcccctggagggctgggacgacggcctgctctaccgcgtccgggcggatggagtgctgaggttctccaacaccgacgccctgtctcccgaccggctgcccgacgggtataattttctgatcacctacgacggggagaaggtgactgccgtcaaggacggccgcgacatctccagtcagttctcccccctccccttcgcggatccggcgggcgtgtccgtctctctggccgcggccgagcacccgcccgcatccggctcgtcgtctctcgcctccctggtcggttctctccgacagaaccgtgccttctttttctgcttcctgtttcttccgcccctggcgggtatcgccctcaccgccctgtccattgtgtggcaccgtcacaaggtgcgggccgaccgggccatcgcctggttcaccgggcgggtgtggctggaggtcaagctcctgctgctcgtccccttcctctgggtgtgcgccctggccggaatgtgctgtctggccgcgctgatgggggaggtgctcacctacagcattgtgcgctacctctccgtccccctggccctgtggtgggcttacctttatatcaacgacctgcggtacaatttcggacacctcaaggagcagagcctgtgcgccgcctgtgtgcgcctgctccggcggcagatcctgcgccaccccgccgcccagcgggccgaccggcggatgatctggcagtttgccgcctgcctcccctttttcctgttctgcgccctgtccgtgcccgtctttctgctgttccgtctgccccttccgctgctgctcctgctctgtatggccgggatcgtgctgatcggtctccaggtgtggctggtcagggaaagccgccgctctgccgctgagctggacgccctgctggcctgcattgaggccgccggggcgggaaggctggagggagcccctcccctgccgccggactcagatttccacggtgcagcggagcagctctcccacatggaggagggtctgcgtaccgcattggccgaacaggtgaggagcgagcggatgaaggtggagctgatcacaaacgtctcccacgatctcaaaacccccctcacctccatcatcagctataccgagctgctccagcaggaggagggcctgcccgaccatgtgcaggactacattcgtgtcctctccgacaagtccaagcggctccaggtcatggtgcgggacgtgttcgaggtgagcaaggccgctacgggcaacctgagcgtagatataaagccgattgattttgcaaagctgcttcgccagacccttgcggacatgggtgaggccatcgaggagagcggccttgccctgcggccccgtctgccggagtccccggtctggatcgccgccgacggcgaccggctgtaccgggtgttccagaacctgatcggcaacgccctcaagtactccctggagggctcccggatctacctggagctgaccgcagcagacgggcaggccgcggcggtgctccgtaacacatcacgggaggagttgcccgacggggtggatctcaccgagcggttcgtccggggggacgagagccgcaccgacgggggcagcggcctgggcctgtccatcgcccgcacctttaccgaggcctgcggcggaactttctccgtccaaacgcaggcggatctcttcaccgcctccgtctccttccccctgaccagggaacggccgcccaaggaggagagcgcggtatgagactgctatgcgcgtgctttgccgccctggcgccggccattcatgacttcctgcggattaccggccatcaataggactacagtaccgttttagaagccgaggatgcagcctccccctgtccgaaatgagtttatcaacgcagcattcggtataccatatataaaatccggcaactcccattttggggagtgccggattttatttgacgaatctttgcatttatactacaataagagtattatcaggcgatttgaaagcgaggaaaatggtatgccagacagcaactcaagccacaatcccctcggctccctccccatcaataccctgctgcccaaattcgcaatcccttccattgtcgcctatctggtcacctctctttataatatagtggatcagatcttcatcggccagggcgtgggatatttgggaaacgccgctaccaatgtggctttccccttcaccaccgtgtccaccgccattgccctgatgatgggcatcggcactgctgccaacttcaacctgaatttaggggccggaaatgaggaacgggctcgccgggtggccggcaccggactgtcctgtcttgcgctgttcagcctcaccctgggcctgatcgccttgtttttccgaggcccactcctcaacctgtttggcgctacgccggaggtattgccctacgccatgatctacacgggcattaccgccttcggcctgcctatggtcacctttaccaccggggccagttccctggtccgggccgatggaagtcccacctactccatgctctgtaccctctccggcgcggtactcaacaccatattggacccggtgtttatcttcggtctggacatgggcgtggccgggggcgcgctggccaccgtattggggcaggctctctccctggtcatggtactgtactatctgttccgcacccgcatccgtaccatccgcctgacggcggcctccctgcacccttccgggccacttctgcgtgccatctgctccctgggtgtttccccctttttaaatcagatggccatgttcctggtgcagatcaccctcaacaataccctgacctactacggtgcgctctcccactacggtgaggacattcccctggcgtgtgttggggtcatctccaaggtcaacatcctgatgctgggctttaccttgggtatctctcagggctgccagcccatcttcagctacaactacggcgcccggcagtatagccgcgtacgtgaggcctaccgaaaggccattgtcgccgcgtccatagtctgttgcattgcctttgtgtgctttcagctctttccccggccgatcgtggcactgttcgacccctctggcagcgaggagtattttcagttcgccgagcggtatttccgcatttatatgtttatgacactggccaatgccttccagcccattacggccaatttctttacctccattggcaaggccaagcggggcgcactgatcgccctcacccggcaggtgatctttctcattcctctgattttgatcttccccctcttcctggggattgatggcgtcatgtacgccggtcccatcgccgacagcgcggcagtagtggtggccctagccctagttacccgggaaatgaagcggatgccccacgtggacgaacccgtggcggcagatacgctggtgtagctggctccagcggcggcgggcaatgtgggcggcggcatcaccgccagtctcttaggcctctagggtcagccaatcggcccatcccatactcttttctcgatactggcaccatagggaggtggccctgggcggccgttccggctgccggtatctgaggctgtcaccccagcttttccggctgctacgtggaccatatgcgtcccccaaataaccaaacaggaggcgccccacggggtgcctcctgtgtttactttcacagatacagctcgggcggcttgtcctccttggtcaatgcctcctccaaatgagccgctgtagcggcaaaggcggggccttccacccgtcggctgcccgccgggcaagcccggacacaggccaggcagcggatgcacttctcaccgtcggtcgcacggggcgcggcaggatggatggcctccaccgggcaggccccggcacagcagccgcagcgggtgcaggtatcgtcccccactgggtagaacggcgccctctgaaagctgcggtagggccggttcccgggcaattccggggtgcaccaaggccccgacagcttctccgccgcccgacgtcccagctccgcggccgccgccagatcccctgcgttgggtcgccccacggctaccttggcggaaaatgtgtgaggcgctacaaaggtccccgccgccagagggcggaacccccgggcggcacacaggtcgctcagctccgccagcgcgtcgtcaatgagccggttgccatacacagccagcagcaccgccggagtctcctccccctgtaggccgtccagcagccccggcacctccggcacccggccgtaataaaccggtacgcccaggacaactacgtcatctgcgccgaacatatgaactttgcgccgctcctccggccgggtcaggtccacttctccgcccatgtgtggcatagctgccgccacagctcggacataggtgcgcgtcccgcccgtgggactgaaatagagggctgttgtacgtctatgcatgtgttccgcttcctttccacttgtttgatacacaggaacgtgccgtggggaaaaacaccccacggcacgtctgcctgtttgccgttcggctattgtactgccttctcagcagcagctgttcccgcagccgttgttgcagccacagccaccacagccgcaaccgccccagctcccgccgccgcagcagcaacagagcaggataatgatcagaatgatccacaggcagccgccgccgccaaagccacagccattattgcaccccatatgaagtacctcctggtttgatgatggaaaccagaggcggagcggtgggagtaccgccgctccggaccggtctcactccatactatgccggggacgcagaggggtgcttggtacaaattctttttattccagctcaaaggcgccggtatagagctgataatagagtccgtgctgccggatgagatcctcgtggtcgccccgctctacaatgcggccgtgatccagcaccataatggcatcagagttgcgcacagtggatagccggtgggcaatgacaaagacggtgcggccggtcatcagggagtccatgcccctctggacgatggcctcagtgcgtgtgtcaatggaggaggtagcctcatccaggatcatcaccgggggatcggccacagcggcccgggcaatggcgatgagctgccgctggccctgggacaggttggcgccgttgccggtgagcatggtgtcgtacccctggggcaggcggcggataaagtcgtctgcgttggccagcacggcggcggcctccacctcctcgtcggtggcgctcagattgccgtagcggatgttttcccgcacggtgccggtaaagaggttggtatcctggagcacaatgcccagggagcggcgcagatccggcttatgaatatcgttgatggagatgccgtcataatggatcttgccgtccgcgatgtcgtagaagcggttgatcaggttggtaatggtggtcttgcccgcgccggtggcgcccacgaaagccagcttctggccgggcttggcgaaaaggctgatgtcgtggaggatggttttgccctcctcataggcgaagtccacatcatcaaagcgcacgtcgcccgccagcttggtataggcgaagctcccgtcctcctggggaaccttccaggcccacagattggtgcgctcactggtttcctggagggcgccgtccttgttataggagacgttgaccagggtgacggtgccgtgatcctcctcggagggctcatccatcaggtcaaaaatccgttgagcaccggccagagccatgaccacagagttgagctgctgagagatctggctgattgggttggtcaaactcttggagagctggaggaaggatgcgatgacacccagggtaataccgccccccaggccattgagggccagtgctccgcccaccatagcgatgaccacatattggatgttgccaatgttgatgaggatgggcatgaggatattggcgtacttgttggccttataagcgctttcaaacaaggcgtcattcacacggtcaaagccctcctgggcctcctcctcgtggcagaaaaccttgaccaccttctggccgttgatcatttcttcgatatagccgttcagatcgcccagcttcacctgctggcggacgaagtagcggccgctgcgtccggccaggaaccgggtcaccagcagcatgcacacgatgcacacgattaccacgccagtgagagtgaggttgagtacaaccatgctgacaaaggtgaccacgatcatcatcagggaattgattacctggggaatgctctgggagagcatttgccgcagggtatccacgtcgttggtgtagacgctcatcacatcgccgtgggcgtgggtgtcaaaataccggatgggcagggtctgcatgtgtccgaacagatcgtcgcggatcttcttctgcacgccctgggagatggtgaccatcaggcggttgtaggccagggcgcacagggcgcccaccacatagaggcaggccatcaggagcagagcgtggagcaggccggtgaacaccgggtgttccatggccagcagaggcgtgatatagttgtcgatcagggcgcccaggaagatggagccggccacagaggccaccgcgctgaccaggatgcataccagcaccagaaaaaagcggatcaggtagccccggcccacataactgagcaggcgccggaccgtgtgggactttttcttcggcatcttattcatcctcgctccctcccttcgtctgggattcataaatttcccggtagatctcacagctctggagcagctcgccgtgggtgcccatggcggaaatccttccgccgtccatcaccaggattttgtccgcgtcctcgatggaagagatacgctgggcaatgataaacttggtggtgtcggggatctcctcccggaacgccttgcggatcagtgcgtcggttttggtgtccacggcggaggtggaatcatccaaaatcagaatcttcggcttcttcagcagggcccgggcgatacacaggcgctgcttttggccgccggacacattggagccgccctgctcaatataggtgtcgtacttgtcggggaattcctggataaaggggtcggcctgggccaacttacatacccggaccatctcctcatcggtggcgtccttcttaccccagcgcaggttctccttaatggtgccggagaacagcacgttcttctggagcaccatggccacctgctcccgcagggcgtccatgtcgtagtcccgcacatccacaccgcccaccaggatgcggccctcggtagcgtcgtacagccggggaataagctgcaccagagtggtcttggaggtgccggtgccgccgagaatgcccaccgtctcaccggacttgatgttcaggttgacgtttttcaggcactccttactggggtccttggcgtagctgaagctgacgttctcaaagactacagagccgtccttgacctcctccaccggattctccccgttgcgcaggtcgctctcctcgttgagcagctcggtaatacgctcggcggaggcgcgggccaggatgatcatgaccagcaccatggagagcatcatcaggctcatgaggatcatcatgatatagctgaacatactggtgagctgccccacatccatgctgccgcccactaccagatgggcgctcagccaggacacggtcagaatacacgcatagacgcacaactgcatgagcggcatgttgaaggcgatgagcttttccgccttggaaaagtccatatagatctcctgggagactttcccgaatttttccttctcgtgctcctcacgcacaaaggacttcaccacccggatgccaagcaggttttcctgtaccacattgttcaagtgatcataccgcttgaacacccgctcaaagatggggtgggctccggtcataataaagaacaggcccaggcccaggatggggatcaccaccaggaagaccagcgccagtctggggttgatggtaaaggtgagcacccatgcacagataagcatgatgggacagcgcacagcgatgcggatgatcatcataaaggccatctgtacgttggtcacatcggtggtcaggcgggtaatgataccgccggtggagaatttgtcgatgttggaaaaggaaaatttctgaacattccgatacatctcccggcgcagattacgggagaagccggtggccgcccgggcggcataacggccggacagggcgcccagcagcagagccgccagggccatgaggaccacaatgccgccgtagtagaaaatacgttccatatttcccgcctcaacgccctgggtcagcagacggcctgtcatcatgggaatcaggacatcaaaggccacctcgccgatgacaaagatcggcgtcagaatcgtgtcctttttgaactcctgaatacagctcacaagtccgcgttttttcttcatgcacattcctccttggggattgattcgcttgctaactgttagcctcctaacagtctttgccgcaggtgcacccggccggaagtacagacggctccattaggttctgcttcatttttgcgatggtcatcatgaactgctgcaactcctcagcgccgattcccttggtcagcgccgcctctacctgtgtgatgcgcgaggcaatctgctggttcagggcctccgctttcggcgttgccatcacctgcttgagcctggcgtcacgggatacggagcaccgcatcacaaatccctcctcctccaggcgcttcagcagcctagacgcggtagagcggcggatataaaacgcctcctccagatccttctgaaagatttcctgatcccgattatggcacagaaatcccagaagcatcccctgcatctcggtaaaagcatcgcactccggctggccggagagctcccagaccttgcgccggatcagattggacagcgccttgacctcgtaacccgcatggcgttcttgcctcattcagacaccccccttccatgcaagctattttacagagtttattttagttatcttgctaacagttgtcaatgggcaacatttacaaaaagaccctccggtaaaccggagggtctttccattcagctcagcctgtccacggtgacgccgttcatcaccgcctgaaatacggctttgtccatgccgctgctggcagccgtcctgtccagcaggatgccgctgccgtccttcagaggggccgacagtgcgaaataggacagataggccacctgggcccgcaggaaggggctacctgtcagcttggcctgctccgcagcgttgagcacaccaaactccacgctcttgcccacggcattggcccaggagaagtcaggcgacgccccgctgtccgagtagcccagcgcccgcagaagaaaggtcatgtactcccctgccgagagctgtgcatccggtccaaagtagcgctgtccaccggcactgacgttgttgcccttggtatagcccttctcataggcataggccacatagcggtcgcaccaggcaggggtgtccgcaaaggggttggccgctgtgctgctcagcgcagccccctcctccccgatcaaacgcaggaacatgaccagtcccacgatacgggtgggagcctgctccagatcatacccggagccgtaggccgttccagtgccctggaacagccccatctgctttaatgcgtcggccagagcattatagtccagccccgctccggaggacacggtatagaagccctctacgcccaaaaccgcagtatcagaggtgattgtcactgccgctgtggtattttcggccgctaagacgcggtgacgtgcggtcagcgcggtgccggaggccacggtctgccccaccgtaatatccaccacactgccgccggaataggacacggttccgcttccagccaggagcagcaacccggaaccggcaggcaggctgaccacgtctccccttttaaagcggaaatccgtgattgaggcggcatagctctgttctccacctgcccgggccagataaccgctgtgcctggcattcagatccgccagcacagagtcgtagacggtctttgtctgctccgcgatgcgtgtctccgcctgccgcagtacgtccggaatataagtgtcgttcaggtagccctgcgttacaaggctctcccctgttcccgtatcggcggcatatactgccgcacagcctatcaggatgaccagggcaagcaggccaacggcaagtctcttcatggtacctccgaaatcatatagctcagcgccaacaggctgtcggcaaagtggacgttctcaatcactatgtccggcgcgtccaccgtcagctcaatattggtgaaattccagattcctttcacgccggaggccaccagccgaccggcgatccggttggccacgctccggggaaccgtcagcaccccgatgctggccggatgctggcccagatactcctccaactggtccacgtggtggaccggcaccccggagagtctctgcccaaccacatccggcgccacatcaaaggcggccgaaagcgccacaccggagcgctcgaagtgaaagttttccatcagggcccggcccaagttgcccgcccccagaatgaccgcgttgtggccgcggttcatacccagaatgtcggaaatctccccccgcagattttcaatattatagccgtagccctgctggccgaacccgccgaagcaggagagatcctgccggatctgtgaggcggtcagccccatggatttgcccagcgcgttggatgaaatgcgctccacaccggccaaatagaggtcgttcaggtggcggtagtaccgtgggaggcgacgtatcaccgcactggacactttatcttttttcatagctccatcactcttcttcttgttccaaagcggtaccgcacgtaactcgcccgttccgctgcaagattcctattcagtttactcgaaagaggggccgatgtcaacgttcttttccctggaaccgccttccggtccggtgcatagagtgaggaaaaggaggaatgccaattggcctcgattggaaccattgtcacccgcgtatatacctcccgggcccagctcccggtgccgggcgctactgtagcggtgacgcagagggcgggcggcgggcggcatacgctgctggccttacgggtgacggacgaaaacggacgcaccgcgccgatccgcgtcgccacacccgagccgtctgccagtgaatccccagggacagagtcccccttcgccgtctgtgacatctgggtggaggtaccgggctatgagatgcttctggtggagaatgtccaggtctttcctaatacggaaacactacaggagctggagctgattcccctgccggagcagacctcgtcgtctacccggggggagatcgtggatattccaccccaggatctgtaaggaggtacccccatgccgaccacacctgtaacgccctatgtcccacagtacatcaccgtgcatctgggcgcccccagcgccgctgcggaaaatgtgacggtttccttcccggaatacgttaagaatgtggcctccagcgagatctatcccacctgggagccggcggctatccgtgcaaacatcctggcgattatttcgtttgccctcaaccgggtatataccgaatattaccccagccgcggctaccccttcaacatcaccgccagcacggcctacgaccagaaattcatcaaagggcgcaacatttttgagaacatcagccagatggtggatgagatcttcaattcctacatacggcgcaccggctttgtggagcccctggcagccaaattttgcaacggcaccaccaccacctgcgacggtctctcccagtggggcagccaggccatggcagagcagggcgccgactccgtcaccatcctgcgaaactattatggcgacaatatcgagatcgtgaacaatgctcctgtcatgggtatccgcagctcctaccccggaactccggtgcggctgggcgaccggggggagccggtggtgcgcatccagaccatgctcaaccgcatctcccgcgattaccccgctattccgaaggttcagccggtggacgggatcttcggagcgtccaccgagcagtcggtcatcaaattccagcagattttcagcctgacgccggacggagtcgttggaaacgccacctggtataagctggtctttctgtacgtgggcgttctggaattggcggagctggtcagcgagggtcagaccttctacaccaccttggtgcccgtcaaccgccccgataccatttccctcggcgacaccggagaaaatgtcaaggtaatacagtaccttctctctgtggtggcggagttttataataacatccccccggtggctgtggacgggattttcgggcaatccacccaaaacgcagtcctggctcttcaacagatggctggtctgtaccaagacggcgttgtaggcgaggacacctgggccgcactctaccgattttatgtcggcatagtggataccatgagccaatataccaatgtcatcccagagcagttccggccggagcttcccgagagcgaagccaccagcctgacccagtaccccggccaacccatgacactgggcagcaccgacgagagaggagaagacgccacatgattcgctcccaactctacctgattggacagcccgtacgcagcctccaaaccatgctgcgcaccatttctttcgcttaccccttcctcccccgtctcacgccggacggaattttcggcgaacgcaccctagaggccgtcatgctctttcagagggaatttttccctccggtcaccggacaggtaaaccaggccacctgggacgctatcgtttccttgtatcaccaggtggtttcccgcctcactccgctgcccacccgcagctttccaagtccagagttttccgtcgcaccgggtgaggccagcgttcatcttaacctggtgcagtccatgttctgcgggctgtctcgggtcctgaacggcgtggaaacctgtgatgtctccggggtaaacaatgccgccaccgagcacaacatcaagtggattcaacatctgaatcaccgtccggaaaccgggacgctggatcaggagagctggaataccctcagccgcctctatactatgtttgtcaccagcgcccagtcgccctggactacgcggcctgagctttttatgccctgacgcggcatatatgtgtaaggtgggtgccctgtccatagcagggcacccaccttgtctacagtttcaactacaggttacagtaccagactgggagctgcataggtgcggcccgccagctcactgttgagcatgtagaggcctttggcatcgtcgccgtagagctccatctttttgatcatatcctcggcggtcttctcctcctcgccctgctctttgacaaaccaatccaggaactgcatggtgcggaagtccttgacctcataggctgcatcgtagatcgtgtgaatcagattggtgacatactgctcatgggccaggccggccttgagcacctccagcctgccgttgggggcggcggtgggcctggcaatgccctccagcaccgggcggtggctgttgttctggagatactggaacataagcatggcgtgatcccgttcctcctgcgcctgcaccttgtaccagttggcgaagccgtccagtccctcgtcctcgaagtaggcggagaactccagatacaggtaagcggagtagaactccttattgatctgctcgttcagcagagaggcaactttttcgttcagcataataaatacactcctttctcatctggatggcataagaataccacggattttattctgttacaactgtaaattccactcagaaattcctctgcgccctaacaatggccgtaggcaacagaggacaggataccggttaaaacagtccgtcgaacagggtaatctgactcgtatccggcatggcccaggggcggccgcgccgtccctggggtcccgtttccctccatctggcgggacgaaatcaattcgccccgccatcgaggttttgcctgcggcaaaacgctcggacgctacaggcagcggacggcatgccggttaaaacagtccgtcgaacagggtaatctgactcgtatccggcatgccgtccagagcaccagcggccttgagctgctcgatgtgggtcttggagaccttgggacaggctgcggaaaactcctcgatggatataaaccgctttccctcccgctgctccatgatagaccaggccgccgtctcgcccagaccaggcacagaggtgaaggggggcagcaggcttcccttctcattgtctggcaggaagttgaccgcgtgagagcggtagagatccatgtgctcaaaggtgaacccccgcagatagaactcatagaccacctcaagggtgaccaaaatatcctcctccacgggagagggcttctccttgctctcaatctcccgcattttagccttacacacatccatcccctggcacatgaaggtggcgtcgaaggccttggcccggatggagaagaaggcggcgtagaaggccagggggcggtggaccttgaaccaggcgatgcggaaggccatcatgacataggccaccgcgtgggccttggggaacaggtacttgatcttcttgcaggagccgatgtaccagtcgggtacgccggcggccctcatctcctcctccgccccatccggcaggccccggcccttacgcaccgactccatgatcttgaaggcccgcttctccggcatgccgcaggagatgaggaagagcatgatgtcgtcgcggcagccgatggcctggccgaccgggacgccctgatccacaatcagatcccgggcgttgcccagccacacgtcggttccgtgggagaagccggacaggcgcaggaggatgtcaaactcgtggggctgggtgtccaccagcatgccgcgggtgaacttggtgttgaactccgggatggccacggcgccggttgggcccaggatggggtcgtccacgaagcccagcacctcagaggaggtgaagatgctcatggtgtcccggtcgtccagagggatcttttgcggatccaccccggtgagatcctggagcatgcggatcatggtgggatcatcgtggcccagcatgtccagcttgagcaggttggactccatggagtgatattcgaagtgagtggtaatgatgtcgctgttgggatcgtcggcggggtgctgcaccggacagaagtcgtagatctcccggttctgggggatgaccaccatgccgccggggtgctggccggtggtgcgcttgacgccggtgcagccctgggccagccggttctcctccgcccggtttaccgtccttccccgctcatccatgtacttcttgacatagccgaaggcggtcttttccgccacggtgccgatggtgcccgcccggaacacgtgggtctgcccgaacagctcaaaggtgtaccggtgggcgttggcctgatattcgccggagaagttcagatcgatgtcgggcaccttgtcgccgccgaagcccaggaaggtctcgaaggggatgttgaagccgtccttggcgtagggcgttccgcagacggggcacaccgcgtcgggcatgtccgcgccgcagccgatccccttctctttggcggtgtcgaagtccgagtgcttgcacttgggacagcggtagtggggcggcagggagttcacctccgtgatacccgacatgaaggctaccagggacgagcccacggagccacgggagcccactaggtagccgtgggccagggagtcctgcaccagcttctgggccgacatataaatgacgtcgtacttgcacttgatgatgtcgcccagctcggcattgatgcggtccaccacgattttgggcggttcctcaccgtaaagggcttttgctttcccccagaccagactggtcagctcctccgctgagttctcgatcttgggggcgaacagcccctggggcagaggcactacgtcctcacaccagtcggctaccagattggtgttgcgcaccaccacctcataggccttctccttccccaaataggcaaactcctccagcatctcggtggtggtcttgaagtagatgggcagagacgagtcggcatcttcaaagcccttggaggccagcaggacgtggcggtagatctcgtcctccgggtccaggaaatggacgtcgccggtggcgcacacaggcttgtccagcgcctcgcccagggatacgatggtgcggttgaagtccttcagctcctcctggctctgcaccatacccttgcgcagcatgaaggcattgttgcacagaggctgaatctccaggaaatcgtaccaggaggcaatgcgcttaagctccgcaaagtctttccgctttacaactgcttgaaacagctctccagcctcgcaggccgagccgataatgagtccctcccggtgctggttgatcaggctcttgggcatgatggggtagcgtttgaagtggtccaggtgagaggccgagatgagcttgtagagattgcgtaggcccagttggttcttggccagcacgattaggtgcttgggctggcggcgggccttgcccccggtacgcagcctggccatagccggattgatctgctggagggtatgtacacccctgtcccgcagcatctcgaagaaaggtaccagcatatagcccaccgtagccgcgtcgtcataggcccggtggtggttgaaggcaggcaggttcaggtgctccgccacgatgtccagcttgtgcttgcccagctccggcagcaggttctgggccagaatcagcgtgtcgatggaggtgctgtcgaaggggcggcccatgcggcggcacccctcggcgatgaagcccatgtcgaactccgcattgtgggcggccagcgggcgctcccccacaaagtccagaaaggcatttatggcctccgcctgggagggggctcccctcagcatctcgtcggtgatgccggtaagctcggtgatctcgcgggtcagaggccgttcaggatcagcaaatgtggagaactgctccaccacctccccgttccgcagtaccaccgctccgatctcggtgattacatcccgccgcttgtccaggccggtagtctcaatgtcgaaacagacgatatcgcctgtaaagtcttgttccttgtccccgtgtaccaccacccggtcgtctacgtcgttgatgaaatacgcctccacgccgtaaagcaccttgatcttcttggccgagtgccaggcatcggggaatgcctgggccacgccgtggtcggtgatggcgatggcccgatggccccacgcttccgcccgcttgaccacgttcttgtccggccccgccttggggctcacttgggtgagggcatccatggaggacatggtggtgtgcaagtggagctccacccgcttctccggcgcgtcgtcggtcttcatgggcttggcgctctccatgatggcgtagggctccagcaccatgtcgccagtgaagcggtcgatgttcagcttgccctggatcaccagatgctggcccttcttcaccccgtccacaatgcccttcccctcgtcaccggggaaaaacttggacacccgcaccgagccggtatagtccgtcacatcgaagcacaccacccatgcgccccgctttttcagctcccggtgatccacggcaaacacgtctcccttgacgatgacggttcccatgtccagctccagggtgctcatggggatgctctcccgcttgatttcgtgcttgccgtagagtagctttcctctcgggccgccggaggccgcctttttctcccgcgggctggcagttttgagaccagccagagctctccggcggatctcctccgtgcggcggaaggccgccatggcatcctcctccaccggggcggccgggggcggaggaggaggggcgctggccgcaggagccggttcagccgccacaggagccgatgtgggagcagtcgcggccgccgctcccatctccagctccacccgctccacccggtaggccaaggccaggctcttctcgatctggtgccgcaggccctcctcgggcattcgggggcactccaccttggcgcggatagagcgggccgccttatcgatcaccgcccccgtgaccagatagccgcctgccagggccgccagctcttcaccgggccgccaggcggaaaacaaattcaaaaagggaatcttctgtgcctgtgacatggttgaaacgctcctgcctcctccgtcaaagttcctcaattagtgcgaaaagctcgtccaccagggcctcctggggaacctttttcacgatctctcccttgcggaagagcaggccctccccgttgccgccggcgatgcccacgtcggcggcggaggcctctccggggccgttgaccacacagcccatgaccgccacggtgatgggcttgtccacggccttaagccgctcctccacctgggtggccaggccgatgaggtcgatacgggtgcgcccgcaggtagggcaggacaccagctccggtccctccttccgcaccccggcggccttgaggatgtcccgggcggcgtatacctcctccaccggatcagtggagagagacacccgcatggtgtccccgatacccatggccagcaagccgccgatgcccaccgcggatttgagggtgcccatgcgcagggtgccggtctccgtcaccccaagatgtaaaggataatcactttcccgattcatcaggcggtaggccgccatggtggtgcgcacgctggaggacttgagggacacgcatatgtcggtaaagtcaaatttctccagcaggcggatatgtccaaaggccgactccaccagggcctccggcgtcaccccgccgtatttggccaggatgggcttctccagggaaccgccgttgactccaatacggatgggaatccccttttgtcggcaggcgtcggccaccgccttcacccggtcctccccgccgatgttgcccggattgatgcgcactttgtcgcacccggcagccacgcactccagggccagccggtaatcgaaatggatatctgccaccagagggatggggctccgctcccgaatggcccccaccgcccgggcggcggccagatcgggcaccgccacccgcacaatctcgcaccccgccgccgccagacgtttgatctgctccgctgtggcggacacatcgtcggtgcgggtgttggtcatggactgaatggtgaccggagccccccccccgatggggacgccgcccacgcgaatctgtctggtcataggacaagcctccctacaggatcaatttgtttacgtcgctgacggccaccaccaccatcagggcaatgagacagaagaagcccgccatattgatatagcccaggtacttctggtcgatacgcctgtgggtgaagaagtggtaaatgccgcccacgagtaggaaaagaatctgcccgccgtccagagcggggatgggcagcaggttcatcaccgccagattgatggcgatcagcgccacaaagctgaaaatattgagcagagccccggccattccggcggcagccgccccctgctggcccacctcgccggccatggcgaagatgccgatggggccggccatgtcgttgaggctcaccgcgccgcggatcagatcccccagactgagccataccgttcgcacgtagtcgatggactggtaccaggcgttgcgcagggtgcccaggggcccggcctcccggagctcccccaccatgactccccgcttcaggctctgctggccgctctcgtcggtgagggtacggtagggcaggtgcagagtgcccagatcgagccgccggccgtcccggagcacctcgacggccacatcctcccccgcccggcccaggaaaagaatcgcatcgctctggaaatagatgcggtgcccgtcgatgcggtagaattcgtcgccgggcagcaggccggtctcccgaatgtcctccgcccccggcagataaccgctgaccaccggcgcggacggactccccgccacggaaaagagcaccagcaggatcaccagccccgtcacaaaattcaaaaatgctccggccaccagaatgatgaattttttccacgccggcttaccgctgaaggaccggggatcgtccgaggcctcctcctcaccctccatggagcagaaccctccgatgggcagggcccggagagagtaggtcgtctccccccttgtcctggagagcagcttagggcccataccgatggcgaactcctccacccgcacccccagggtcttggccgcgatgaagtgtccgaactcatggatggcgatgagcgcgccgaagagcaggatggtaatcaggatgaacaggatggtcatagcatcgctccttactcagtgcgtatcgggccggtgtccccgcacggcctcccgcgccgcctgatccgcgtccagaatgtcccccagggagggagactgcaccgcgggaaccgcggccatggcgtaggccacctgctccgcaatgccggagaaagagagctgtccggccaggaactgccccacggcctcctcgttggccccgttaagcaccgccgtggcgctgccgccggtgcgggcggcctccagggccagggccagacaggggaacgccacatagtccggcgcatggaaggttaggggcgggcaggacagcaggtccagcggctctgccaccgccgcaacccggccgggccaagtcagggcgtattgaatgggcaggcgcatatcgggcacgccaagctgcgccagcaccgcatgatcacagtattccaccagggaatggactatactctcccggtgaatcacaatggagattttttccgggggcatgtggtaaaggcgcatggcctcaataaattccagtcccttgttcatcatggtagccgagtccacggagatcttggcccccatgctccagttgggatgggccagagcctgctccaccgtcactctggcaaggtcctcccctttccatccccagaaggggccgccggaggcggtcagaatcaggcggcgcacctctcccctgtcctggcaaccctggagacactggaagatggcggagtgttccgagtccaccggaaccacttgggagccgctccatgcagccgcatcgctcaccagctccccggcgcacaccagggtctccttgttggccaaggcgatgcgcttaccagcccggatggcggccaaagtgggacggagtcccacgatccccaccacggcggtgagcactgtgtccgccgtctccaggctggccgcctccagcagtccctccatcccctccgccacgcggatgggcgtgtcagccaggcgcaggcgcagggacgcggcggcctccgggtccatcatcaccgccagctccggctggaagcggcggcactgcttctccatctgctccacgtcccggttggccgttaaggcggccacacgcatgccacaggcggcaatcacttccagtgactgccgcccgatggagccagtggagcccagcagagaaatacagcggttttgttccatgctatgctcctcccacggcgggcaggaaccggagcaacaattcgatcaggggcgcgcagaagatcacgctgtcaaaccggtccagcacgccgccgtgtccgggaaaaatgttgccgaaatccttgattccgtactgccgcttgatataggaaaatgacaggtcgcccatctgggagatggcgctgcccagggctccgtagagggccaggtacaggtagttcacagtatagccgaaggcgaagcggagtagcacgccgtacagtaccgtgcacaccaccgtccccacaaagccgcccacggccccctccaccgtctttttaggagagagctccggcgccagcttgtgcctgccgaaagccatgcccgcaaacagtgcgaaggcatcgctgataaaggccgccaccaggggcaggatgagcaaaggctcccagtgctccatctggcgaatgcgcaggaaggaggacaggaagaaggggatcaccacagtcaggaaaaaggcgcctcccagcttctccagagacaggcgcttgtggcttgcgatggcctctgcaaagagaagcaccacatacacgaacaggccgcacagcgcgggcagaggccgcccgtcatagtagacccagaagggaatcagcccggccagtatgatggagtagccggagatgcgggtatgcttcaaaaagccggtggaccagagcacctcatgcaccgcgatcatggacagcccggcaatgaggaggcacagagcccagggatacgcgggagaaatcaggtaaaacagcaccagcaggagcgggatgaaaataaccgccaccatgattcgcttacccactcagacacctccaaaacggcgggagcggccctggtaggccgccaacgccctatgcagctcctctttggaaaaatcgggccacagtacgtcagtaaaatagaattccgcataggcggactgccacagcaggaagttggaaatgcgcacttccccgctggggcggatcaccagatccgggtcgggtacaccattggagcagaggtattcggaaaacagcacctcggtcagctcctccggtttccgtcctcccgccgcgcagtctgcggcgaaatgtcgggcggcccgaacgatctcgtcccgtcccccatagttgaagcagacgttgacctgcatcccctcataccgctcggaaatctcgctggttttccggcacatatccttgagctcctggggcagcggctccagatcaccaaaaaagtggagcttaattttgtccttctccatcttttcgatggactccagcagatactttttcagcagacccacgatggcggaaacctcctccagcgggcgcttccagttctccgtggaaaaggcgtacactgtaaggtactccagtccgatcttctgacaataggtggcgatgctgcggaaagtctctgcccccgcggcgtgccccgccgtacgaggcaggccacggcgcttggcccagcggccgtttccgtccatgatgattgccacgtggcggggcaggcggtcaaaatccacctgtgcctccccgctctctttcgtttttaagaatgacatagtttatcctacccggtcccataaaattccggtgcgggacatccaggtgtcccgcaccgtgaggtctatctgctttacaggcttagaccgccatcagctctgcctcttttttggcagtgagctcgtcgatttgcttgcagcgcttttcggtcatgtcctggagctccttctcatagtccttccggtcgtcctcggtaatctccgacttcttttccatggacttaaacttttccatggcatcccggcggatgttgcggatggccaccttaccgttttcgccgtacttcttgacctgcttcgtcagctccttgcggcgttcctccgtgagctgcggaaaggcaaggcgaattactttaccgtcattctgtggattgatgccgagatcggaggtctggatggccttttcaatggccttgagcagggtgctatcccaaggctggatcatcaggctcctggggtctggggaggagatagccgctacctggttcagaggcgtgggagcaccgtagtagtccacggtgatcttgtccagcacagcggcgttggcgcggccggcccggacgctggcgaaatcgctcatgaccacgtcaatggtcttctgcatctttgcatcgaattccttgttgacttccttcatatcacggttcctccttgacaatggttccaattttctctcccataacgacccgcaggatgttctccgggtccttcaacgcaaacagaaccaccgggatcttgttgtccatggacagggacgtggcggtggagtccatcacctgcaggtgctgggccagcacatcgtcataagtgatggtgtcatacttgaccgcagaggggtccttcttcgggtcggcgctgtagacgccgtcaatgttcttagccagcagaatggcatccgcgtcgatctccgcggcccgcagcaccgcggccgtgtcagtggagaaaaacgggttgccggtgccgcagccaaagatcacgacccggcccttctccatgtgccggatggctttggagcggatgtacggctcggccatggcgcgcatctcgatggcggtctgcacccgcacgtccacgcccttctgctccagcacgtcggccacggccagggcgttgatggtagtggccagcatacccatgtggtcggcgcgggtgcgctccatccggtcgccgccgtccttgacgccgcgccagaagttgccgccgcccaccacgatgccgatctgcacgccacaggctacgcacttcttgattacgtcgcacacactgccgatcacgtcgaagtccaggccacggctggcctctccggccagcgcctcgccgctcaatttcaaaaggacccgcttatactgcggttcactcatacgttcaacccctttatacggtattcagtcccttttattttaatatagttttccacgtttgcctaggggttaggccaaagtttttacaaattattcgtaaccggagttttgccgctcacccgttgaaggggcatcctccggccaagcctccagcttcgcccggaaagagatccgccggggcgtctccatatcgtcgaactggaccaggtgggctccccggttcaggtccacgtccagcacccggcccagcccgaacacgaaatgccgcaccctctggcccaccggaaggagcaccgcgccgtcgtccgggggcagggcgcggttgctgctctcggcgtaccccctggccgccttcagcaggccctcctggggctccggtacggggatgaatgtcccccacatgtccagcaggaaccgggaagggtagcggggtgagccgtcgaaattcgtcccgtccgcctcggacaggtacagccccttctctgcccgtgtaaccgccacaaaggccagcctccgctcctcctccattccctgacgggtgcgcaccttccgtgaggggaagatcccttcgttcatgccgcacaggaacacataggggaactccagccccttggccgcatggacggtcatcagcttcacacggtcccccacctccccggtgtcgctattggtaaagagggccacatgggccaggtagtgctccagggtacattcctcgccgcaggtggtctcatactcatagaccgcctgcttcagctcggccagattgtccagccggtcctggcttccctcggtgcggagcatcatctcgtagccgctctcgttgagtacggcggacagcacctctgaaactggccgcccctcgcattcggtggaaagcccctcgatcaacgacacaaaagaccgggcccgcgtccccttaaacaggggctcgtccaggcactcctgcagggcgcggtatagagggcagccctgctgcgccgcgtattcctccagaaaagccatccgccgcttgcccaagttgcgcttgggcgcgttgacgatgcgccgaaaggacagatcgtcccggtaggcgagcattcgcagataggaaagggcatccttgatctccatccggctgaaaaagggcacgccgctgtagatcgtatagggaatcttctcacggagcagaacgccctccaccgcccgggtgacatagtgggcccgatagagcaccgccatgtcccggtagggcacccccttctcccgcagcttggacatctcacccgccatccatccggcctccgtcaccgggttctccccgaaatggcacaggacgggcccgccggatggaagggtggggcgcagctcctttgggatacgggcggcgttttgtgcgattagggcgttggccgccgacaggatctccggtgtggagcggtagttttccgtcatcagaatggtctttgtgcccggaaactgcttgtcaaaatccagcaggtactttacgttggcccccctccaggtgtagatggtctgatccggatcacccacgatgaacagattcctgtgatagccgcagagcacctccatcagtccatactggagcccgtcaatgtcctggaactcgtcgatcatgatgtactccagccgcttctgccacttgagccggatagcctcattttcctggaagatatggagggtgaatttgatcaggtcgttgtagtccagcccaaagcactttctctcttggtagaggtagccgtaaaagatcatatccccggcctgtaccgcgtccagatacctctgcttcagagcgtccagcgacagactaagcatgtcccggtaatactcaggttccttgaacagcttgcggatttcgatcatatcccgcgccgcccggaaggtcatatcccggaggctgaggccccgctcctcatagatcatctgcagcatggcgtcaatgtctgcgttgtccagtaccagaaagctctttggataccccaccacgtggctgtcctcctggagcacggagacgcagaagccgtgaaaggtgttaatgtagcccgtgtcgtcgtccccggtcagccgatggatgcgctgacgcatctccgcggccgacttgttggtgaaggtcacgcacaggatattccccggcaggatacccagctcattgaccaggaacgcaaaccgatgggacagggcgcgggtcttgccggagcccgccccggcgatcacccgaacaaagccttcggtcgccgtgaccgcctcccgctgcgcctcattcagcccctccagcaaatcctccatgataccgcctcctgatagaacatctgttttctttattatagcaggcggggagacaccactcaagaggaaaagcggcggcccggactgcctcgccgaaccgccgcattctctcacttgagcttctttccgtcctggaaggcgttgcccaccttctcccccagcaccaggtaggcgctgttcgccatgtcgaaggtgatggggcgcagcctggccggatcaatagtgccgtccgcgttcaagatgcgctcgtctgcactgacgttgacgatctcgcccaccaacagctcactctcctcgtcaaagctaacaaaccggcactccagggccaggggcagctcgtcgaccagcggggcgtccacatgggcactcttggtcacatggaaccccgccctggccaccttgtccggcacctgattggccgacacaatgcccaggtagtcgcactccgtcacgtggtccgcatccgccatgctcaccgtgaaggccttccgggccaggatgtttttcaccgtcttgtggctggcgctcagatacatggccacccgcttcatgtcggcaattccgccccaagcggcgttcattacgtccggggtgccgtcttcgccgtaggtggcgatcatcaagacaggctgagggtacaggaagggtttggctccaaaatctttcctcatgattgttgtcctccgttttcattttataatgtagtacttagtatagcacgtcccccgcgtcaagcacaatccccctgcaccaaacagaacccgctgtcacggaaaagcgccggacactgagcgtccggcgctcgaagccaatctgcggtttacttgcccagctgcttggcgatctccccggcgaagttccgccccacccggc

SEQ ID NO: 4218 - DNA, 17306 bp, Unknown
  gut microbiota DNA sequence
catcggcccgcctccgggcggggacaagccccgcgcctacgatccccctatacacccctctcccgtaggggcagcccttgtggccgcccgtgtctcccgtaaaggccgatgcccacattgacccgcctccgggcggggacaagccccgcccctacgatccctctatacacccctttcccgtaggggcggcccttgtggccgcccgtgtctcccgtaaaggccgatgcccacatcggcccgcctccgcgtctcttttggcgttccgatctgcctatatggctctcttttctatcctgattgtattttatcctttctatattacgatttggagttgatttttgatgcagacaacccatacccattaccgcacccacacctgcggggatctccgtatggagcacgtgggccagaccgtcaccctagcgggctttctggagaacgtccgcgaggtgggccagaactttgccttcgccgtcctgcgggacttctacggggtgacccaggtggtcgtggagaacgaggccatgtggaaggccttcaaggggctgaacaaggagtccaccgtccagatcaccggtgtggtgcgggagcgggactccaagaaccccaagctgcccaccggcgacatcgaggtggtgccggaggcggtggaggtgctgggccgctgccgccacaacgagctgcccttccagatcaaccgcagccgggaggccgacgagtccgcccgcctgaagtaccgctatctggatctccgcaacccggaggtgaagaacaacatcatcctccgctgccaggtggtggccgccctgcggaaggccatgcttgaccacggcttcctggagatcaccacccccatcctcaccgcctcctccccggagggcgcccgggactatctggtgcccagccgcaagcaccccggcaagttctacgccctgccccaggccccccagcagttcaagcagctgctgatggcctccggcttcgacaagtacttccagatcgccccctgcttccgggacgaggacgcccggggcgaccgctcccccggcgagttctaccagctggacatggagatggcctttgccgatcaggaggacgtgttcgccgtgttggaggacgtgctgccccccatttttgcccagtacggcacctacaacgtggcctccaccgcccccttccgccgcatctcctaccgggatgcgatggacaagtacggctccgacaagccggatctgcgcattgatctgaccgtcaccgacgccaccgaggccctgggcgcctgcggcttcggcccctttgaggggaacaccgtcaaggcggtggtggtcaccggcttcgagggcacccgcaagcagatcgacaagctgtgcgccgacgtggaggtccagtccggcgaaaaggcctactggttccgctacgacaagaacggcgagattgtgggcggcatcgccaagtttgtccagcccgtgaaggacgcggtggtggccgctctggggctggagaagggctgcttcgtgggcctcaccgccggcaagctcctggccgcccagaaggccgccggcgtactccgctccaagctgggcgccttctgccccaaccacatggacaaggagcgctatgagttctgctggatcgtggacttccccatgtacgagatcggcgaggagtccgggcttttggagttctgccacaaccccttctccatgcccaacggcgggctggagattctgaaaaaggccgccgccggcgaggtggaccccctgtccatcaccgccttccagtacgatctggtgtgcaacggcgtggagctctcctccggcgccgtgcggaaccacgatccggagatcatgatcgaggccttccagctcgtccgcctgggcgaggacgacgtgaaggccaagttccccgccatgtacaacgccttcacctacggcgcgcccccccacgcgggcatcgcccccggcgtggaccgcatggtcatgctgctggccggcgaggactccatccgggagatcatccccttccccatgaacaagaacgcccaggatctcatgatgggcgccccttccttcgtcacccaagcccagctggacgagctgaacatcgtctgcaccaagaaggaggaggacgaggccgccgagtaaccgccttcgcaagttttccacaggatccttcccgcatgtggaaaaccggatcaaacaaaaaccaggagcacaccgctgtggtgtgctcctggttttgtatctcatagtatcctctttgtaggggcggcccttgtggccgcccgcgcttctcccgtaggggccgatgcccacaccagcccgcctgcgggcggggacaagccccgcccctacgcccccggcgaaacccttgtacggcgcaagcgccgccccaccttgtggggccccagaggtcaaaaagaagatgccgtcattccttgtccaacttgagaaccgccaccgcagcgttaagcaaacgtgccggtggcacgtttgtagcgtaggccgcagcggctatgccgcgaggagggaactttgcggatgcttactcttcgtccaatttaagcaccgccatgaacgcctcggtcgggatctgcaccgtacccaagctccgcatcttctttttgcccgccccgcgaaagccatgcctttcgcggggaccccctctccatttcacatgctcgggcggagtgaatccgccctgcgccaagggtttcgctctcggcgaaacccttgtacggcgcaagcgccgccccaccttgtggggccccagaggccaaaaagaagatgccgtcattcctcgtccaacttgagaaccgccaccgcagcgttaagcaaacgtgccggtggcacgtttgtagcgtaggccgcagcggctatgccgcgaggagggaactttgcggatgcttactcttcgtccaatttaagcaccgccatgaatgcctcggtcgggatctgcaccgtacccaagctccgcatcttctttttgccctctttctgcttctccagcagcttctttttccgggtgatgtcgccgccgtagcacttggccagcacgtccttgcgcatggcgcggacggtctcgcgggcgatgaccttgccgccgatggcggcctggacgggcacctcgaagagctggcgggggatgttgtcccgcagcttttcacacagccgccgggcgcgggggtaggccttctcccggtgggcgatgaaggacagggcgtccacctgatcgccgttcagcagcatatccaccttcaccagctcggagggctcgtacttgtccagctcgtagtccagagaggcgtaacccttggtgcgggccttgagggtgtcgaaaaagtcgtagatgatctcgcccaggggcatggagtagtgcagctccaccaggttggtgtccagatactgcatgtccttgaactcgccccggcgctcctggcacatgggcatgatgttgcccacatagtcgggcggcgagacgatggacaccttggcgtagggctcctcggccagctcgatcaccgccggatcggggtaattgtggggattgtccaccatgaccacggtgccatcggtcttggtgatacggtagatcaccgagggcagggtggtgatgagatccagatcgaactcccgctccagccgctcctggatgatctccatgtggagcatgcccagaaagccgcagcggaagccgaagcccagggcggcggaggactcgggctcgaaggacagggaggcgtcgttgagctggagcttctccagggcgtcccgcagatctggatacttggagccgtcctcggtgtaaatgccgcagtacaccatggcgcgggcggggcggtagccgggcagggcctcggcggcggggcgctccacaccggtgacggtgtcacccacctgggtatccttcacgtttttgatggaggcagtgaagtagcccacctcgccggcgatcagctcgccgcagggctccatccccagggggagcaggtggccgcactccagcacctcataggacgcgcccgaggccatcatcttcaccttcatcccggtcttgatggtaccctccatcacacggaaatagacgatcacgccccggtaggcgtcgtactggctgtcaaagatcagggcgcggagcggggcctccgggtcgcccttgggggcggggacattctttacgatgtcctccagtaccgcgtcgatgttcagccccaccttggcggagatctcgggggcgtcctgggcgggcaggccgatgatgttctcaatctcgtccttcacccgcttggggtcggcggcaggcaggtcgatcttgttgatgacgggcagaatctccaggtcgtgctccagggccaggaaggtgttggccagggtctgggcctcgatgccctgggcggcgtccacgataagcaccgcgccctcgcaggcggccagggagcggctcacctcatagttgaagtccacgtggcccggcgtatcgatcaggttcagctcataggtctccccgtcggcagcctgatagttgagcttcaccgcccgggccttgatggtaatgccccgctcccgctccagatccatgttgtccagcagctggctctccatctctcgctgggaaacagcgttgcacttctcaatcagccggtcagacagggtggatttgccgtggtcgatgtgggcgataatggaaaagttgcggattttggattggtcagtcatggcatactcctcccttcggcaaatccacccggaaccccgcgcagcggggcgcggcggcctgccgcgtccaagcgttttgtcccccggacaaaaccttgccgaaggcggaatttacttccgccgaggatgcaaaataacacggggtacccgcggagtctgccgactccgcgagatttgatttgccgtggtcaatgtgggcaatcatcgaaaaattgcggattttgctctggtcggtcaaaaaaatacacctccgaagatgtgaaagcgtcgattgacattggagcgatactctgcatatccctactgcggccgccccggccgttcaagggcatggtaccggtggcgcccccgggcgtacccggtaaacaggcggcgcgtccgggatgccgcgccctacttctggttctgaatctccatccggcggttgacccgctccccggtgttgtggataatctggagcagggactggtacagtccggggtagttctccatcagcgcgtcgttgtgcatgggcgggaagttccccttctccttgacgtgggcggccagggcgtccacatactgggcctcggtacagatcatgtcggcggtggccacgcccgccataaactgccgggcaggcacggagaagaagtcctcgttcttgctgccgtccgcccggtacaggtggcgaaacatcttgtaaacagcggtacccaggtagtccgccgcggcgttaatggcctccttgcggccggtcttgcccagcaggtcgaagagcacgccgatggagttgaccagcagctttttgttcagcgtggccataatggagccgtggagcacgttgtccttctcggtggagtaatcgtacagctcttcggcggcgatggtggtgccgtcccgggagagggtacggcccagcaggaaatccgccgacacattataatagttgcaggccttcgtgacaaaggccagaccgggctcacgcacgccgttctcatagtgggagagcagcgcctggctgatccccagatcctttgcggccgcgcgctgggagatccccttctcctgccggagcagggaaaggcagcgggaaaaatcggaactcataacacacctcaacttcaactggcttcaaaacagtaggtatagtataaatgtgagaatacaaaaagtaaagtgtattttttcacaatcttatggcttttaggcattgagaaccgcagtcgaaatggtgtataatagctccgacgccgagcattttggcatttgacgtacgttttttatgatggaggaagataccaatggccattcacatgtttcagcagctcatcgacaccctgaaaaagtcccccaagcgcattgtctttaccgagggcaccgacgcccgcatcctggaggccagcgcccgcctgctggccggcacctggctggcccccatcctcatcggcaatgaggcggaggtaaaggccgcggccgaggaggtcggcttcaacatccggggtgccgagatcatcgaccccgccacctatcccgacatggacaagatggtggaggagatggtggcgctgcgccgcggcaagatgaccgccgacgagtgccgcgccgccctgatgaagggcaactacttcggcaccatgctggtaaagatgggcgtggccgactgtctgctgggcggcgccacctactccactgccgacaccgtccgccccgccctgcagctcatcaagaccaagcccgagaataaaatcgtctcctcctgcttcattatggtccgcgagggcgtgggcgacaacactgtgctggccatgggcgactgcgccatcaacatcgaccccacggaggacgagctggtggagatcggcctggagtgcgccaagtgcgccaaaaccttcggcattgaccccaaggtggcctacctgagctactccaccaagggctccggcaagggtgacactgtggacaagatgcgcaacgcctgcgccaaggccaaggctgccgcccccgacctggccatcgacggcgagatgcagttcgacgccgccgtctcccccaccgtgggccagctcaagttccccggctctcccgtggccggctatgccaacacctttattttccccaacattaatgcgggcaacatcggttataagattgcccagcgcctgggcggctttgacgcctatggacccattctgctgggtctgaacgccccgatcaacgacctctcccgcggctgcaacgcccaggaggtctactccatggccatcatcaccgccgcgctggcctaacagccctccaaagtccggagtttccttcaggaactccggactttttccggccatggaggagacctccgcccactccgggggcacggcgctccgcgcggtcaagcgttttgcgcaagggcgcaaaaccttgatgccggggcattacttgtcccgcgcagtaaaaaagccgggggccccacaggcacctgcctgtgggggggtgctccatggccatcatcaccgccgcgctggcctaactggccctccaaagtccggagtttccttcagggactccggactttttccggctatggggggagatcccccgtcccctccggtcccccgcggcaccaaaaaggatgccgtgggggcttttcgtcccggtcaaagtggacaaatctttttgctgctctgccctgaccatttctccttctggtagtagtaggacatctttttgaaagccgcccactatatgtcgtgtcggttgtgctttgaccttcaattgccgcggattcccgccttttccagtcaaagtcttgactttttggcaaaaagcgtgtatgatacaccttgtaaccatttgtaacttttcgtttctgactgttacctttcggccctcgcgggccttcttttacgcaagaacaaataattaggagggtttccctcatggacgaaattctgcatacgtcttgggaggagtcttcggccatccggccgcccctggcccaactccgggacagatgggaggcgggtaccgcggccctggcgcagcgcgtggagccgctccgccgccggctggacgccgccactgcgggcggccgccggctgatcaatcccctgcatttcctggccgccgccgtggtcatcggcgtggcggctgtggtgggcactgtctacactcccagctatgtggtggaggtggacggcgtggccctgggcaccgtcaccagcccctctgtgtttgaggatgtggtggaccgggtggagagccgtgccaccgatattctgggctacgactataccatggacggcgcggtgacctacgcccctgccctgacggagcgggagtccatcacccccgtggcggactttgagacctacctctttgaccagattggcgaggtaatgaagagctatgtgctcaccgtcaacggccagttcatcggcgcggcccaggatcgggagaccctgaatggggtgctggagcaggtgaaggctgcctatgtagatgaaaacacagtgtccgccgagtttacctccggggtctacattacccacgagtacaccccctccgatgtcaatcaggacccggcggccatgctggccaccctcaccgccaacaccaacggccagaccacctatgaggtgcagaagggcgacaccttcatgcagatcgcctttgacaacgacatgagcatgtcggaactggaggccctcaacccggatgtggacattaaccgtatctacatcggccagctcctcaacgtgaaggaggagattcccttcctctccgtcaagacggtggataacgtgacctatacccagtccattgagtgcccggtggtggaggtacaggacgactccatgtaccagggcgagtccaaggtgctggatgcaggcgtccccggcgagcagatcgtcaacgcggacatcgcttacctcaacggcgtggagcaggagcgcacggtgctctctacccaggtcacccgggaggccaccaacaaggtcatcgctgtgggcaccaaggtgcgcccctcctggctgcccaacggctactttatctggcccgtatacgggcgcattacctcctacttcggctaccgctccatctttggctcctacagctaccacggcggcattgacattgccacctcctacggcaccaacatcgcggccgccgatggcggcaccgtggtcttcgccggccgggccaccggcagcatgtggagctacggcaatctggtcattgtggatcacggcaacggcaagcagacctactacggccactgctccagcgtcctggtctccgccggcgacaaggtctaccagggccagcccatcgccaaggtgggctccaccggccgctccaccggcaaccactgccactttgaggtgaagatcaacggcacctccgtcaaccccctgtcctatctgagctgaaaaagaccggcgcaccctgacgggtgcgccggttttttcggctcagcggagcttcaggatttcatccagcagacggtgggcggcctcctccttggtgaggaggggcagctccagctcctcccggggggagatcagcgtgagcagattggttggcactgcgaagcccgcgcccggctccttgaggttgttggcggcaatcagatccaggtgcttcttctccagcttcctgcgggagttttccaccatgtcccgggtctccatagaaaacccgcacaggaactgccccggccggcggtgctcccccagccaggccaggatatcccgggtgcgctccaggggaatggacagctccccctcccccttcttcaccttgtcctgggccacctgggccgggcggtagtcggccaccgcggcggccttgatgatgatgtcctgctccggggcgcgggcggtgaccgcctcaaacatgtcctgggcggacaccacgtccaccgtctccacatatgcgggctttttcagcgccgtggggccggacaccagcgtcacctccgccccgcgggcggcggcggcccgggccaccgcatagcccatccgcccggtggagtggttggtcaggcagcgcaccggatccagcgcctcctgggtggggccggcggtgaccagcaccttcagtccctccatgtccttggcatgggagagggcgtgaagcaccgtctccagcagctcctccggctccggcatcttccccttccccacggccccgcaggccaggtgtccgctggccggctccacaatctcccagccgtaccgccgcaggtgggccaggttatcctgggtaaccggattctcatacatgcgggtgttcatggcgggcgcggcgattttgggacagtcacaggccagaacggtggtggtgagcatatcgtcggccaggccgtgggcaagcttagccagaacgttggccgtggccggggccaccagtaccaggtcggcctggtcggccagggcaatgtgctccacctggaactggtagttgcggtcaaaggtgtccacgcttacccggttgcccgtcagggattcaaaggtgtgggggccgataaactccgtggcgtttcgggtcatgagtacctggacgttcgccccctgcttcaccagggccgaggccaagcccgctgacttatagcatgcaatgccgccggtgacacccagcagcacagttttcccctttaacatgcaggtctctcctttgtcagtgggcggatgcggacatccgcccctatgctccgtatatagtcatccaattataccaaaacagccgcaggttttccacaatgggattgcaatctgaggatataaccgttataatggcctcggctgtcccgggcggcgggccgctgtactccccggagggagacggcaggcccatctctgcctgtggctgcatccaaatacgcgctgtatcccgcccgtcgggaacggcagcctggaggtaattgaatatgaacacccacaccccccgcgcccagcagcaccggcaggtgcagagcctggctgtcctggccatgtttaccgccattctctttctgctcaccttcacccccatcggcatgatcgacctgcccatcattaaggccaccgtgctccatgtgccagtcatcatcggcgccctccttctcggacccaagaagggagcctttctgggcggcatgtttggtctggccagtcttttgaaaaataccctggtacccaacctgtcctcctttgccttttcccccctgataccggtaccaggcctggaccggggcagcccctgggccctggtggtttgttttgtgccccgtatccttgtcggcgtgaccccctggctggtctatacgctgcttcaggccctgtcccgccgccggggctccgtcctccaggccggcagcatggccctgtccgccgtggtgggcgcctttaccaacaccgccctggtaatgggactgattgctctgctgttccgggatgcctacgccgcggcccaggggattccagccgaggcagtgctgggctttattctgggcatcgtggcggccaacggtgtgcccgaggccattgtggcggccatccttgtccccgcggtgtgcatccccatgggaaaggctctcaagctcaaccgcgctcccctggccgcccgggagcccgcctgagccatgctgctgaccattgacattggaaacactacagtcgctgttggcggctttcaggggccggagctgcgctttgtccgccgcctgcccagcgaccggaacatggacgccgccgtctgcgccgcgcgcatgagaaccctgctggcagaggagggagcggccccccaagacgtggagggagcggtgctctcttcggtggttccctccctcacccaggtcgccgtccaggcggcggaggccctcacccgccgccctgtccgggtgctggggcgggatctcgaccccggcctgcccaccggagactatgacgtctccaacctgggcatggaccggctggtggactgcgtggccgccctggcccggtggcggccccctctggcggtctttgacatgggcaccgccaccaccctgtcggtggtggatcgggagggcgtattccggggcggcatgattctcccggggctgcgcctgtcggtggacgccctcagcgcccgggctgcccaactcccttgcattacttttacccagcccgagggactgctgggtaccgatactgtgtcctgcatgcgcagcggcgccctctacggggccgccgccgccctggaggggatctccctccgcctggaggaggaactgggccccgtcaccgtagtccttaccggcggtcatggccgtgacattctacccctgctccgccgggcggtggagtatgagccccatcttcaattgatgggtctgcgggagctgtggctccgcagcctgtgaaaaaaggcggcgtaccggatcggtacgccgccttttttcagcccggccgctcccctgtgacccgccgctttttgtggcggtaccacacgcagttaaagacatttcccagaatcaggatgttcccacacaggtagagccataccagcaggataatcaccgaggccagggacccgtagaccagggagtacctggaagacaggccgataaaccaggaaaacagggcggtggcggccacaagggccacggcggccagaaaggcacctgtaaggataggcggccgtggcctgcctcggggcgcggccatccggtacaccagcaggacaaaaaggaacaccagcaggaacagcagcagaaatcggaaccattgccagtcccaaggcagggtgaccgtttccaggcgaaacaggcgctccaccagatggaaaagccacccgcctgtgaggagcaccaccagggccaggtagatggtgagcagaaagagcaccgaaaaggccacgctggccgcgatgcgccacacccctgcatagctcttgcgtccgtaaagatcctccataatattcatcagcgcgcggaaggcagcggaggcggagaacagggtcataatccctcccgcggccagcagggcgggtgactggtttccggtaatatactgaatatagtcccctaaaatcccaagcgtctcccggggcaggaagggggaggcggcctccagtacggcgttgatgtccaaatggagcagtccgatgaaggcgttaatgcagataaggacaggaaagaaggtgagaatcagaaagtaggccagctccgcagccgaacgggatacccgcttggagaagtaaagctcccctacctccagcccaaaccggaccggcttccactccagcagctttttcatccttccccgcctcccccgcgtctcttttccagcatacccgttttctcctgcgaaaaaacgaaaaagaccgcctgcggatgcagacggtctccccttcgaccagacctttaggccagcttattcagcttgatggtcatggcgctcttcttgtgagcggcgttgttcttgtgcagcagacccttgaccacagccttgtcgaccgccttgacggccaccttgtaagcgccctcggcctcgctgcggttgccttcgaccaccgcggcctcgaacttcttgatgtcggtcttcagcgcggacttagcggccttgttctgcgcagccttggtcttgttcaccaggacacgcttcttggcagacttaatattcggcaaaccaaacacctcctccgatgacgtaatcgttatttacacagtttgcccgtgcagattcttattttaacagccattctttaaaaatgcaactctttttttgaacttttttcactttttttgcatatggaggcgctctgcgcaaaaaataggggcatctggtgtcatcaacaccacatcttggggtatggagggacgtatatgttgaaacggagaaccgacctggctctggaggccgcccagctctggcaggagagcgccggggaggccgggacgctgccgggcgtggagtcggaggaggcaacgcgggagggctatccggtgaccaccgtgcgcatccgggacgaggcgggcgcccgggccctgggcaagccggtgggcacctatgtgaccctggagctggacggcctggcccgccgggaggaggacgccttcggccgggcggcgcgggccctggcggcggagctgggggcgctgctgggcctggagccgggcgcgcccgccctggtggtgggcctgggcaaccgggccatcacccccgacaacatcggccccaaggctgccgaccagaccatggtgacccgccacctggtggagcgggtgccggagcacttcggctccttccggccggtggccgccctggccgccggggtactgggcaccaccggcatggagagcggcgaggtggtccgcgccgtggcggagcagatcaaacccgcctgcgtggtggcggtggacgccctggcctcccgcagcctccggcgggtctgccgcaccatccaactggccgacaccggcatcacccccggctccggcgtgggcaatgcccgggccgccctcaacgccgagaccctgggcgtccccgtcatcgccgtcggcgtccccaccgtggtggacgccgccaccctcacctgcgacgtgctggccgaggcgggcaagggggagctggaccccgccgccctccagggcgcgggggacggcctgatcgtcacccccaaggacatcgacacccaggtgcacgatctggcgaaggtcatcggatacgggatcaatctggcccttcacaccggcctgaccatcggggacgtggagctctttctcagttaatccgggccggccgccccggccgacacctcgatccgaaacacattgatggtgtccacatcggggcagcagaacaccgccgtgcctgccggctggccggggatggcaccgccatagcggagaatatccacatagggaaaggccacatgcatggccatgggacagagcttcccccgctccgtgtcaaagtcgaagctctcccccacccggtggccccggtggcagccccgcttccccagccggtcaatgagggtgatgcgaattgccggacgcgccataaaccgccgcctccttctattttttatccccatcataacacacaatgtggattttgtcttccccgatgcttgatcttttcccccggcgggcgtacactctgtacagagaggagtgctgcccatggacgcctgcctggactatctgcgggagaacggggccgagccggccctggtgatcgacccacacacggtggtcaccgccccctggaccaccttcaagtgccagttcggctgtgagaatttcggcaaaaaccactgctgcccgccggaggccccggactacgcccgcacccgggccgtactggacagcttttccaccggcatcctgttccgggttcaccactggaacgccaccgccatggccgccgagggggcccggcggctctttctggacgggtactacaaggccctggccttcggcagcgggccctgcaagctgtgtccctcctgcgcgccggaggggtgccgcttccccgggaaggccgtccccgccatggaggcctgcggcatcgacgtgttcgccaccgcccgcgcccacggcctggaggtgcacacgctccgggttttgggggaggagcggaaccatttcggcctgattctggtggaataggccccgaaacgccttgacggcgggcggtttgcgtgatacaatagcggccagaaacaggcattgaccgggagaagtaccccgtcccaccgtcccaagagaggagccgtctggtgcaaggctccggcggaggcaggggaaggcgcccgccagccgcggggaggaaatgccccgccggtcccccgccgttaccgggtttgagcgcggggcctctgccccgaattcaggtggcaccacggagtttgcttcgtcctgagccgttcggctcagggcgtttttttccgcgcagaataacgcaaaaaggagcttatggatatgaagaacaccgaaaagaccatggatcaaatcgtggccctgtgcaagggccggggcttcgtctaccccggcagcgagatctacggcggcctggccaactcctgggactacggccccctgggcgtggagctgaaaaacaacgtcaagcgggcctggtggaagaagttcgtccaggagaacccctacaacgtgggcctggacgccgccatcctcatgaaccccgaggtgtgggtggcctccggccatgtgtccaccttcaacgatcccctcatcgactgcaaggcctgcaagatgcgccaccgggccgacaagctcatcgagggctggtgcgccgccaacggccgcgacgacgtgaatgtggaggccatgaccaacgaggagctggtggccttcatccgggacaacggcgtgatctgccccggctgcggcaaggcggacttcaccgacatccgcaagttcaacctcatgttcaagacccaccagggcgtcaccgaggacagcagcaccgaggtctacctgcgccccgagaccgcccagggcatcttcgtcaacttccccgccatccagcgcaccacccgcaagaagctgcccttcggcgtgtgccaggtgggcaagtccttccgcaacgagatcacccccggcaacttcatcttccgcatccgggagtttgagcagatggagctggagttcttctgccagccgggcaccgatctggagtggttccagtactggcgggagttctgccgcaagtggctggtggatctgggcctgaaggaggagaacctccgcctgcgcgaccacgagcccgaagagctggccttctactccaaggccaccaccgacttcgagttcatgttccccttcggctggggcgagctgtggggcgtggccgaccgcaccgactacgacctcaagcagcaccaggagcactccggcaaggatctcacctacttcgaccaggagaagaacgagcactatatcccctatgtcatcgagccctccctgggcgccgaccgcgtgaccctggccttcctggtggacgcctacgacgaggagatcgtcggccaggacaagaagggcaacaacgacgtgcgcaccgtcctgcgcctccaccccgccctggcccccttcaagtgcgccgtgctccccctcagcaagaaggaggtcctctccggccccgcccagcagctgcgggacgagctggcccgcgacttcatggtggactatgacgacaccggctccatcggcaagcgctaccgccgccaggacgagattggaacccccttctgcatcaccctggacttccagaccgtgggcgacgacaccacccccgcggatcactgcgtcaccatccgggagcgagactccatggagcaggtgcgcatccccatgagtgaagtcaagaattatatcgcagagcgcatcaagttctgagttgtttgccaaaggcggcccatttgggccgcctttccttttccttccccgcgcccgaaatatgtggacatacagggacggatgtccgctgctccccccgttcaacgcttacacgtaggggtggggcttgtccccgcccgcctctttcgttcccgccccaggctccggccagccgggcggccacaagggccgcccctacagagaacggctggttgccgctgctcccccgt

SEQ ID NO: 4219 - DNA, 58835 bp, Unknown
  gut microbiota DNA sequence
ctgcgcatccccaccaccgacctgcccgccgagcaccgggccggcatcccctacggcacggagatcaactttgccttccgccccgacctcatccacctctttgaccctgagaccgagaagaacctgatgtattaaaaaaagcccccgccatagcaaagctatggcgggggctttttggccttatgcgccgagaagcagggcctccaatgcctggggggtgtccacgatgcgctgggcgccatgggcagtgagaaactccgcgtcccggaagccccagctcaccgaaaggcagggcagcccggcgttggcggcggtctggatgtccacatcggagtcgcccacgtagacggcccggccggttccggcgcccagctcctccagcgcgcggaataccgtgtccggcgcgggcttgcgggctaccccctgggattcgccgatggccaccgggatgcgcgccccaaaataggcatggcacaggccctttaccgcactgtcgaatttgttggacaccacggcggtgcggataccggcctgccccagacggtccagcaggggcagaacgccggggtagggggcggttttatgctccatattcagggtatagtgggcgcggaagtcggccaggacgcgggcttccacctcctcgggcgtcccctcgggcacggcccggtggatgagccgccccacgccgttgcctacgaagcggcgaacctcctccagcgttcgggcgggcatcccctgaagcgccagagcgtaattggtgctgtcggccagatcctgaagggtgttcagaagcgtgccgtctaaatcaaagatgactgtgtcgtaggggtacatggttggagcctcctgtgtcgaatgtcagaaaatcgtaccgggcatcagtataccacaggagaggggggaacggaagaggctggccaacaaaaaccccagcaggccgcagccgggaaaggtgaacagccaggtgagggcgatgcgggcagccacacggtggttgaccgtccccccgccggcggagccggccccgagaatggcggcggtcttggcgtgagtggtgctcactggaaggccggccagcgtacacaggagcaggcaaagtccgccccccagatcggcggccagaccctcccggggggccagaatcaccatgtcccgacccacggtttcgatgatccgccgcccgcccatcgcggtacccagggccatgacggcggcacagagcagcataagccagccgggcacggagaaggtttggcccacaccgcccccctgggccagcgcggcgcccaggagaaagacgcccagaaatttctgcccgtcctgggccccgtggaggaaggccatagcgcccgccccggccagttggccccggcggcagagggggagggaggggtgcaggcgctccagcagacggcggcacaggccgcccacccaccagcccagcgccacggagaggaccagtcccaggagtacccgtccccaggctccagcccggatgttgtccagcccgccgggcagggccagggcggccccggtgagcccggccaccagggcatggctctcactggtgggcaccccgaagcgccaggccaggacggcccaaaggacaatggcgcacagcgccgcgcagagagcggagagagccgcggcccggtccgggccgaagtcagcgatggagtagacggtctccgctactgttgcgttgattgccgtcatgacgaggacgcccagcaggttgcatgccgccgccagcgcgaccgcccgccgaaaggagagaactcccgttgataccacagtggcgatagcgtttggcgcgtcggtccagccgttgaccagcaccacggccagcaccagcagacaggtcagccccagtaccggattgtgggctacctgtgtgaaaagatcagacagagacaagacaacaccccctgtccccattctacggggacagggggtgttgtatgtgagagaaattggggccccatcgctcatacctcaatagagcccggtggtaccgagaatacgggttacctcgtcggcgcgggccgaccaggcggcggcggccccatgctccctccggcggtttttggcccagtcgccggtctccgccagggcgcggcggcagagggcggcgaattcctccggagagtgggcgccgtacaccacgtcggggaagtgctccacctgctcgggaaagagcatggacaccacgggtttgccggaggagaggtattcgtagatgcggcagggcaccacgtcattgccctgctcggaacggcgcagcaggttgaggcatacgtcaaagcgggccaggtagtcgggcacctccaccggcgcccgccgccccaggaggcggacgttgggcagccgctctagcagctcggccatggggttcttctcccggcggcccagaaagacgaaggtgcaggccggcatggcctgggcggcgtacagaacgggggcgaggtccagatcccgccacagggtgccggtatagcccagaatggggctggagagcccccgcagctccggcggaagctcggcggggggccgggtaaacatggggtggttcaccccgttgggcagcagggcgatgttgtcgttgcagggggagaggtggtcaatgagcccctgggaggcggcaaagaccacatcggcggccagggccagatcgctctcccaccggggggactggtcgggccagtcccggtcgcagtcgtagaccacaccccggtggggcacctcgtccagcaggtggatgtgctccggcgcggtgcaccacagcagcggctccttaaaacggtggtgctccatctggcggcggataaacttacccagtttgcggtagtgaaggcggaacaggaggcggtgccgctcctccgcctccagcaccggggggagggcgcagaccgtgagaccggggcgcaccctgcggcccggctgtcgggagtattttcccggcggctcgaacaggagcacctgggcgtcccgcatgcgggtcataagctgctgggtgcgggtggggatagtgcgccaggggtcagcagacaggcagagaatctgtctcacgtccctcacctctccagcagcatccgggcggtctcgctgttgcgccgttccacctggcgcagccgctccacgccgccggagaggaaggcctcatccccgatgcgggcgcaggccgcgtcgatgtgggaccgcagggcctcctccgtcacctcgtccagcccggtgtagagatcctgtccgatgtaggacaggaaggagctgatcttctggtcgtagaccacgcccaccaggggcacaccctgaccggcggagaagaccagggcgtggagccgcatggagaccaccgcctgcatccgggcgaacagaccgatggtgtggtcggagcggccggtctggggaagaatgtagtggggggccttcatgtgctgggcggccaactgggccgcccccacgtccagacgccgctcgatgggcagaaagacaggggtgaggccgtacgtctcataggcgtagtctgccgcggcgccgaagacggcggccttggcctcaaaccccggccagggccgcagggcgaagccgatgtagcggccgtgggggtcaatcccctgactctccagaatgccgtccaccacttgggctggtgcggcggggaggatcaccgtgggatcggcggagaggatgacctgtggcctcgtcacccccatgtcctccagttcctcggcggagtgtgtgtcccgtagggtgatggcgtccacgctcctctggagcacgcgggaggccctgcggcggttggcgggggagtgaatggggccgatgccgcagccgtacatcatcacctggttgcccagccgcttggcccaggagatagtaaacagatagaaccacagagagcggtggctggtcacatcctgcatcagggagccgccgccgttgatgtagaggtgggtcttgcgcatccgccacagaaagcgggggaaggcaaaggtgtagatggagttgacccggtaggtgaggcgggtgtcgtccgggttgcgggagagcacccagatggggaggtccgggtcgatctggcgcagctcggtgacaatggcctccaggatggcgtcgtcgccggcgttgccccggccgtaggcgccgcataccagggcgccgtcccggcggcccttcttgcggctctggcggcggagaatggtctcatagatgttgagctggcgctccagggtgctctccagggaaaaatcctccctgccccgctgatagagccgctcccccaggtgttggcggagggtggggtccttggccagagtaatcaggtggcgggccagggtatccgcgtcgcccgcctcgaacagcaggccatggacgccgtgttcaatgaggtaggggacgccgcccacccggctggcgatggtgggcagggcggcccgggccccctcggtgagagagtaggggaaggtctccgacagagaggtgagggtgttgatgtcgatggcgtggtagaagctgtcggtgtcgctgacccatccggcgaagcacacctgccgctccacccccagctcagcggcgagccccttgagcatggacatctgctcaccgtcgccggcgatgagcagccgcagattggggcactcccgatgggccttggcaaagccccggaccagggtggcgatgtccttgaccgggttgagacgggcggcgataccgaccactacactgtccccatcggcctccagccccacggagcggaagtattcctcacggctcagggcaggggtgcggggggtgaagtcgatgccgttgtagatggtgaacagcctgtcgggatcaaagccccgcttgatgagcaggtcggtcatggcgtcggacacgccgatacggtagtccagccggcgcagggcgatggtgttgatggtgccgtaggtgaggcgggagagggggcggcccagatagtccagccgatagtcggagtggacggtggtcaccaccggcagaccggtggagcggcgcagcagggcgcccatcatgttgccgcgtgcgccgtggcagtggataagctgatagcccccctcccggatcatccgtttgagagtgcggtatgtgcgcagcagattgcggccggagagcaccactgtagggatgcccagttcccgggcctcctgggcaaaggggccctccagaaagcagaccatggtcacctcgatggtgcgggagaggttttgcagcagggagtggacgtgagtcttggctccgccgctgtcgccgccggaaatcagagtgatgactttcatatatgaaaacctccggacaaagaaaagacttgtttcagggtagggaagtatggtacaatatgcaagtatcattgtaccaagtattatgtcaatttacaacctcggaggttacaaaagatgatagacgaaaagggaagattgtttggcaagctcaacattgtggatctgctggtgattctggtggtccttgtggccgtagtggtgctgggcgtgaagttcctgggcaaggacgggggcggcggcatcaatcccggcaagacccaggtgacctataccgtgctggtcaagggtgtggagcaggaggtctacgacaatatccagaaatacatccccggccagttgatggcctccggcgagatgctggatggccaggtggtttctgtggagccgagggcccacgagcagaccgtgacggtggataccactgacggcaccctggaaattccggtggatgagggcaccatagacctgctcttcaccatcgagtgcaacgtggtcaaccccattaccacagagattggcacccaggaggtgcgtgtgggtaagacccatacggtaaagaccgacaagtttgagctgatgaatggcgtcattctggactgcgagtggggggacggcgcggctgcggccgatgctcagtaagacaaaagaacacagaggggcggcggcagccatgtcgccgcccctctcctatatggaggaaacaatatgcccgaatggtttctgaatctggacggaggcatcctgctctggctccaggaggcggtgcgcaacgccgtcctgacacccctgtttacgctctacacccatctgggtgacagcggactgatgtggattgccctgtccgtccttctgctctgcttcaaaaagacccggaaggcgggggcagctggcctgatggccctgctgctgagcctgatgttcaccaacgggattctcaagcacctggtggagcgcccccggccctggctgacggtggaggggctgacgcctctgatcgcggagcacgaccccaactccttcccttcaggacacaccagcgcctcctttgccgcagcgtcggcctggtgccgcactctgccccgccggtggatgggggtgacggcggtggtgctggccgccctgatgggcttctcacggctgtatgtaggggtccatttccccagtgatgtgctggccggggtgctggtgggcctgttctgcggctggctggcctgcctgctctggcagcgctttgccgcttggaagggactggaggcgtaacacgaaaaaagagctgtatcccagacgggatacagctctttttggtaagcgagtgaaaaagcttacttcagctcgaccttggcgccgacctcttccagcttcttcttcagctcctcggcctcgtccttggagacgccctccttgatggccttgggggcagcctcaacggcagccttggcctcggccagacccaggccggtgatctcacggacagccttaatgaccttgatcttctcggcgccgacctcggccagcaccacgtcgaactcggtcttctcctcagcagcgggagcggcagcaccgccggcggcgggagcagccatagcggcggcggagacgccgaactcctcctccagagcgtggacgagctcggagagctccagaacagtcagacccttaacctcttcgatgagggcattgattttctcagaagccatgataggtaacctcctaaataaatgtttgtaaagatgtgtgtcgagttactcggcagccgcttccgcgggagcctcggcggcctcgacagagccgcccttctgctcgcagatggccttgatgacgatggccaggctggtgatgggggccagcatggtgcccagaacctgagcctgcagaacctccttggagggcagctcggccagagccttgatctcgtccagggacaggaccttgccgtccatgaagccggccttgatggtgaacttctcaccgttgaactgcttggcgaacttgttgatgacgcgcatgggagcgatgggatcgccgtgggacagagccagggaagtggtgccgttcaggacggaatccatctcctccagacccacattgttgatggcgaaacgcaccagggtattcttcacgacggcgtagtccagctcgttcttgcggcactcggcacgcagagcggtgtcctgagccaccgtgattcccttgtagtccacaagcacgccgctgctggcggtcttgagcttctcggtcagctcggccacgatggcctgcttctcgctgagaacctttgcgttaggcatttggaattcacctccgttgagattgagtccaacttttccgatgcagacgcaacaaaaaagctgttttcgcattcaaagcaagcgaaaacagcacaaagaatttcatcccgttgtggctgcattctcggcaggatttccggcttgcgcccacctgctgtctttgaacacggttaatagtatatcatcccggacaggctgtgtcaagcacaacctgtccgaaaatgacatttttttgcggggcctgtcggcccgtatccgccgctacggcgaactcgtcccgcttccgttgctctctcaccctcgaggcccccacgcgaacccagcgaagcggttcgcgtggggaaaaggagccgcagcggaaggagtgagctttgccgctggcggcgaagcgaaggatctggagcttgcggcgacgctgtcacgctgtgggttgggcgcatggccgagtcgctaagcggccattccgcgaaacatgccgctgggcttcgcccagcctgctttttcgcctccatgtcctcttagctcccctatgcgcctaccctccgcgcttcttgtcacgctgcggctgctgcgcgacgccacactgctcgcccctccgcgaaaaataccttgcgcctgcggcgcaactgctttttcgcctgcgaggttcgctgtgcggctgctccgctcgcctccgcgcttcttgttacatcagcttggccgcgttgatcttcacgccggggcccatggtggaagcacacacgcaggagcggatgtactgacccttggcggcggaaggcttagccttgacaatggcacccatcagagcgttgaagttctcggtgagcttctcggcgccgaaggagaccttgccgatggggcagtggatgatgttggtcttgtccagacggtactccaccttaccagccttgatctcggtgacggccttggccacgtcgggggtgacggtgccagccttgggggagggcatcaggcccttgggacccaggaccttacccagacggcccacaacgcccatcatgtcgggagaagccacgaccacgtcatagtcgaaccagttctccttctgaatcttctccaccaggtccatctcgcccacgaagtcggcgccggcggccttggcggcctcggccttgtcgcccttggcgaagaccagcacgcgctgggtcttgccggtgccgtgggggaggacgatggcgccgcgcacctgctggtcggcgtgacgggagtcaacgcccagcttcacgtggagctcgacagtctcgtcaaacttggcgggggcggtcttcacgaccagctccatggcctcagcggtatcatacagagcggctttgtcgatcagcttggcgctctcctggtatttcttgcctctaaacattgctctttccctccttcgccttagtcgcccacgacgatgcccatggagcgggcggtgccggcgatcatgctcatggccgcctcgatgctggccgcgttcaggtcaggcatcttggtctcggcgatcttgcggacatcctccttgctgatggtggccactttggtcttgttgggcacaccggagccggactcgatgttgcacgccttcttgatgagaacggcggcggggggagtcttggtgatgaaggtaaaggagcggtcggcgtagacggtgatcaccacggggatgatcaggcccacgtcgtttttggtgcgctcgttgaactccttggtgaacgcggcgatgttgatgccgtgctgaccgagggcgggaccgacggggggcgcgggagtcgccttgcccgcgggaatctgaagtttcacataaccagtaattttctgtgccatttgaaacagcacctcctacgataaatgtggttggaagcggaactgcggtgcagtccctcccacgtgcggggaatgggccgcccggcccggagctcagtcctggacaggttctacctggtccagctcaagctcgacgggggtttcgcggccgaacatggagaccaccacccggaccttgctgcggtccaggtcgatctcctcgaccgtgcccaggaaggactccagagcaccgtcggtgattttgacgttgtcgcccacctgatagccgaccaccacctcgcgcttttccacgcccagggcggcgatctcctcgtccgtcagggggatggccttgttgccggagccgacaaagccggttgcgccgcggatgttgcgcaccagatgccacgtgtcgtcggtcatcaccatcttcaccagcacgtagccggggaagaccttgcgctccacggtttttgggccgttatccgtgatctcggtgaccgtctccagggggatgctgacctcctgaatcaggtcgcgcaggccgcggttctccacggccttctcgatactggcggccacggtgttctcatagccggaataggtatgaaccacataccacttcgcattgtcagccatgtcgcaccttaacccttaccaaagagatccagcagggcggtaatcacggcgccggcgagggcatcgaacagccagatacagatgccaacgataatgcagcagatgatcacgatgacggtgttgttgacggtctgcttgcgggtgggccactggaccttcttcagctcgctcctcatatccttgaaccacttgccgatgcgagcgaacacgccgggcttcttcttgtcagccttgacgtcctttttcttatcggttttcgcgggcttgtcggcagcctggtcggcggcctgctcgagcttctcgttttcagacattccgtttaacccttctttcttctgagccatagcagcactcattacttggtttcgttatgaaccgtgtgcttcctgcagaaggggcagtacttgttcaattccagacggtcgggagtgttcttcttgttcttgttggtgttgtagttccgctgcttgcactcggagcagcgcagagtgatcttcacccggttgccggccttcgccatgttcggcacctccttcattgtttgaccgcgcgcagcaaaaaagctggacacagcccttgggccgaatccagcaacgtaaaggcgcatagactgcgcccactatgttacgtcacggtgcggattcggcatgcttgcctccctatgtcctcacagtgagggaagggttttgtacgtcatcacaccgtaaaaatgcgcacaaaaaaagagccctttttcataggtgtatcaagtctatcacagctcatatgggaagtcaagcgctttttccttgttttttcccaaaaagtacgctatagtggtacggaaaaggagtggtagatttgcgtattatggccatcgattacggcgatgcccgcaccggagtggcaatctccgatcccaccggcctgctggccggctacaccacggtgatccagagccggaaggagggggtggtggcggaggagctggcccgccttgcgaaagagcacagtgtggacgagctggtaatgggcttcccccggaacatggacggcaccgaggggccccgggcggagctctaccgggcctttgccgcccggctggaggaggtctgcggcctcaagccggtgctctgggatgagcgccgcaccacggtggaggcccacggcatcctccacgcctcgggcaagcggatgaagcagcataagaaaaccgtggacgcggtggcggcgacgctgattctggagggatatctgacgttcaggcggcggggcggatgaaggggcgacccttgtggtcgcccgcgggcggccataaaggccgcccctacatggttcgtatggatatccctacgagcggctgaacagctcccgcagccccaccacgatcaggaaaccgccgaagcagcggtggagcagctccacatccaggctggtggcggcccaggcggccagagcggtgccagccagcccggccaggacggcgggccagacggtctgacggtcgatatagccatttttgatgtgggcgggcagggcggtggcggcagtggggagaaagtagagcaggttgacgccctgggccagattctggggcaccccggcgaaggcggtcatatagatgagcagcagggtgccgccgccgattccgaagccggagagcacgccggtgacggcgccggccaggagggagatgggccacgccatcagaagaacagcgccttgacgccgccgtagaggataagcagggcaaaggcgcggcggagccagaccatattcagcttcttgaatacccttccgcccacgaagccgcccagcaggccgccagccagataggggagggccagcccaaagtccagtccgccccgaacccagtagatgacggacgagagtgcgcacagggggaggataatggcgatggacgtggcgaaggcgcggcgctgctccagtccacaccagcgggtgaggaggggcaccagcagcatccccccgccgcccccgaaaaagccgttggccagcccggccgccccgccggccgccgcgctgcggagccgtgagccttttttctgcgtcaaaaaacatccctccattggccttagtttaccaatggagggatgtctttatacgtgcagcccggcaagggacaggaccacttctccggccagcatgagcccagccaccggaggcacccaggccacgctgccggggacggagcggcggccggggggcggcgcctcccgctggagggcggccttcggctcctccggcgaccagaggacccggtggtggaggatgccgcgggcgcgcagctccttgcgtaccacccgggccagggggcagccctcggttttcgacaggtcggtgatgcggaacaggccggggtctagcttgttgcctgtgcccagggaggagacgatggggacgccccgggtgagggcggtctcgatcaaatccagtttgcaggacaccaggtcgatgcagtccacaatgtagtccagcggctggtcgaagaagtcctcccgccgccccgcctcatacttctccgcccggatggtgaggcggcagtccggattgatgtcgcggatacggtcggccatggcctgggccttgggctggcccagggtggagcgggtggcctccacctggcggttcaggttggtcagacccaccgtgtcgtggtccaccagcgtgagggcgcccacgccggagcgggccagggcctcggcgcaccagctccccacgccgcccagaccgaacacggctacgtgggcggcagccaggcgctccatggcctgggggcccaaaagcatctctgtgcggagaaacctctcgtccatgcagttcatccctttccaaaaacaggcggacggagcagcgctccgcccgcctgtcccatgatgtctcttactcgccgaggtacttgacgccggcgccctgggtggcctccatgttttccgtcaggccctccagccaggtgttcagcttctcgttggtcagcgcgttcttgccggtgagcttccagacgggctcgtcccagccctccaggtagatgatgtgccagccctgctggccgtcctggggattctccaccagaccggtgtcgccgatggcgcggccgtcggcaaagatccagtcgttgaagccctcgaacatcacgccgggcgcgacctgctcgtacaggccgccgttggtgttggagccgggatcgtcggagtattcctcggccagcgcgccgaaggactcggcggtcttgtcgcccgcctcccactgggccaggatgtcctcggcctcggccttggcggcgtccagggcctcctgagtgggcaccttgctctcgtccacgtcctcggtggcggggtcatcggcatcagccacctcggccttgatgagaatgtgtcggatgtcagcagtggcagtctcatcccggtagcggttcaacagcatgacggcgtagtagccggagctggactccaccacacccacatcgccgctggcgcggctgtcatccatcagccattcgccaaagctctgataggagaggctgctgcccaccgtgccggtgtgcagggaggcgtcgggatccgcctcatagtcctccttgtcgtcctcagacacatagtcgggggccagctcggcaaaggcagtttccttgtcatcggaggaattcaccgcagccacaaacgcatcggccttggccttggcagcctccatggcggccttcgtctcctcttcagtgggctccaccgtgttgccgtcctcgtcggtggtggacgcggccttgccgctgagatagatatagcggtagtcgtaggtgtccagcgtggaggcattctcctcatagtaggcctgaatgtcctcgtcggtaatgcccaggctgtcggcgtaggcgctctggtaaccgttcaccagagcttcccgctccacacaggtcttgaaggcggagggggtcatatacttgccgtacatggccttcagatagccgtcataggcatagccgtaggactcggcagcctttttggtggaggagatggcctcatccacataggccttgtcatcgtcggacagggtgtagccggcctcagaggcggcggtctccagggcagagatcttcttcaactgctcaatggtactgtccaggaactggtcaaagtagctcttggtctgctcctcgtccgtatactgggttcggagatccttgctgggatcaaaagcgccgccgctggtgctgtatgcctgattcatataataggtgaaataatagttgacatcggtgacggagtaatcgcggccgcccaccgtcagagcggtcttgccgcgctggaagatgccggagtgccagatcagcagggcggccaccagcacggcaacaatgacaccgatgaccgtatagacaacggccttgcgcttggcggcctgctgctcctggagctccttcctctccttttgagtcaggccctgtgtcgggtcgctctggcgcgatttcttttctctggatgcgctcatttgtagcttcagtcctctcataagtgtccccccgcgggagcagggggcctggctatagacattctgacattatacaggaaatgccgcactctttcaagagcgaaaacaggttttacactttgttcaaatgccggaaataagaaaaaccccacgaaacagcgtttcgtgggggccccgctctggccgtgcggatccatttaaaacctgcacaaagtggcaggtgggttgcctccatgtcgcttcgttgcttccaacttccagccgtccctcggaggggcgccgggaggcctgcagtccacgccatgaggtgggcatcccgtttcagagatgtgggtttaaataaaacccgtcacgcaccgagcaggaaaaaattatgcgtccgagccgtcctcctccgcgaagagggactccataaactgctgatacaccagctccagctcctcctcactgtccagggtggagagctgttcctcgccgtctgcctcgatcaccttgaggatcaccaggccgtattcctcatccagatccacatcctctacagagccgtcctctttcccctccacggccgggaaaaaggccatgtaggtctggccgttgtactctagtgtgtccagatgctccagctcaaattcattgccgtcctcatcagtgacggtgatgaaatcagggccaaattcttcactcatattgggcaccataccttccttttcttcgtctcttattgtagcctgttgcgcccaaaaatgcaagagtgggatctgccaaatttttgacgaagcctatattcatcctttattggaaagaattagggtggacaagctggaggaatatgctataatatcagcaatcgccgcatgtgatgaggcgatcctgcaagcatacgtgttccaccgaaaaacggaggtgtcattttggcgtcaacatccaatcagggccccaatccgaaccggggccggaagcggaggcggccgtccacggctgcggtggttgcgggcacggtagggaaggtgctgggcaccttcctcctgatctgcgtgatcacgggggctatcctgctctgctttgccgcggtctacatcaagacggtcatcatcccgcaggcccatctggaggccaatttcgtcatgaaccagaccagtacgatttattataaggattccactacgggggaatatgtggagcacctgtccctccatggaacagaaaaccgccaactggtcgactttgaggagatcccagataatctgatcaacgccaccgtggccatcgaggacgagacgttctggaagcaccacggcgtcaactggaagcgtaccctcaagggggtgctgctcatgttcaccggcggcgatattcagggcggctccaccatcacccagcagctcatcaagaatgccacccagtacgacgatgtgacggtaaaacggaagattctggagatctttaccgccttggactttgacaagacctactccaaggagcagattctggagtggtacctcaactatatttacctgggagagggctgctacggcgtggccacggcggcccagaactacttcggcaaggagctgtcggagttggatctggccgagtgcgccagcctgatctccatcaccaacaacccctcggcctacaatccctatcgctatctggagaacaaccagtaccgcgcaaggctggttctgggcaagatgctggagctggggagcatcaaccagtccgagtacgacgaggccatggccgaaattgatgatctggcctcccatctggaacggagcaccaatgaggccaggcccgccaccatctacaactggtatgatgagcaggtcatcaccgacgtgatgaacgacctcatagagaagtacggctactccgagcaggtggcctccgacatggtcacctccggcggactgaatatttacgcctgtgtggacccggagatccagtccatcgtggagtcggtctactccgaccgcagcaaccttcagctcaccagcaagtcggggcaggcgatccagtcggccatcgtaatcattgacccccagggcaacatcgttgggctggccggcgccctaggcgaaaagagcagcaaccggggctggaactacgccagccgctccctgcggcagccgggctcctccatcaagccgctgagcgtctatgcgcccgctctggagagcggggtgatcagtcctgcatccgcttttgacgactatccggtgcagctcctcagcggcaaggcctggccgctgaacaacccccagacctaccgggggaggatgaccgtagcggcggcgctggaggtgtcctccaacccggtggccgtgcgcaccctacagaacctgggtgtgaagaattccttccagttcatggaggagaagttccatatcgatctggaggacggccgcaccgtcaacggacaggtgatgaacgacctgggggccagccagctcgctctgggcggcctcaccgacggcgtgagtgtggtagacatggccgccgcctactccgtgttcccacgcaacggcctgtatgtggagccccgcacctacaccaaggtcacccgtgtgctggacgacggcacggaggaggttctgctggacaatacccagaatcagcccgaggcggttctctccgaggagaccacctggtatatcaacgacatgctgaaaaatgtggttacagggaaattcggcggggcaaccggcaccggggcccagctctcaggtatgacggtggccggcaagaccggcaccaccaactccaataacgataagtggtttgtgggctatactccctactataccgccgcggtctgggtgggctataacaacccggagcgcatcagctccagcaataacccggctgtgtccatgtggaagaaggtcatggcccccatccatgaggggctggagaacaagtccttcccggccgccggcagtgaacagaagagcgtcagcatctgcatggacagcggcctgcgggccactgaggcctgcctgaacgatcccagaggcagccgggcccgcaccttcaccttgttcagcgacgacgtgcccgccgaaacctgtagtctccacaaggaggtggaggtttgcaccggcagcccggtgctgggcggcgacggcacggcgattgagggcctgtatcatctggcgggagagttttgtccccggcaggccgacgagggcgcaggagtcacggagggcacggtcaagaccatcggcatcctggattacagccgggagagcgtgggcggggccgccgccaaggacagcagttacctctacagcttcctggaggcccaggggacctgtgacgtccacaccaccgcgccccagccccaggagccggaggagtatgatcccaacagctttgtgatcagtgatccctccacctggccgccggtcaacgaccccaggtacgagaattttgacccggagaacccggccacctggcccaacgcgggacagccgtctgagaccccgtctcccggggagagcggccagcccaatccacccgagaccagcacaagccccacaccgtctcccgtacccacgccggtggagacgcccccggacgagccctatatcccggcggatggtacgaaataaagaaacaaacagcccgcggcatgtgccgcgggctgtttgcttaaggtccgaacaggctgtgcaggaggccggaatcccagagctgccgggccagcacggcggccagtggggcgagaagcattccaagaactccgagcgcctgaaagcccacatacatgcagaccagggcagccaggggagggagccccacccgcgcccccaccagacggggctccagcaggcttcgcacgagagagataacggagtaaagcaccagcaggcccacgctcatccgcacgtcgccccccaacagggcgagcactgcccagggcagcagtacggtgcctgtaccgaagaccggcagggcgtccaccagagccacaagtccggccagaaggagggacagctccacccgcagcagcaggaaaccggcggcgagctcgccgaaggtgatcagcatcagcaggccctgggctttcagccagccgcccagcgcctccctcagaccgccggccacccggcccagccgtgtccgccacggcgggggaaggcggcggcgcaggccgtccagcagagcgggacggcctgcgctggtgaaataggtggccaaaactgtcgtaaagagaaaaagagcggcggcgggaagggccgaagccagccctgtcaccgccccggccagggcgtcataaaagcggttgggcagggcaatgctctgctccagaaggccctccagggcatcacgggccagggtttggaactgaacgggcagggcgatgaggaaccggtaggcccagcgctccagcccgtcggccagcgtgggcagcccggccagcagggtgggcaggcggcccaacagcagggacagttcgtagcctacccgccataccaccagcgccagccctcccagaacagcggcggtgagagccgcggtacacagtgcggcggcgccccgccggggcaggtgcaggcgctccatcagaaggcgtacggcgggctccagcagggcggcaaggctgaaggccagcaggaaggggagcagccaggggaggagaaagcgcagggccagccacaatccggccagggccagggcggcatagagcaggcggagcagaaagcgcaggtgtctgttttccggcaaaagacagcctcctctcctgaaaatcggtgagaatacacaaaaacggcatgggcggatcggcagaaatcggcagagttggcaggggctttgcccttgcggcgggcgggagggtgtgctacaatagaccacaaaggataaacaaatggctttctcacgtggacatatgggcgggaggtacatagaatgggtaagtcacccagttatttcatcgtggagtccagcgcactgccagagatttttctgaaggtggcggaggccaagcggctgttggaaaccggcgaggtggacacggtccacttggccacccggcgggtgggcatcagccgcagcgcattttataaatacaaggatgcggtgcggcccttcaatgacatgctgcatgggcggatcgtcacctttcagttcctgctcaaggacgaaccaggggtgttgtccgccgtcttgaatatctttgcccagacgggtgggaatattcttaccatcaaccagtccataccaagcaacggctgtgctgcggtgacggtgggggcggagacctcggggctgcgcatcgcgctggaggagttactgaaccaggccctggagatagagggagtcctgcgctgtgagattttggcgggctgacggcccggacaggaggaagacagaatggtgaacgtggcaattttagggtttggcgtggtgggctccggtgtggctgaagtgctggacaccaacgagcggcacatcgagggcaaggtggatgatctgatccgcctgaaatatattctggatgtgcgggatttcccagacagcccctttgcaggcaaggtggtgcacgatttttccgtgattgagcaggaccctgaggtgtccatcgtggtggaaaccatcggcggggccaaggtggcgctggatttcacccgccgggccctccaggcgggcaagagtgtcattacctccaacaaggagctggtggcggagcacggctgcgagctgctgcggctggcccaggagaagggtgtcagctatctgtttgaagccagtgtgggcggcggcatccccatcatccgccccctgaaccagtgcctggccgccaacgagatcgaggagatcaccggtatcctcaacggcacgaccaactatatcctcacccgtatgatccgggcggggctgagctttgacgacgctctgagggaggctcaggccaacggctacgccgagcaggaccccaccgccgacattgagggccacgacgcctgccggaagatctgcatcctggcctccctggctttcgggcggcatatttacccccggcaggtgcccacagagggcatcaccggcgtcaccctggccgacgtggcctatgccgactcctgtggaaagaagctcaagctgctggggcgggctattcgccggaccgacgggaaggtgtgcgcctatgtggccccacacctggtggaccgggagaaccccctctccggtgtggaggatgtattcaacgccatctccgtgcggggcaacgccatcggcgacgtgatgttctacggccggggggcgggcaagctgcccaccgcctccgccgtggtggccgacgtgatcgacgcggccaagcaccgggacgagaagaagcggatgttctgggccgagggcggggacgatacggcggtgccgcccgacgggctggagagccgctggtacctccgggggaccggggtacaggcggcggaggccgcctttccggacagtacccggctgagccgccccggagcgccggcggacgagttcgcgctggtcaccccgcccatgacccgggctgccctggaggcccggctgacgggtatgacgcccggctccatgttccgggtgctggactgagcgcatagaatgtcgcggaggagcgcgcctcctccgcgacggacggatattcctgatttagggggtacatataccaatgggactcatcgttcaaaaattcggcggcagctccgtcgcggatgccgaccgcatccgcaacgtggcccgcatcataaccgagacctaccgccggggccaccgggtcgtggcggtcctctccgcccagggcgacaccacggatgatctgattgccaaggccgcggagatcaaccccaacgcctccaagcgggagatggatatgctgctgtccaccggcgagcagatctcctgctccctgtgcgccatggccatcgaggccatgggctacccggtggtctccctgacgggctggcaggcgggcttccgtaccaactcctcctatggcgacgcccgcatcaagcgcatcgatacggagcgggtgctggccgagctggacaagaacaccattgtcatcgtcaccggcttccagggcctcaacaagtatgaggatatcaccaccctgggccggggcggctccgatacctcggcggtggccctggccgctgtgctccacgcggatctctgccagatttataccgacgtggacggcgtctacaccgcagatccccgccacgtcaaaggggcgcggaagctggaggagatcacctacgacgagatgctggagctggccaccctgggcgcccaggtgctccacaaccgttcggtggagatggccaagcgctacggcgtcaacctggaggtcctctccagcttttccggcaagcccggcaccaaagtcaaggaggttgcaaaaaccatggaaaaactgcacgtcagcggcgtagcctgcgataaaaatgtggcccgtgtggccgtggtggggctggccgacgagccgggcatcgctttcaagatcttctccctgctggccaaggagcggatcaatgtggacctcatactccagtccatcggccgcaataatactaaggatatcagcttcaccgtgagcattcaggatgtggagcgctgcaagcagctcctggatgagcacagggatttccttcagttcgaccatgtggatgtcaacgacaaaattgccaaggtctccatcgtgggagcgggcatggtccacaaccccggcgtggcggccaaaatgtttgaggccctgtacaatgcgggcatcaatatcagcatgatctccaccagcgagatcaaggtgtccgtcctggtggatatcaacgaggccgaccgggcagtgcaggtcatccacgaccgcttcttccacgagttcggcggtaactaaaaatacaaaggcggcggcggtcccatgtgggaccgccgccgaggctgtcgataacccctcctgccgaaggattcggagggaaggatagtgtgaaagggaaccgtcagggttccctttcgcgttggatcaaacaacttttgaaacttttctgaagtttcaaaagttcaacagcctgtcgaaaaggtcttttcgacaggctgagcggcgccggttccatatgggaaccggcgccgcctcttgtatctatcaggcgttgaatacatacttgtccaggcgggcgaaggcctcctgaacacgggagagggggagggcaagattcatgcggatgtggcaagggccgtgaaaacggcggccatcctgccaagctacccctacatcagagccagccttttgcagctcttcaatggtcttcccatgtgcttcacaccatttggtgcagtcgaggaaaagcatataagtgccctgaggcttggtgacctgaatacctttgtattgctcccaaatgtgttcgcaggcgaagtccacattattcgcgagtacctggttcaactcatccacccactcgtagccctccggcttgtaggcgccgatcagggcgtgcatggaaagtacgtttatctcgttgtagtggcacaaggagctctccttatccacccgatctcggagccacttgctgtagatgatgtggtaagacccgatcaggcccgccagattgaacgtcttggagggagcatagagggccactgtgtgctccttggcgtagctgttgaccatctgtgtggggatgtgcttctgaccggggcggatgatatcagaccagatctcgtccgagataacatagacaccatgccgctggaagatctccatggccttctccagctcccaacgctcccagacccggcctgtggggttgtggggggagcagaatagtgcggtgtgaatgtggttggccacgatcttcttctccatgtcctcgaagtccatgcgccaaatgccttgctcgtcctgaaccagtggagagaggacgatggaatacccggcattggtcagacaggatgtaaagccgctgtaggtgggggagtgaaccagcacgttgtcacccctggagcagagtacattgagtgcgctgaccacaccacccagcacgccgttttcatagccgatgtgctccttggttaggccagtgacaccgttgcgcttctcgtgccactggacgatggaatcatagtatttgtcggtgggaaagaagtacccgaaggaagggtgctgagcccgggcgataatcgcctctgtgatggtggggaccacagggaagttcatatctgccacccacatggggattatatcaaagccttcctttggccttgcgggcgcaatgacatgggcacccacattgtcataggccgctgcatcctttccgcggcggtccaatatgctggtgaaatcatacttcattttgtaatcctccttcgtcttttttacgaccgatgccagtcaaaattgcggcccagtatactacaatcaggccaatacagaaaaagttgtagggaataaaattcaacatggtaaagtcatcgcccacaacaccggttcccattgcaaccgccagtgcggtcaaggtgttgacgccgtggggaaccatccaggagatgccgctggcaaagcccgcgatatagttggcggcgcgggttcgggcaatatggaagggcttcatgatgttgcggacgatggggctgataaaggcgatcgtggacataccgctgccaatgatcgcacagaaaatacaggtgaacaccccggaaaccgtttccgccattctgggggtcttggcgtgtctgaccataaaggtctggaaactgtccagcacgcccacctcctcagtcagtgcgagtactacgaagatcagggccataaagactaaaacatccatcaggctgagggtaccggaggccaataggccgtcagcggcaaagatgctcgccacgtccgaatagcccaggatcagcaacaggatgatgcccagcagatcgcctaccacaagggctaccaagaagtttgtcttgcgcaggatgagtacggccaccaggatgggaatgatgataaagataaggcccagggaggaggaactgtccacacttagggaggccagatcaacccccttggttgttgcaagaccaaatacaaagaacaggatgagggcgggtatccctgcggccagactgtaccagacacgggtgcgcaccgcggcgatgatatccacctcctgtccgatggaggaggtgatggtcacgtcggaaatgggggagaggttattaccgaactcggagccggaacagatggcacccaggactaggccggcgggacagcccatctgcacacccattgggaacagcatgggcatcgtggccaagagggcggccgccgagctgcccgtcacagtggacattaccgcacacagtacgaaggtcacgcaggggataatggcaggtgggatattgaccagactcacaagatagaccaggccatccaccaggtgggcggccgttaggatctgtgacaggataccggccgcaatgaaaatgggaaatagcatggtgaaggacggattagcaaagcctttcataactgctttcgcatagcggtttttatccttaaacacgagcagaccaatgaccatggccatgaagcctgctccccagaagtttcgtagggaactcattccggtaaagcagaggacaacgattgctgcgatcattcccagcagtggaagtatcccgccgaccttccctccataggtttctgcgtactttttttcagcttccatttgacatctccctctcttggtgatttgctaatttcttaataattaagcatctttataatatgacaaataagaaataagtcaagaaaatttttatatattttagatacttctttatagtgaataaatatttggcttttgttttgtggattatccacaacaaagaagccgggcggtcatacccccggcttcttttgtgtctatcctaaataatcccggctccgcctcacatcatcctgatatgcctcgttcagtttccgctgtaccatcagatggtgttccaactcctcgggagaaaaattgctcaacaattgaaaggtggcctcctgacaggactggttgaaagctgtgtgcgcctggtagacctgtttgccgctctcggtcaggtatagattataaatccggttgttctctgcgttgcgtacctgctccacccagcccttggcccgcagcttgcgcacgatctgggagcaggcgctgggagtctttttcagaatggcggccagctcggtgacggtaatctccgggtgctcaccgatgaggtcgatgatatgggcctccgactgatagagaatgtgagccccgtaacggtggggaagggagtcgtattcatacatcaggtcataggcctcgtcctgggccgcccagatttgcccgagcagggcctcccgctgctgttccattgtccgcgtcctcttttctgtcaaactgttcctattatagctggtttaggccggggatgcaagacgggacgggcgttcatttgccgtcgtggctgacggcccggttgatggcggagaggatgcccttgaggggggccaggttgatgttatggctcatgcctacgccgaaccagtccctgccgttctcgtcctggaggtggatgtaggccacagcctgggagtcagagccctgcttgacggcgtgctccttgtagtcgatgaaggtgaagcggtccatcttctggccgtggatggcgttgaagaaggcgtcaatggggccgttgccggagccctgaacctggaacacggtgtcggtgtggcggatggtgccggcgaaggtgacgtgggagtggccctcctcgtcggtaaactcggcgaaggagtgctgcaccagctgatagggctttaccgcgtcgatgtaatgggccttgaacaggtcgtaaatggcgtcgggcttcagctccttgcccacccggtcggtctccacctggacgatgtggccgaactcggggtgcatggccttggggagatcgaagccgaaggagtgctgcatgacgaaggcggagccgcccttgcccgactgggagttgatgcggatgatgggctcgtactggcggcccacgtcggcgggatcgatgggcagatagggcacctcccagtactcggtgccgctctcctccatgtagcgggtacccttattgatggcgtcctggtgggagccggagaaggcggtgaacaccagctcgcccacatagggctgccgctcgccgatcttcatcttggtgacccgctcgtacacgtcgcggattttattgatgtcggagaagtccagcttggggtccacgccctgggtgtagaggttgagggccagggtcaccatgtccacgttgccggtgcgctcgccgttgccgaacagggtggcctccacccgctcggccccggccagcaggcccagttcagcggtagccacgccctcgccccggtcgttgtgggggtgcagggagataatggcgcggtcccggccgggcagcctggagataaagtactcaatttcgtcagcgaagtagttgggcatacagttctccacggtggtggggaggttgaggatcaccttgcgctccggcgtggcaccgatggcctcgatcaccgcctggcagatctctacggcggcgtccatctcggtgcccatgaaggactccggggagtactcgtaccgcagatccatccccgcgtcgagggcgggctggctcagctcccggatgagccgggcggcgtccacggcgatcttttttacgccctccacgtcggtgtggaagaccaccttctgctggagggtggaggtggagttgtagaagtggaagatcacatgcttggccccgtcaatggcctcgaaggtgcggcggatgaggtgctctctggcctgtaccagcacctgaatggtcacgtcgtcggggatgtgtccaccctcgatcagggtgcggatgaactcgtactccgtctcggaggcggaggggaaccccacctcgatctccttgacgccgatgtccaccagggtgtgaaacagctccagcttctcccggacgttcatggggtcaatgagggcctggttgccgtcccgcagatccaccgagcaccagacggggggcgctttcagctccctgtcgggccaggcgcggcgggccatcttgagggggacgaaggggatgtacttctcgtgtgcgggcttcataacaattcctcctgtttactggggccagggtacgaaaaaacgcccctgaccaaattcctggtcaggggcgtaaaatttacgcggtaccaccctgcttccgcccattgtcaccaaggggcgctcatggcctccaacaaggccgcggccggtaacgtggccgtgacggcccgccctactgcctggggttcggacgggcggctccgggctcagtatccgcgcgcttccccgcgccggttcgcaccgaccaccggttctctgagcgggacgggacgcgccttcttcccatcattgcctgtttgggatgtaattgcacttattttagccggggaaagggaatttgtcaagaggcagtttccgtgccggggagggagggctccagcgcgatggagcggcagcttccgtcctgccaggagccccaggggtagcagtccggggggtggttgccgtacaggctggaggtgtagccccccaggtattccaggccgtcggcggtgtagactgccaggaaatattccgatttcgtgctcggacaagggccagtgatggccagccgggttccgtcatagcacaggctgagcctggaggaaggggtgctcagggggcagcccagggaggactggagggaggtgtccgccgtaaagtccaccacccatgcgccgctccgacggttgagcacggccagaaagtcgcccgcggacaggaggcagaaagagccgtcagactgtgggaacacctgtgggtggggcgcgccctccgccgcgggaaagagctcctgggtggcaacaggggtgagtgtgtctacgtccagcagggtgagaagaaacgcgcccttctcctcggtgagaagaaagagggtaccgtccccatccgaccagaaggccatggcccggcctccgttggggatggagtagacggtctccaggtcgccgccgggggagaggcggtagatcccccagccgccgggaattccgctgccgtccagagccttggccatggagccgccggcgcagagggcaaacaggacgccttccccggtgctcacgcagtccgcctgaagggtgagcaggctgctgtccaatgtgagaaagcaggcgctcagcaactggccggaggcgtccggggtcatgctgatctccatggcaagcccttcgggcaccggaatgggaaaataggcgcgaaaacggcgggtcagctcctccgcgttgatggaggtatcgtactgggaagttccaaactcacggtcagccgcccaggctgtgtacacgagacgatccacagagagggggaaatcggtcagataatcggccagttggatctcacgtttaatactgatgagaccattgtgttcggtataggtctcgtctccgggcaggggagaggtctgggcggagagctccgcccacagcgcccgcagcccggcggagggactgtccggcgcaatatccaggaaattcaggccgggagagagctccagcacatcctcgtccagctcaatgatccagctctgcttctggccggagtaggaaaagcgggtttcggcctcctccggcgcggcggcgggaaaggtgctgtgccagaacaggtgatagccgcaggtggacacccaggtgagctccacaccgtcggcggccgtgggatctccggccagtggctccgtccggtaggataccgtctcccggcggccctgcacggcggcgcaggcccccgccagcaggccggcggacagagcgaccaggaggagaaagagcagcagagatttccgcatggctattcctcccctctgccgtccatccgctccagcgcctggagcacccggccgggctcatagccgcaggccgaccggacatagtccatcaggctctggctccgctcctccagcgcggcggtggtcacgtccccggcaatccgccccgaccggaggagcaccgcccggctgatgaagtgctgcacctcctccagcagatgggtggacaggaggatggtctcggtgggctccaggatgcccagcagtaccttgtagaaatcctcgcggttgaacacgtcgttgccggcaaagggctcgtccataagaatgtagtccgccccctggcacagggccagaatcacctcaaactggttcttctgtccggtggagaagccgcgcagggcccgcttttccggcaggcggaagaagtccatcagcatctggaagcggccggcccggaaggcggggaagtgttcggcgcagaagtcccggtgcccggcggcagtgaggccggggaagaaggaatgctcacaggtggcgaaggagaggcgggcgatgtttttgggggtgatgggctgcccgtccagagtaaccgacccgaacccgtaccggagcaggcccagaatgcacttgagcagggtggtcttgcccgcgccgttggggccgaagatacccacgatctccccgggccccacagacaggctcacatcctccagggcctgctgacagccccggtactttttggatacatggctcacttcaagcatggttgcctccaatccagcccagcggcaggcctccccagggctccgggggcaggtggcccgcaggtgtcaggtggtaatagcacagtgcgcacagcaggatgacggcggccgtcagtgccgcgcccagcagcagggccagggcgggggcggacaggcagcgccgccacagctctccgaactgggggagcagccgcatccggtagatgctccggccgccctggtagtggcagagaaaatggtagacggccaccccggccagggagagggccagcgccagaaaacagagcagcagcccatagagcaggtgggggaaggggggcatcagggtgccgggcaggagcacccgcaccatcgcgccgtccggccccacggtgccgttgtagccgtagagggcccggcgggccgggaggtactggcacaggaagagcaccagtccggcgccggcggacaggagaaggcccgtccaaagcagaaaccgctcctgcttccaggggatgccgaggggaaaccaggactcattcttcatagggatccctcctcaaaatctggcagagggaggcggccagggcgcacaggctgacaaaaagcaggacgggccccaggacggagggcagaccgtccgcggagtagaaaatgccgtcgtagagataggggcggaggaactccgccggcccgccaaattcaaaggagcccatggacaggggaaagcagagggcggagagcgccgccaggggcagaacggcgaaggcccggcggcccatgcgtcgttggaaggagaaacaggccgccgacgtccccagggcggcgcacatggacaggttgcgcgcccagagaggccagtcatccaggggcagcaggctgtggagataggggtcgcggtagcaggccaggaacagagcctgggggccggagaactccggtgccagacgggggagggcggcggcgcagagagccagcagggtgcccaggtgggccgcccagaagaacaacaggcagaaaaagccgtagccggcccacagcagggtgagggccctgtgccccactgacagtcgccgcagggtatagctcacccgggaggaaccctcccaccccagaaaggccagcacggcgcacaccagcaccagcccgatacggaagcaccaggacaggggatattgcatcagcaggccctccaggcccatggggttggagtattcgtagtaagcggtgcggacggtgtcctgccagccggacagggcagccaggaagagccccgcctccgtcagacaggaggccagagtaatccccgcagctttccagagggtgctccgcgcggccagcatgagcagggatgcgatacgcttcatggcttctcctcctccagttccgggctgtcccacagccggtcgatgagcgcctccgcctctggtcgggtgaggcccatctgccgcagggagcggaccagggcggcggcctcccgctccatcaggcgggtgcggacggcggccacagccgcctcgtccagggtaaattcgctcttggcccccgagcgggaggtgatgagccccgcctcctccagcatacggcaggccttctgcacggtgttggggttgacccccagctgggcggagagcacccgtcgggagggaagcccgtctccgtcccggatggttccggccgcgatgccctgctccagatagcggatgatctgctggtagatggggcttccgtcctccaggcggaagccggagaaggaaagcatggccggacacccccctttgcatactgtattatgggactagtacagtttataactgtattatataagtaatacggatgtaagtcaagatggaactgcgtcttcttccagggcttccgctgtggcggacaaaaaagaaataccgtgggcggaatacgccaggccgcggtgtccactctgttttctgtcgtggctggtgtggacgacatcatcttggatgagggcaccggctgtggccaaaagagagcgcctccgcccatcgggcggaggcgctctgggttaaggcgcggtctgtactgggtcgaggaggaaaaactgggtaccgtcgcttccggccaccagagcgcccagggggagctccccttcggcctcactggccaccgccgccaccgcatcttccagatcgctggtgaactggagggaggtgtcgccgtagtccacctggagggagagcgtctgtgcggcggcgtcggtctccactaccgtcacctgggcgtcccccagggggaataccgaaccggcctccgggacggcgggggagaggccctgggcctcggtgtagcgccggaaatccgcaaataccgggctgccggcatcctccaccggggagagtacctgccccacggcgcaggtgtaaagggggccggaaaggccgcccatatgggtctcatccgcagacgtacacaccacataatcgaggtaggtgatcccctgctggctcaggtaaccggccacctggctgccccgctcggcgctgccgccgtcaatgagcatggcctgtccgccgcacaggagcagggcggagctggtctgccccgggtcgatgaagtggatggacagtccggcgctgtctccggcggctgtgctttggcagccggacagggcggcggccaggagaaggacggcgaggatcgggaatgtgcgctgtttcataaaggctccttcaaaatgagatagcgccttaggataccatattttttcccatttgccaagagcttttgtcccagcggctgcacagagaggcggctcagccgggattgaactgatagccgagcccggcaacggtgcggataaagtcgtgcccgcccgcatgggggcggagccgcctccggatctgaaacacggtgttctccacggcgtggaggcagtggttggacggcgcgcgccaaacggcctcatagatctgctcttttgtgatcggaacgtccgggtgggtatagagcaggtagaggacaccaaactccttttcagacagggggattgcctgcatccctaccaccgcccgtcgtcctgcgggctccatggacagccggggggagccgggggaaatcccccaaaaggactgggcggagaggcaatccagccggagctgtgccgacagcaggggaaggttgtcaaagggctgacagcggcggagcctttggcggaggcgcagctccaccgcctccccgcagggcgcttccccaccgtgaaagaagagaagctcaatggagggcgcgccgccgccgggcgcgatatgcgccagcccgcagaggcggcgaccgcccagaaggatctccgcggcgtagacgccgggttccggcgccgcctgtccccggtgcaggcgcaggcccgcggcgggcagccccgccagccgtcccagcccggcgccgggcacggcggttccgtacagggggatgaagggggcgtccccgtttgccttgtccatgggccgcctcagagaagtccgtttctggccaggagaatgaggacgcaggtggccaccagaacggcggccagaagcagcagcccgacgggcctgcgcgccgccggtccggacggcgcgtcaatcagtccgcttttccgcagagaggagaccactggcttgtagagcaggaaggtgatgcccgaattgagtccgctcttgagcagattgaaggggagaaaggcggggagcagcagctccgcaaccgcctcccgggggtatcccatgtagaggggcgtaatgaggtaattccacagcagcatggcgctgaccatcaccgcgcatccggcggccaacccggcgacagccccggccagcgtgcgctttttccggtagatggcggaggcggtacaggcaaaggcgcaggtggacagaatgttcatgatacagcccagaatgcccgtgtcgctgacagtgaacatctccagaacggagacgagaaccgagacaaggcaggcggtcatcggcccccagatcaggccgccgagggtgatgaccacatccttcgggtcgtacttcaaaaagagcacgaccggcacgcggccgacggccatgaccacataggcgagcgcgcacagcatggcgatggtggtaatcctctttgctttgacattcatacttccgttccctcctaaaaaatcacaccgaaaaggggatgcctttccggtgcgaaaaagaggaatcggtcgcagaacggcggggccgtcctgcggaaaccgatggtatcttctttcatccagactgtcactgttggttttggaattgcaccaaatcatgcgtatcacgcgcgcggactgtaccgccaatcgggaatttcaccctgccctgaagacatctcgattcagttgtgcccccagtatacggcatccccgagcggttggcaatccccgcgggacatttcggaagcaattcggaaacaggccccggccggagggggctttctttttttcacagattccgctatactgggagataacttgacaaaagcgagggacgttcatgctgctttctgtggaacaagtgaccaagagctacggcgaccgtgtcctgctggacggggtgtccttttatctggagcggggggacaaggtggggatcatcggcgtcaacggcgccggcaagtccaccctcctccgcctgctggcgggggcggaggagccggacggggggacggtacgcctggatcccggcgtgcggatggagtacctgccacagaacccggtgtttcagggggagcgcaccgtgctggagcaggtgctgctggggctgaacgacgccgaccgctccctggcggagtatgaggccagaaccatcctcaaccgtctgggagtatcccgcttcgagcagagcgtggggaacctctccggcggggagcgccgccgggtggccctggcggcggtgctggcccgcccctgcgacgtgctgattctggacgagccaaccaaccacctggacaacgacatggtgctctggctggaggactatctgcgcgcctggaagggggcgctggtcatggtgacccacgaccggtatttcctggagcgcatcgtgggccgcatggcggaggtggaggacggccgcctgttcacctacgagggcaactacgacaagtatctggagcgcaaggccgcccggctggagagcgagcgggccagcgagcgcaagcggcaggccatcctgcggcgggagtaccagtgggtgatgcaggggcccaccgcccggggaaccaagagcagggagcggctggagcgctacgaggccctgaaggcccagagcggcccggcggaaaaaagtaccttggaactaaacgcgcgggccagccgtctaggtaagaagaccatcgagtgcacaggcgtgaccaagggcttcggcggacgcaccgtggtgcgggacttcgactgcatgctcctgcgggacgaccgcatcggcattgtgggggccaacggcagcggcaagtctaccctcctcaacctgctggccggggagctggcccccgacgccggggcggtcgagacgggggagaccgtccgcatcggctacttccgccaggaggtgcccgatatggacggggatacccgggtgatcgactatgtgaaggagatcggcagccgcatcgagacgggagcggggatgctcaccgcctcccaactgctggagcagttcctctttccggcagaggcgcagtggagccccatccgcaagctgtccggcggtgagaagcggcggctcttcctgctgtccgtcctggccgccgcccccaacgtgctgctgctggacgagccgaccaacgatctggatattcagaccctcagcgtgctggaggactatctggactccttccccggcgcggtggtggcggtgtcccacgaccgctatttcctggaccgggtggtgcggcgggtgttcgccgtggagggggacggaagcgtccggggttatcccggcgggtatacggagtatctggaggcccggcgggccgctggacagccggccagatcccccaagcccgccgaacccaaggcagcgcgcccccagggggccaaaaagttgaaattcagctacaaggagcagcgggaatttgagaccattgacgccgacatcgccgccctggaggccgagctggcccaggtgcaggccgagcaggaggagaaggccaccgactatgtggccctccagtccctccaggagcggcaggctgagctggaggcagccctggaggagaaaatggagcgctgggtctacctgaacgacctggcggagcagatttccaatcagtagggggcgcagggcgcgcccgccattccgagagcagattcacgagaccaaattcaaaggagcgacctcatgacaaaattctggaaacccctgttggcaattgcactcatctgcgcgctggcgctggcggggctgggactggcggcgcagtctcccgcggcggcggcccaagcggagcgggcggacgagttccgggctgtttgggtggccacggtgtaccgcctggactaccccagtcaggccactacagatccagcggtcctcaagcgggacgccgacgcgattttacagggatgtgtggacatgggcatgaacgccgtgattctccaggtgcggccctccgccgacgccctctatccctccgagctgtacccgtggagcaaatacctcaccggcgcacaggggaccgccccgaaaaacggatttgatccgctggcctactgggtggagcgggcccacgccctggggctggagctccacgcctgggtcaatcccttccgcatcaccaaggggggcgcggcggagttccaggccctgaccgccgaccaccccgcaaagctccaccccgactgggtggtggagtatgagggcgactactacttcaatcccggcctgcccgaggtgcgggagtacatcgtgcggggggcggaggagctggcccgcaagtatgacatcgacggcattcacctggacgactacttctaccccggcagcggctttgccgacggggccgcctatgccaagtacggcaagggcttttccaacatcggcgactggcgccgggacaatgtcaaccagctggtcaagacactgggggagcgcatccacgccattgatccggggctgtcctacggcatcagcccctccggcgtgtgggcggataagagcagcctgccccagggctccaataccaccggcggctatgagagctactacgcctcctacgccgacagccggaaatgggtcaaggaggggtggatcgactacatctgcccccagatctactggtacatcggccacaagagcatggactacgccacggtggcccgctggtgggcggatacggtaaagggtacaggtgtttccctttacataggaatggccgactatctggccggcaacagcgatcccaagagcccctggtacggcacgacagccatcgagcgacaactggccctcaacgacaccctgccccaggtcgcgggggaggcgcacttccgctaccggctgatggcggaaaacccggagctgctggcgctctatgcggaggcctatggcgaggagtcgcaggagccggcggagccggcctatctgaacaccagggagcacgacgcctacatccagggaaatgacggccggttccgcccggaggactccctgagccgggccgaggcggtggccatgctggcccgcctcagtgtagacgagcaagggaatctgctttacagcggagcgcctggtaccggcggcttttccgatgtgaagcggggggactggtacgccccctatgtggcctttgccaagcgctacggcatcgcaaatggctatctcgacggcaccttccggccggagcagccggtgagccgggccgagctggtcaagctgatcgcctcctattttacggtggagggcggtacgtccccgttccccgatgtgccggacggccactgggcggcggaggtggtctcttttgcggcggaggagggctgggtgtcgggctatccggacggcaccttccggcccgacgcgccggtgagccgggcggaggcggtcaagatcctcaaccatgccctggatcgccgggcgggggagcgggccgcggccctgccctttaccgacgtggagaagggccactgggcctgcgatgagatccgggaggcggcggtctcccacatctaccgcaagagcggcgagggagagacgtggctgacctatgagcggtaatacagggagggcgcgctgcggcgcgccctccctgctatttgcgccgcagcaggcggcgcacagggctgtcgggatcggacagcccccggagaaaggccagcggattggcacagaacagggcggcgcaggccgccagccgccggaaaaaggactgcataaaaatcacgctccccggcccagtatagggcggggagcgtgtcgcatccggtcgctttatgccgcgggcgcagctttgcgccaggtatagagcagaacggccaaggccacggtgacggggacggccaggacgatgccgaagctgccggacaggccctgcatgatggcgatgccgatgttgttggagttgatgatctgccggtaggggaggttataggcgtaatccagcaccagcatggagatgcttccgccggcaaaggcgagaatcagggtgttggagtcggtacccatcatgtcccgccccacgtgcatcccggcccggaacagcgcccggcgggagagggcggggttctgaacgtgaatttcggcgatggcgctggcgatggacatggccacatccatcaccgcgcccaggctggagatcagcaggccggagaagagcaggccgcccacctgaatcccgctggtgctggccagggtgagcaggctctcgatgtccgacacgttccagcccgtgatgccggtggccaggctgaacagggtggccgccagtccggcaatcaccacgcccgccaccgtgccgccggcggccaccacggttttccgggtggggccgccgatgaggtacatcgtgaccagcgtggtgacgatacagatgagcaccgccacccagaagggcgaccaaccgcggtagaccaggggcagatagacaaatagaatgcagaagaaggtgaacaccaggccgagggcgcccttgaggccctgctttccgcccaccaggcagagcaccagcagataggctgcggcgaaggcgtagatcacccactcccgatcctgggaatagatgctggtgatggtggagtcccccgccacgctctgcatgaccaccaccttcatgcccacggtgcagcccgcgccgaagaggaagccggaggcgctggtggtctccagctcctgaccggcccggacgccggtggtcatgcgtaccagtacccgctgttcgcccacccgggagccgtcgggcatgaggttgtcctggagaatgtccacgaccacgcccttctcgaaggtctgtccttcccggttgaccagggccaccttgtccacccggttgagggcgaaaacagcggcgagaaatgcagccagcagcaacagcggaatgccccagcgcagaaagcaggatttgatattcaacagcagtcagcctttctctcagaatggaggctcccggcagctatgccgccgggagcctcgcagtatcggtgccggatggggccgctcaggcggccggagtcacgcccagagtgccatagaaggaggcgggcaggtagtagctcccgttggccagaacggcgggggtggtgacgctcttgccgtccacggtcagggtgagggtcacggcgctgccgctggcaggggtgccggcgggcacggcgtcggcgtaggccgcgccggtggtaatcaccacgccgttgtcccagctcacattgaactggttgtcctggccggagaccgcggcggccacgtcccgcaggcggtagtaggtctcgccgccctcagtcagggtggcggcgccgtcggtcttctggatggtgaaggtgtcgtcaatcgcctccaccttgccttcggcagtgatctggtaggtggtgatggagaagctgtcgctgtccatgtcgatgactgagtagctgggcagccagttctggctgcgctcggcgatatagtcctgctgggtggggatcagctcgtagaatttggagccggaggccgagttggcggtcatgtaaagggtgcccttgggattgaccacggtgtttccggtggtgtcctcgatggtgtagcagccgttgtccgcctggaaggcgtcgtggagggccgtgctggcggtgtcgccctcctcggggtacagggggattttctcgtcggtctgggtgttgaaggcgttgtcccagtcgtagtcgctgccgtccgcattcagacggaactcataggtgccgtgggtctggccgtcgccgtagaggagcttggagcggctgtaggtgtggtcgtggccctggagcaccacatcgatgtcgtatttgtcaaagatgggggtgagctgtgtgcggaggatcatgccgtcggtgtcggagtgatccagaccggtgccgtagatatcctggtggatggtgaccacgcgccaggcggcgtcgggagcagaggcaatggcctcctggatggtcttctcgtgctcggctacattgtaattgttggtgttgagcacgataaacaggccggcgccgtaagagtagtagtagtcgccgccggcctgggtcttgccgttctcggtggcgttggggttgttgaagtggtaggtgtagtcggggttcagggagtcgtggttgccgatggtggtggccacgggcagcccggccagcacggcgggggagaggtagcccgcgtactcctcctccttggcctggccggtcttattgacctggtcgccggcggagatgatgaagttgacgccggggttctgggcagtggcgatctccagggtgcggttccaggcgaaggcgtcgttgcgggcggcggtgttggccgcgccggagccggccgtcagggcctcgccgttctggggctgacccttggaggcgccgatctgggggtcgcctacatagagcatctttacggagtcgaagctgccggtcttgtactcctgtacctcgctctgtacgccgttcttctccacggtatagtaataggtggtgttggcctccagcccggtgacggtgacatggttatagtcgtaggccacgccgtcggtcaggctgtcgtccacctgggcggccttgccagtgaaggcggtcaggtggtccttgtcggtgccgaagtgaaccaccggcgtggcggccttgccgctctccgtcttgctgtaccaggcgaagttgagctgggtctcgtctgcgccgggggtgagggataccttggtgtagtcggcggctacggtctcccactccttgacccagtcctgccaggcggcagagcctccggtgacgctgctgtcgttataattggccgtggcggccagggccatggggccggcgctcaggaccagcgcgccggtgaggacgccggccaggaccttgttgcgtttctgcatgctttcctacttcctttgcagtttggttttggttccatggaaccagggggcagtatagcacccgccgcgccaagctacaaggcacctttccaaagctttcccgaacctttaccggggctttacgtttctgctccccgtgcagcggataaaaagaagggagcggtgtgcctcccttactcgcggcgcagcttctgttcggcgacagcgaccgtctgctcgtagcggtcaattttggagttaaggcgctccagcgtttgccgcatctcctccatccgctccagcagcagctcccgctgctcaatgaggatctgtttgcgggcctcggtggtatcctccccctgctgaaacagggaaacatactcgatcagagcctccacctggataccggctccccgcatacacttggcaaactccacccaggcgcagtcctccacggtataatcccggatgccgctcttgctgcggtgaacggtgggaatcaggccgatgcgctcgtaataccgcagggtatcggctgagaggttgtatttacggctgacttcggcaatggtcataaggtcatctgctccttccggcgggctggctcccgctgtttgttcgattttatcacctggactccgctccaagtcaaggctgagtttggaaaaaaagcagaaaaatattgcaggcggcagttgacaatgtgcgaaaagtgtggtatcatcttttttgcatttggccggagaccggacgtggagagatgtccgagtggttgaaggaaccggtcttgaaaaccggcgatgtggaagcatccgtgggttcgaatcccactctctccgccacatttttttcaaatgtatcctgtatttggcatgcagaagtacccaagtggccgaaggggctcccctgctaagggagtagggcgggaaaccgtcgcgagggttcaaatccctccttctgcgccaaatcccgaagtctttaccggtaaagacttcgggattttttattcccgcaaatctttggcgctgatattgggggggccgtacccgccggcgaaaactccatactctatcgcgtcggccatttggcggaggagagtgacggatcagccaaaattaatatgtgaattttgtgtaaagtttataattgacggcttgcattttcccccaagagcgtatatactaaaattatcaatcaaagaaaggaggctggtacagtatggtatggtacaacagcatcggcgcttccgacgtggatgacctcatctttggcagcgacgaccaggtgatttacagcgagcggtaaagggtcctgaggcagaaaccacacctattggtgtgggttttttgtttttataaagaaatcttaaggaatttcctctggcatagagagccaaaacgtggtagcctatagacaattcgattggtgaggcgacagaccgacatgaaacgacataaatggctgctgaccctgctcctggctgtgttcctgttgggcggcggggcgttcctgctttggcagacgggctttttttcctccgttggctcgttggaggagatgcgaaattatatagaacgctttgcgccctattcccacctgttctttttcctgattcaactgctctcggtggtgatcgcacccattcccagcaacgtgacggcgctggctggggcggtgctctttggaatgtggccctcattcctgatgacctggttggcagtggcgggcggttccgtccttgtgttctggctggcccgtgtactggggcagcggtttgtggagcggctggtcaaccaacgggtggcggacaagtacctggaggttatacgcaggaagcgggatatctttttgatccttgtctttctctttccctttttcccggacgacctgatctgcattctggcggggctgaccgacatcccgctgcaccgctttttcctgatcgtactgctcacacggccctggggccttctggtggcctgtgcgttgggcggctcggtgctcacaattcccgtgtgggcgatgcttctgctgggagccgccggagtggccgtcttcgccgtctgcctgaaatatggagaccgttgggaggccgcgcttctggagcggttcaagcggtaaatacaccggacggcgggccgtgcttcttgtcaagcgcggcccgccgttgtataatgcttttcatatgggaggggggacgggatttggcggggcgcataaaggccggatgcttcctcggggcggaagcggcgctttatctcggatttctggcgctggatctgctccggccggggagcggctgggccctcctgctgaaatacggggcggtggctctgtgcttcttggcggccttggaccgggccggaacggaggacgggcgcctagtgtgcgccgcgctggcctttacgctggcagcggattggtttctcctgatccttgattccttctacctggcgggggtggcctgcttctgtgtggtacaggcgatttacctgctgcgcctgcaccgctggggcgctggcctgctgtggccgctgcgcgtggggctgacggttgcggccctggcggttgcggcgctcctgagggcgctggagccgctgacggctgtgaccctttgttatttcgcggagctggcctgcaacacggtgtccgccctgcgtctgaggcgacgggggcggtgcttcgggctggggctgctgctctttgtgggctgtgacctctgcgtgggcctgcacaatctggcggccttcctgccggtggtcgataccggaccgctcttttcctttgcccaggtgggcatgtggctcttttacctgccctctcaggtgctgataaccctttctgtgagaaagaagtgactgtaaatgcgttcctccaaactggccacagcggctttgacggtcattctggccctgctggtgctcagcgcatccattgcggtgccgatcctgttccggcccttttactatatacagatcgatgccctccgcctgcctgagcgtaccggatggccggaggaggtcatacgggaggcctacgacgaggtgctggacttctgcgttctcggaacgccctttgggaccggggagctgtcctggtcggagtcggggcggagccactttgcagatgtccgggtgctctttcgggcggactttttagttttgggcgtcacggctgtgtctgcggcgttgctcctcctcctgaggcggctgcaccggctggagttttaccgcccagtgggccgaggaccggggttttgggcgggggtgctggccgccggtctggtactggcggtgggcgctctggcggcgctggacttcagccgggcctttaccgtctttcatgcggtcttttttcccggcaaagacaactggctgtttaatcctgccacggatgaaatcattctgatcatgccggagcgctttttcctcaactgcgccctcctgatcggggcggtactgctgtccgcctgcggagcgctgattgcaggggatctgctgtctgcccacagaagaaagaagaagacagtgttgccgcgctgagtgtcacggctttgggacccgggccatagaatggcctgggtccctttttcattccggcccgccgctccgcctccgcaccaaatgggcggtggttcatagaatagagcggggaaggaagggccttttgaatactctgctaggaggtattgcaatgcctgagaaggtcatgcccggtccggtgcaggatactgcctgtatccgcgaggccgtgtgcatacacacgaagaagatctatgattcttgcaaagacaaggattgtatcgaggatttgcgcttttaccccacccagaactgccaggcggtgatcgaccgcgccatcagcatcaaggcgggcaaggcggagctgctgtacgtgtacattgatgtggaacccatcggctttaaccggggcttctacactgtggatgtccgctactactaccgcgtgactgcggacgcgttcatcggcgcggcccggcctgtggaggtctgcggcctgtgtgtctttgacaagcgggtgattctcttcggcagcgagggcaccgccaaggtgttctcctccgaggtggcgtttgaggggatggatgagcagaacatcggcaaaaccaacctgcccaccgccgtggtggaggcggtagaccccatcgtgctcaatatgaagctggtggacgtctgcgagtgccgcccctgcgactgtgaactgaccgaaatcccgccgtgcatttgcgcctgcttcggctgcgacctgtgcttcggcaatgacggaaagcggatctatgttaccctgggccagttctcgatcatccgtctggagcgggactcccagctcctgatgccggtatatgactactgtatgccggagaaggagtgcacctgcggcggctgcgaggacgatccctgcgagatcttccgccacgtgaagttcccggtcaacgagttcttcccgcccaacagccccgcgcccatcccggaaacctgccgggagctgaagggctgctgcggctgaacaaaagcgggccctctggaatgttccagagggcccgcgcagcctgtcggaaagtcctttccgacgggctgctggactttttgaaactctgaaagcgtttcaaaaagtcgtttgatcaaacatgaaagggaaccctgacggttccctttcatactatccttccctccgaacgctttagcaggagggcttattgaccgcctcagcgggccctctgactttattcaaaggagaccgcgcaatccagggggacgatgacaacataggtgcgccccacaccgaaggagatgggggagccgctcaggtcatagtattggagctggccgtcggggaagtccttgctccacgtgaggtcaatgaccttgccgccgcaggcgaagtagcccgtcccgccgctggacaggtccacagtgatgtggcccagactgtcgccggtataacggcaggcggtcttgaggactatcacattggtgacggccacctgttcaccgctgtcgccgtctacatagggctctccatactcctccacccggtagagccggctgtcgggatcgtaggtaaatacaccggttttatagtgggagacagggacggtgatccgcggggcctcagcgccgccggccggggtgccatcctccacaaagttcatctgacaacggtagccgtcctcgtgctccaaacggaggccgtaggtgggcagacgctcgatgatggaggtcccggtggtgacgacggtgtgctccagactgtagcttttacgccgctccgggtcccgccacatcagatttccgttctcgctgttgctcatgtaggggccattgactccgtcgagggcggtgacgccccattggcggattttggcgtaggcatcctcgctgccgccggcgtgaatgtagatggcatcgtgtcccagggccagctccagatagtaggggcgggcggagcggatggagccgattttcccaacaccgtccaaggactggtagacggccagcatgcgggtgatgccgccctcggccggtacttcgtagatcacgtcagcttgggactgaccaagctggggaagggcctctttcagattgttgagcatgatggccaccgggcggcggttgacccattctttgcccataggcaggccgcttaaggggctgaccggtccgtcgtagggggtggactccggtgtgggggccacagtgggagagggctcctggtgtgccggggtgccggtgggggagggaagcctgctcccgcatgcggagaggagcagaatgagcgccagcacagccggcagaactttttttgccataccaaattcctccattgtccttatgcagctatgatacgcttttggggaggctccgtcaagatttaatactcccgtaacgatttttgcatgcttttgtaacatgaaacgggtattctactccttgcaagagacagagtctttttcattgtatcctcttctttcctatgagggcggccgggtgttggaagcagacacccggcctgctcttttctgaggaaaaaagttactgcaagggagggcggaggctgcttcgtttgggcaaaagaccggtggacgcttcgtgcggccgagacgcaaaaagaaggacatcttacagatgtccttcttttttggaaggggcggttaaaattgatatttccccttaatgaaaccgccgcacagcggtgtgagcttgctctgacttataaaaaaatcggagcaagcgatacaaagcttgctccgatgtggagcagggtacgggagtcgaacccgccttctcggcttgggaagccgatgcactaccgatgtactaaccctgcaattcagtcgactaaaaaagtatagcatatctttcccggtttggcaagagaattttacagaggagaggcaaaaattaagggttgcattttcggcatagttcgatataattatctcggtgattttttctttcttctaactgaaaatttgaaaatctgcttgcaatagaacgaaaatcatgatatcatttcctaaaccagaagtttgattgttgaattggaaaggctggaatgacgtgatgagtaagaagcaggcgctgacggagtttcaccggggctctattctagcggccgccgagcggctatttgccgagaagggtaccgaaaagacgacgatggatgacatcgcgcgggaggcggagtacagcaaggccaccctctatgtgtactttcagagcaaggaggagatcatcaatgccattctcctcagcggtatggttctgttgaaaaagaagattcacgaggccattgagagccacagcgactggtatcaggcctacgacgcggtatgccgctccatcgtccggttctacgatgaaaatcccaccgcttatgatgccgctacgggcacgatgcctctggtgcaggaggcggacgagactcagaagggagttgcggatatcctgcgcgtgagcagtgagatcgacgaggagctggcggccttcctggtacgcggtgcggcggagggcgcggtgcgctctcagcttccccctatggagacggttctgctgttctggtccgccctgtccggcatggtgcataccgccgatatccgggagggatatattcagaagaccatcggtctgtcccgggaggagtttctccagcacggcacccgcctgctactggcctctatcaccaaggtcaacgcataatcaaaaaagcgccccggctgcggccggggcgcttttttggatttattcggcggtgagcaccgggtgctctccgtcggcggaggcatggatgctctggatgggatggaggtagctgtcgatgagcttggtggcgatgtcgtcctccagatccttctgaatctggcggcgcagattgcgggcgccgtaggtcatggagtaggacttcttcaccaggtagtccagcagcgcgtcgtcccaggtgaaggtgatgcccttctccttcagcgcgtcctggagctcacggagcataatggcggcaatggccttgaagttgtcctcggtgagcttgttgaagtagacgatctcgtccacgcggttgatgaactcgggccgcaggaaggattccagggccttcatggcccgctccctgccctgctggtcggcggtgcggccgaagcctacggaaccggcggaggtacgggcatcgctgcccgcgttggaggtcatgacaataaccgtgttttcgaagttcacgtttcggccctgggcatcggtgatgtggccgtcatccagaatctgaagcagaatgttgagcacgtcggggtgggccttctcaatctcgtcaaacagaatgacgcagtaaggcttgcggcgcaccttttcggtgagctggcccgcctcgtcgtagcccacatagcctgggggagagccgatgatgcggctgacggcgaacttctccatgaactcgctcatgtccagtcggatgagggattcgggggagtggaacatgtccatggccagccgcttgaccagctcggtcttgcccacgccggtggagcccacaaagatgaaggacacgggcttgcgcttggaggcgatgcccacccggccacggcggacagcggcggccacggcgtgaaccgcctcgtcctgaccgatgaggtgctccttcagccggtcttccagcttggccaggcgctcatactcggcctcctggatctggctggcggggatcttggtccaaagctcgatcacacgggccagatgctctaccgtcagagggggggcgctctgggcctccagcttgttcagctcgtcctgaagctggatctcccggctcttgatggaggccagccgctcatagtcacggctgctgccctcgtcggagaggagcttctcccgctctccggccaggttgtccagctcccgacggaagttggactgccgctgctcgttggccgccagggcttcggtggtggcggggttacccatgagagagtcgtgctcggcggtcagcttgttcagctcccggcggatctcggtctgccgctgctcattgttcttgagggtggtctgccgcttgtagtcccggtcgttggcctccaccatcaggttttcccgctctttttccagggcatccagctcctttttcacctccacctcccgggccaaggtcttgttgtggaggttgacgtcggagcaggcctcgtcaatgaggtcgatggccttgtcgggcaggaaacggtcggtgatgtaccgctcgctcatggtcacggccaggcggcacatctcgggggagatggagacaaagtggtacttctcgtagtaaggggcgataccctggatgatcctgatggagtcgtcgatggagggctcctccaccatgacaggctggaaacgccgctccagggcggagtccttctcaatgtacttgcggtactcggtgagagtggtggcgccaatgacctgaatctcgccccggctcagggcgggcttgagaatgttggcggcgttcatggagccctcggcgtcgccggcacccacgatgttgtgcacctcgtcgatgaccaggatgatgttgcccagcttcttgatctcctcgatgaggcccttcatgcggctctcaaactggccgcggaactgggtgcccgccaccagggcggtgagatccagcaggtagacctccttgtccagcagcttgtagggcacgtcccgctggtagatcttctgggccagcccctcggcaatggcggttttgcccacgccgggctcaccgatcagacaggggttgttcttctggcggcggttgaggatctggatggtgcgctggatctcctcgtcccggccgatgatgcggtccagcttgccgtcagcggccttctgagtcagggagatgcagtaattctccaaaaacttgcgcttgggctgcttttcgcccttcttgtccttgtctccgcgctcggcgcggggctgctcccgctcagggggctgggcctgggggctttgagccgagccaaagagcttgttgaggaaggggaaggtggcggttttgccctcgtcctcctcgtcttcgtcggcctcctccgcggacatcaggccctccatgccctcggcgccgccgaaggcggacatcatctcattggtcaggccctccagatcctcgtcactgatgcccatcttctgcatcatatcttccacgggcttgatgcccatttccttcgcgcacttgaggcagaggccctcgcttttggtggtcccgccctccatcttctggataaagatcacggccacatttttatggcatctggaacaaagtgtgggttgcatttgtattcagctcctttggaggggagaatagtcccctcagagaaatgattctaattcgaaattatgaactgcgtatgaatcacgcctgttttcttttctttaaagccttccggtactggaagatataactgcacagggcggccagagtgagggccagggcgaaggagattagtccggtggcccaggggcgtgggatggcagggaagagcaccagcgcggcgcagaccacgaaaaagacgccggtagaggtcttgcccagccagttggaggagatcacatcacccagtttctggtacatgagatagccgccgatggccatggtcagctcctttaggaaaaagacgacgaccgcccacagagggatgatgccgtcggcggtgatgcagataatgaccgtaaaggtcatcagcttgtccgccagagggtccagaatccgccccagcttggtgatctggttgaagtgccgggcgatccagccgtcagctacatcggtgaggaaggcggttaaatagatcagcaccgcccagcgatgagcgtctggagcgggctgaaagaagacgacggcaaagaccggcaccagtactagccggaggagggagagaaggtttgggatggacataggagcttcacctgattttctttggtttagggcgggattacaggccgctgagcagggagaggggattggtagtcatgaagaatttcagcaggtgggtttggtttaccagggactcaggcagtacgtgcccgaagaattgcagcagccaggccgccacaaacagaaggacgcaggcctgcaccaggccaaacagcgcgccgcaggtcttgttcaggaaatgtagtccgggcagccgcgccaccagatccagggcatggctgatcagcttccaggcaatgagaatgagggcgaagcccagcagaaagaggatcaggtaggcggcggactgggcgatggcagccgcaactgcggcggccgcgctcgcggccacggaggtcattccgttctccacggccttgtccacggtgttgatcagggtttcataaaagcccatctcccgcagggcgttcagtaccccgtccagaggcacgtcgtcgggggacagggcagcggagccctcctccgccacttgctgctggatggaggcgttgagctgttcctcgatggccgaggcgaatttgggctctaaggcatccgccaccataggagagagagtgcgggcggcgaagctggcgcccacaaaagccaccagcacggccagcagaccgcacagggacaggatgaacccccggtgggcgcccaccagggcgaagagcagcagcacggccagaatcaggccgtcagcaatcagataagccatagggttttcctccgaatttattgagggacatagaggcgggcggtggtgctgtcaatgagcatagcactgccgtcggagcgctgtaaaaccttctgtgcgttctgtgtgccgttcagggtgttatagagctccagatcctggctgtagatatccagccggtcggcggtgagtacgccgacataccgcccggcagcggagagagagagtacctgctcctctacggggagggcagcggccagctcgcctgaggcgtttatggtgagcagctccgccgtactgcccgcccggtacttccccagcaggagggaggcggtgccgtccccgtccagggaaaaggccttcaggtagcgccccccgtagtcgtaggagccggagagcgcgccgtccccggagacaatatagagcccggactcacccagggcccaaatgccactgctggtccagcgcagatccagaatcgcgttgttgcccaccgggcaggtccagtccggctccgtctcctcctccgtgcggtccaggcgatagaggtccacccggctctcaaaattaccgtccgtaaggccgatggtgagcagagccaccgatttgttgtccggggcaacggcggcgtccatcacaaaacggttggacaggctgaagcgcaccagaggactgtagctgttgtcgtagaccgtcactgagcccttgtgcccgctctcctggctggtgacggccagccagccgttctggttcacatcggcggacaggagggcctggccgtcctcttgggtgagggaaaagacctcctcccgaccggagtagacaaagagctcccggccgccggcatcatagaccagagcggtgccgcctgcggtgctgaccacaggatttgtcatggaaacggcctgatccacaaaggcctgaccgctgcccgaatacagccggatggtgttgggggagcagaccagaagatctccgtccacgacggcaaaggcgttggaggagtccccaacaaaatgaaaggactccgcctgtccgctgtcgttgcgcgccaaggtgcggtaggagaaccagcgcttgatgaagtcaaaattcagcttgtcatagttggccaccagggcgaccgcgcccaccatcagggccagtgtcaccagaaaggccaggaaccggacaaaacggttggggcgctttttgggtttgggggcggcgttgggacggctgccgttgatatcttccattctatgctccttcatggatttcatgcggcagaggcataagcggcacagataaaaggggcgcttgtgcaggccctgcaatagaattattttttcgttcccaaatagactgacgttatggcgcagaggatggcggcgccgatggcgaaccacagtgcagcaggcatagaaatacctccagagttcacataagggcaggagagtgagctataggacgtcctcctgataccacagtttggtcatatagagccccccggcgggtacagtaggcccggcggcggtgcggttgcggccttccagaatggcgggcacgtcatcgggggagaatttgccgtcggcggcgtagacacaagtgcccaccatggcgcgcaccatgttgtagagaaagccgtcggcgcacacccggcactcgatcagttctccgctgcgggagatattaaagtagtgaaccgtgcgcacggtggtgcgggtttcggtgccgacgctccgaacagccgcgaagtcgtgggtacccacaaagtgggaggccgcacgctgcatcacagtctcgtccaggtgtttgggatagaaccaggcgcggttgacgtaaaatgcgttccgtatgtgggaattgtagatgcggtaagtgtactcctttttcaggcaggagccgatggcgttgaagccgtcgggcacctcggtagcctttatcaccacgatgtcatcgggcagccgggtgttcaccgccaggggaatccggtcgcaggggatacgggaggaggtgcggaaattggcgatataggtctccgcgtgcacgccggcgtcagtgcggcccgcgccggtacatttgaccgggtggcccaccaccgaggccagggagtgttccagcgtctccgccacggtgacggcgttcttttgaacctgccagccgtgataggccgtccccacatacatcaagcgtagcgcaatatttctcataaagctttaaaatcccattatttttttcttaaagtccaaagtgccgcagcacgccgatgccgacacacagaagcaccgcgaagaccagagcggcgatgtcgatgccctttagcttgagctggcgcaggcgggtgcggccctctccgccgtggtagcagcggcactccatggcaatggcaagctcgtcggcccggcggaaggcagaaatgaacaggggtaccagcaggggcaccagggctttggccttctggagcaggttgccggtatcgaagtcggcgccgcgggccttctgagcggacatgatcttatccgtctcctcgatgagggtagggatgaagcgcaaggcgatggacatcatcatggacagctcatgcaccggcacatggagggttttcagcggtcccatcagtttttccaggccgtcggtgagcaggatgggggaggtggtataggtcagcaggaaggtgcaggtgatgagcatggcgatgcgtagcaccataaacaccgccgcccagatgccctccggatagatggtaaagatccagaaggagaccagcggcgctccctcgccccgggtgtagaacaggttgagcaggccggtgataatgacgatgatcaaaataggcttcatcccccgtaggatgctcttgatgcccaccttggacacggcgatcagcaccgccagcaggacgaagagaaccgcatagcccaccacatgcttggccagaaacagagccacgatataggccacggtaaagagcagcttggtgcgggggtccagccggtgaagcagggtgttgcctgggaagtactggcccagggtaatgtccttcaatgccacttacaccgcccccctttcgccggaagcagactgcttctgctgaccggcacgggccagcttggccaggacggcgtctctggcctgctccgtggtgtagaccgacgggtcgatgtccacgcccatggcccgcaggcggtggaacacccgggtcatggcgggcacgcccaagcccatggcctccagctcgtccccgtgggcaaagacctcccggggcgcgccggagaagggaatccggccgtcgttgatcaccaccagccggtccaccgtccgggccacttcctccatggagtgggaaacgatgatgatagtggcgtttttggccgtgtgatagtcgtggatgttgcccaggatggacgccacgccaactgggtccaggccggcggtgggctcgtccagtatgagcacggagggctccatggcaataacgccggcgatggcgacccggcgcttttgtccaccggacagttcgaagggggatttttccagcatgtcctcccgcaacccaacaaactgggcggcctcgcgcacccggcggtcgacctccctctcgtccagccccatgtttttggggccgaaggcgatatccttatagatggtctcctcaaagagctggtactccgggtactgaaacaccagtcccacctggaagcgggtctggcgggtgcgctccttgctctcccagatatcccggccctcgaagaggacgcggccggaggtgggcttgagcagcccgttgaggtgctggatgagggtggatttgcccgagccggtgtggccgatgatgcccaggtactccccgcggtaggcggtaaagtccacgtccaccagggccccgtgttcaaagggggtaccggcggaatagatgtggctcaggcgctccgtctgaatgatcggttccaatggcttcattcctttatcatttggtgcatgcccgcaggtcacgcccgtgtttgcagcagatcaaagagcgcctgggcacattcctcgtcgctcagtgcgtccagaggaacgtccacctccgcctgccggagctgccacagcagctcggtggtctcggggacagtgaggcccacggccttcaactcctccacccgctgaaagacctcccggggggtgccgtcggccaccacccggcccttggccatgaccaccagccggtcggcctgggcggcctcgtccatatggtgggtgatgagcactaccgtcacgccggaggagcggttgagctcacggatggtcttcatgacctccgcccggccgatggggtccagcatggcggtgggctcgtccagcacaatgcagcggggcgccatagcgatgacaccggcaatggccacccgctgtttctgtccgccggagagcaggtggggggcgtgctcccggtactcgtacatgcccacggccttgagggcgtcgtccaccctccggcggatctccgccgggggcacccccagattctcaggggcgaaggccacgtcctcctccaccacgttggcaacgatctggttgtccgggttctggaataccatgcccacggtgcggcggatgtccagcagtttatcctcgtcggcggtgtcgatgccgtccacgtagactttgccgccggagggcagcaggatggcgttcaggtgcttggccagggtggacttgccggagccgttgtgccccagcacagccacgaaggagccctcctcgatgtccaggcttaccccgtccagcacaaaggggttgaccgccccctcctccgcataggcgaagcggagcccctctgtttgaatgattgcatggttcatatagcacatcactccttattcggcggtccagcggcccgaagccccgcaggggagggccaggccggtggcggtgacgggcaggcccagctcctggctctcggtgcggccgccgtaccggcgggctaccagagtctccagcaggtaggtcagtaccgagggggctagccccgtagtataggagttaatgaggaaaaacaggggttcgtccgagagcaccccggctaccagttccacaaaagggaagaggttctcctccagcttccagatctcgccggagggaccccggccgtaggagggggggtccatgatgactgcatcgtaccggcggccccggcggatctcccgctccacgaacttggcgcagtcgtccacgatccagcggatgggcgcgtcggacaggccggaggaggccgcgttctcccgcgcccagctcaccatgcccttggccgcgtccacgtggcacacggcggctcccgccgccgcgcaggccaccgaggccgcgccggtgtaggcaaagaggttgagcacccggatgggccgcccggcggaacggatgcgctccatggcgaaatcccagttggccgcctgctccggaaagacgccggtgtgcttgaagttcataggcttgatgttgagggtcagccccttgtaacccaatgtccagcgctggggcagttccttcttgacccactggccccctccggtggaggcgcgctggtaccgggcgtcgtgcctccgccatccgggatgccgcccctccggacgccagatggcctgaggatcgggccgcaccaacagatacttgccccagcgctccagacgctcgccgccgccgcagtccagcagctcatagtccttccagtcacttgaaatccacataatatgatcttcccaccatagtttttgtcataatcatcctattatatcattccctactataccagtcaacgaaaagaaacgcaaacagcaggggcgcggggtgaaaatttgaatcgacccgcgcccctatgcggcgtctcctgcaaactgaccaggcgcccctgtaagacagttcaatccacgcacccgcgaggggtgcgacagacatactccatgtggccgcggtccagccgctgatttcaacccacgcaccccgtgaggggtgcgacttataccggggatgcttggtgatgtcgtatttctcactatttcaatccacg

SEQ ID NO: 4220 - DNA, 129032 bp, Unknown
  gut microbiota DNA sequence
gggcgacgtggcgcagtacctgggtatggacgccttcttcaatctcaagtaaagcgaagcgctgaatgcccgggagcaggcgcacagcgagctgcgcagacaaaaaagcagttgcgccgaagtgtaaggatttatagagaagttaaggacaaggcaggccgcaacggtctgccttgtcctttttatactgtgtaacccactatgacactttcaaggaaagtattcgtgggagaagcgataaactgtactttgttacttttggcataggcaaaacggatgtcctgctgggtcaaacattgttacaaaatcacttccgccaaattgtgcttttgactttgttgctcccaaccgctctgctttcttaaccatttccataacattatcaacttgaaaatcaaaatgtatctgtttctgttgtttccctgtttcttcgggccatacagggcaaatatactcagcttcttcaatgaacagaaaaacgattcccgtagaactgcgtacagcaggtcttgcaaataattcgcacatttcccaacctaataactcaccataaaatttctgcaatttcttttcgtcatcgcaatcaaccatgacatttcctaatataacttcattttccatgctgagtcctctcctccccaaattttgatttgccggtgagacaattataaagcggcacccaccggaaagcaacttttttcagcgggtgtcaacttccttatggaagttgcgccgaaggcgcaaggtgttttttgcggagcggtgagcagtgcgccgtggcggagggtgtgaggcgtgacaaccgaaggaaccgcaaggggccgctgccattggcagcggccccttgtcgtgcttgacccgtcactcctccagatagatgatgctgaccgggcagccctcggcggcggatttcacagcgggcaggtgcgccgggccgggctggcggtagacctccgccaacccgtcctccgcgatccggaacacgtcggggcaggtggagacacacagcccgcagctgatacagtcgctgcgctcgatggagacctccatgtgcatcgctcctttcacccgataggatgccccggcgggcggcgggccatgcgtcctattttcccacgcagaagcgctcaaagatgcgggcggtcacgtcctcccgcacgctggccccggtgagctctcccaaggcggcgagggcctcctccgcgtcggtgaggagggcatcgggggtgataccggcctccaggctctcagaggcccgcgtaacggcctccagcgcccgccgggcggcatcggcctgccgggcattggtgagcagctctccggcgctctccgcgcctccagcggggaagagggcggcgacggtctcccccagcgcatccagccctgcgccggtggcggcgctgaccacacacagatggggaaagcggctccgcagctcctccggcgcgaaagccagggggcggtcggacttgttgatcaggcagatgacccggggcgcgtgggcggcttgggccatggcggcctcgtcctcgggggtgagggaggcggagccgtccagcactagcagggctagggcggccccagccagggcggcccggctgcgttccacgccgatgcgctccacggcgtcgtcggtctcccgcaggccggcggtgtcgatgagccgcagcacaacgccgcccagccggcaccgggcctccaccgtgtcccgggtggtgccgggtacgtcggtgacaatggcccggtcatagcccaccagggcgttgagcagggaggacttgcccgcgttgggccgtcctatcagcacgcagggcacgccgccggcgatataccgtccccggtcataggtgcgcagaagggcttccaggcccgtacgggcggcgtccaggccctcccggatggtgtcggcccggaaggggtcgatgtcctcgtccggatagtccagcacggcgtgaaagtgggccatgagatccaccagaccgtcgtagagggcggccacccggcggctcagcgcgccggagagctgcccggcggcctgccgcacggcggcgggggtctccgcctcgaggagatccgccaccgcctccgcctgggtcagatccagttttccgttgaggaaggcccgcttggtgaactcccccggcccggcctgccggacgccctgggcaaacagggcctccagcgccatcgccagcactgcgggggagccgtggcactgcagctccgccgtatcctcgccggtgtagctgtggggggcacgggagatggtggccagcacctggtcgatgggggcaccgtcggggcccagcagggtgccgtagaccagcctgcgactctcgcaggcggccaggggacgcccgctggcggcgcggaacacggcggacgcggcctcgatagcgccctctccgctgacgcggacgatgccaatggcgctgggaaccgggggtgtggcaatggcggcaatgggttcggacatgctttcacctcatgattgagcggcggctcatgatatgttcaggacacctgacgttattgtaccacaattggaagaaaaacggagaacaaaaaagtttgtagaatccgccgtggattttttgcttgacttgtcttatgtcaactgaattttgcatattggcgttatccacagggtgttaacagatgtggataaccatgtggataatgtggaaaaccctttggataccggaggtcgggcgtttctttacacggtctctacactgcatagcggattgtataaggcatgtcaaagaacatttgtatcagcggcgccggatgtcaaaaatgggggtggttttttgggcaggccgacaattgaacgtaatttttaaaaatgctaaaatattattatgtctaaaaaatattttttataaaaggaggggtaggcttatgagacagcccagcctgctgcgccgctatattctgttcttctgcggagttctctgcgccgccctgggaatcgccctgattaccttagccggtatgggcacctcggcggtgtccagcctctcctatgtcctcacgtttgtctttccagggctctcgctgggggtgtttaccttcctggtgaactgcaccatgctggtcggccaggtgctgttgctccggcacaggtttcagtccatacagctcctccagattccggccacgctcctcttctcggtctgcatcgacctgtggacagagctgttggccccgctggtgccggagtcctatggggccaggtgggtggtgctcctgctgggttgtctctccctggggctgggggttgcgctggaggtgcttcccaatgtgctgatcctgccatgtgaggggtttgtccgaaccgtcagccaggtattcggctgggattttgggaagaccaagaccggctatgatctggctatggtgtcggcagccgccctgctctcctatctcagcctgggggccatctgcggcctgcgggaggggacaatagtttgtgccctgactgtgggaggaatctcccgatttctgtgccgcaggctctccttcctgcaatacccaagccggagtcatccgcccatacccgcagaagcaagcggcgcccataccgccgcagagccctgaaagcgcaagtaaaatgccgcccatatgggcggcattttaaaaggtcaggcgaaaaattagcgcttggagaactggggagcgcggcgggcggccttcaggccgtacttcttacgctccttcatacgaggatcgcgggtgaggaagccggcggccttgagggcggcgcggaactcggggttgacctgcagcagagcgcgggccacaccgtggcggatggcgccggcctggccggtcacgccgccgccggtgacggtggcaacgatgtccaccttgcccagggtgtcggtagtggccaggggctggcgaaccagcagcttcagggtctccaggccgaagtaatcgtcgatgtcgcggccgttgatggtgatcgcgccggtgccgttggggaacagatgcacccgggccacggaggacttgcggcggccggtgccatacagataaggcttcttgctcttatacattcctttgtacctcctgcttagatggcggcccaggtttcgggcttctgggcggtgtggggatgctcggcgccgcggtagatgtgcaggcgggacagagaatccttggtgatgatgttgcggggcagcatgccgcggacggccagctgcatggccagctcgggcttctgctgcatcagcaggcggtacttggtctccttgaggccgccgatccagccggagtggcggcggtagtacttctgctccagcttcttgccggtcagaacagccttctcggcgttgacgatcacgacgaagtcgccgcagtcggcgtggggggtgaactcaggcttgtgcttgccgcgcagcagggtggccgcagcggcggcagtcttgcccaggggcttgcccgccgcatcgaggatataccacttgcggacgatgttccccttgttggccataaaagtggacatggtgaaacctccaattttgcgttctatgatcaaaaatgtctcaacagaataagaaccccaatctggacgaccggagcgttttgtattataatacggtggttccaaggtgtcaacacgttttttgaaaattttaatttagaaataagaatgctcgctcaaacgcgcgaaatctcgcaaatactcttgaatgctccgtttcgatttttaatttttgaggtgcctatgaacaagattttgagctatgtccgccgctgtgtggaggactacgacatgatccaggccggggaccgggtggcggtgggggtgtccgggggcaaggactccctgaccctgctggtggccctggccaggctgcgggagttctaccccaagccctttaccgtggaggcctacaccctggatatgggccatgtggacgggggagaggggatggacttcaccggggtggaggccctgtgccgggagctggacgtgcccttcacgctgctccacagcgaaatccaccacatcatctttgatctgcgcaaggagaagaacccctgctccatgtgcgccaagatgcgccggggcgccctccacaacgccctgaaggagcacggcgtcaccaagatcgccctgggccaccactttgacgacgcggtggagaccttcttcctctccctgttctatgaggggcggctgtcctgcttccagcccgtgacctatttagaccgcaccggcatcacccaaatccgccccctgctctactgtggggaggggatgctccgcaacgccgccgagcgcaaccatctgcccgtggtgttcaacccctgcccggcggacggcaataccaagcgccaggaggtcaaggagctgatcaagtccctggacaagcagtatcccggcctcaagagccgggtgttcggggccatgcagggcctgcccctgcccgcctgggggccggtggagcaccggcgggtgcccctgcccgagggagattagccccccggcacggacatccggcccgccgtgccgggagggccggaaccccttgaaaaatcaggactttcctaacggtcgagggggaaaatcccgctggggccttgcaaatttacgccattcgccgtatggtgagagcggccttgcaagaccacaccctgccgaaaggatggttcaacatggaaaacaagaagaccttcggcgcgtatatctgccgccgccggaaggagctggggctcacccagcgggaattcgccgacaggctcttcgtcaccgagtcggcggtcagcaagtgggagaggggtatgtcctacccggacatcaccctgatccgggatatctgcgccattttacaggtgtcggagcacgagctgctcaccgccagcgaggacgtagaggcccgcaccgccgagaccctggcgaaaaaatacctgtccctgctgcgccgcctgcgctggattcagtacatcctctacggcggcaccgccctgatctgcctcatctgcaatctggcggtggggcataccctggactggttctggctggtactcaccggggaactggtgggggccagcctcaccctcctgcccatcctggtgaagcagtaccggggcgtcatcacgctggggggcttcaccctctccctggagctgctgctgctggccgcctgcctgttcagcgggggagactggttcctgctggcctcggcgggggtgctgctggggctgggggcggccttcctgcccggcgccctgcgggagctgccccgccccctgggggagcacaaggctgtgctctacctggggacggagaccctgctgctgtgcgccctgctctgggtcagttgtgcctatgacggcgcagattggttccccattcctaccctgccggcggttctcttcggcctgaccctgccctgggcctgggtgctcatctgccggtacgcccccatcagccgctggtggaaggggacggcctgcctgggggcggcctgcgtgttcctccccctggtcaacccggtgatcgaccggctggtgcggctgggcggcgggacggtggagcggctccacggcttctggttccggccggatttcacccgatgggcggagaactggtacttcaatgagaacgtcctcctgctcctgtggctggccctggtagcggccgcggcgctctgtgcgctccgggcgctcctgcgccgccgggaggcatgaacgcacccggactggatcaggaaataaaactttatgcgcacagggcgcaccacgaaattatgcaaaggcttaggcgcatgaagtttctgcgcatatgggccgtcccgctgtaagcggcacatggccaattttgctatgcttttgcatagcaaaacaggcgtcggccagcggccaacgcctgtttttatttctccatcttatgcttgagatgctccaccttgcgggccaaatagtcggaatcggtgaccaccttgacgggctgagtgaagtccagggtgaacaggccgatgaaggacttggcatccacgcggacgctgtcgtctaaggagtgcaggaagatctcgtcgtcacaggaactggcgatctcctgaagccgctggagctgggcaatggagttaaactgcatttcaatcatcatgattcacacctcctttatttcgccaaagagtatatcatgggaggtaatcccacgcaatcggtatattatccaaagttctgcggcggtatgccggatgtacaagcgatttgacgccggaaggagggaggaacgaggcagcgggccctgccgccggcagggcccgctgaaagggcacgtatcagaagtatttcttgacgccgtcggtggccagggaggcatcggcgctgatggtgacggtgaacttaatattgttcttctcggagaagctgttcagccagtccaggaactcctccaccgcatggtcggtggcctcggaggccacaatcttggtcaggctgtcgataaagacatgggtgatgtcgtagttgcccgcgtacaggccgctgataaagcccttcaggaagtcatagctcttaatatcgtaatggctggcctccaccagacggatcttataatgaatgtcataggtcagcttggggccccgctcgatgcagaccacattgccgttctcgctgtggacagcggaattaatgagctcgatcatctgcttggtcttgccggtgcccttgacacccatgatcactctcaccatagttatcactccttcattgtccgccggagcgtatctccggccttgtgcaattatgttaccatttttgcggcccgattgcaactgatttgcggaagttcaccaaaaattaacgggggttcttacaggcgtgcctccagctccgccttgcggtcctcataaccgggcttgcccaggagggcgtacatgttgttcttatacgcttccacgccgggctggtcgaagggattgatctccagcagatagccagacaggccgcaggcgtactcgaagaagtagatcagccagcccacgctctgcgcgtcccgggccggggcggtgaccaccaggttgggcacgccgccgtccacgtgggccagcagggtgccccgcatggcctgttcggccacaaaggagagatccttgcccgctaggaagttgagcccgtccacattgtccgggtcgtgtggaatggtgacgctgccgcggctgcgggcgaagcgcaccaccgtctccagcatcaggcgctcaccctgctggatgtactggcccatggagtgcagatcggcggtgaactccacgctggcggggaagagggccttgccgtccttgccctcggtctcgccgaagagctgtttccaccactcgccaaagaagcggaaggagggctcgtaccccaccaggatttccaccttcttgccctgggtatacagggcgtggcgggcggcggcgtactgccaggccgggttgtccgcaccgggggcggccagggcctccatggcctgggcggcgccctccatcagggcggcgatatccaccccggcgcaggcgatgggcaacaggcccacggcggtgaggacggaatagcggccgcccaccgcgtcgggcaccacaaactcctcatagccctccgcgtcggccaggcccttcaaggcccccttgtgggcgtcggtggtggcgtagatgcgcctgcgggccccctccttgccgtacttctcctccagcagggccttgaagatgcggaaggctactgccggctcggtggtagtgcccgacttggagatgacattgatggagaagtccttgtccttcaccagctcgatgacctccagcatggcgtcggaggagaggccgttgccggcaaagtagatgtcgggcccgcccttgtgggtcaggttgaaattgggggagtgaagcagctccaccaccgcgcgggcgcccagataggagccgccgatgccgatgaccaccagggcctgggagtcgctgcggatgcgctccgccgccgcctggatgcgggcaaactcctccttgtcgtagtcccggggcaggtgaacccagccggtgtaggcgccgcccaggccgctgccctcctccagcttgacgcgggcgctctccagcgcgtccagccggctggtcagccagtcctcaggcagaaacggggtgcagttggaagtattcagctctaacataaattgaccctcctcaaaataaggcttgtcctggctcccagtatacaccaaagcgggccgctttcctagggggattttggaaattttgaagcaaaaaaatgcgcccggcacaagccgggcgcggagaaggacaacggggattgggcgaccgcgtcagttcttgagactctgcatgggggccggaatacgtccgccgcgggccacaaaggcgtcactgctctcggcgtggacgggcatgacgggggcggagcccagcaggccgccgaattccaccgtatcccccaccaccttgccgggggcggggatgaggcggacggcggtggtcttggagttgaccatgccgatggcggcctcgtcggcgatgatggcggagagggtggcggcggtggtgtcgccggggacggcgatcatgtccaggcccacggagcacacacaggtcatggcctccagcttatccaggtggagggcgcccgagcgggcggcggcgatcatgccctcgtcctcgctgacggggatgaaggcgccggacaggccgcccacgtgggaggaggccatgacgccccctttcttcaccgcgtcgttgagcagggccagggcggcggtggtgccgtgggtaccgcaggtctccaagcccatctcctccaggatgcgggccacgctgtcgccgatggcgggggtgggggccagggagagatccacgatgccgaagggcacgcccagccggcggctggcctcctgggccaccagctggcccatccgggtcacccggaaggcggtctttttgatggtctcggccaccacgtcaaagggctggcccttcacgtccttgagggcgtggtgcaccacgccggggccggacacgcccacattgatgatgcagtccggctcccccacgccgtggaaggcgcccgccatgaaggggttatcctccaccgcattgcagaataccaccagcttggcgcagccaaagccgccccggtcggcggtgcgctcggcggtgtccttgatgatgcggcccatctcggccaccgcgtccatgttgatccccgcccgggtggagccaacgttgacggaggagcagacaaagtcggtgatggccagcgcctcggggatagaggcgatgagcttcttgtcggcctgggtggcccccttctgcaccagggcggagaagccgccgatgaagttgaccccggtggacttggcggcgttgtccatggccacggcgaaggggacgtagctgcccgtctccgacgccccggccacaagagccatgggggtgacggagatgcgtttgttgacgatggggatgccgaactcccgctcaatggcctcgccggtggccaccaggtgctcggcccggcgggtgatcttgtcatagatcttctgacaggcggcctttggatcgggatcggcgcagtccagcagggagatgcccatggtaatggtacgcacgtccagatgctgctggtcgatcatatgtatggtatccaaaatttcgttggtgttgatcaagtcaattcctcctgaaaatcaactgaagcgtgggcggttccggcgggcggggacaagccccgcccctacattacagctcccaaagacgtcccgctgtaggggccgacaccccagggcggcctctcttgcccctgcggggcaattcaccttctgccctcaccggcccgcaggcgggtgtgggcacccgcccctacatatcggtgaggggtgcaccccgctttcggggcccccgcgcgaacccagcgaagcggttcgcgtggggaaaaggaggcccagcggcgggagtgagcgttcgggcttgcccggaagcgaatgatccaaagcttgggccgacgctgtcacgctgcggcggctgcgcgacgccacactgcttacccctccgcgaaaaacaccttgcgcctgcggcgcaactgctttttcgtctgcggggcgcgctgtgcggctgcgacccacgcctccgcgcttcctgtcacgctgcgggttgggcgcatgaccgggtcgctaagcggccattccgcgaaaaatgccgctgggcttcgcccagcctgttttttcgtcttcatgtcctcttagctcccctatgcgcctaccctccgcgcttcctcagatccggtgcatggcgttgaaaatatcctcccgctgggcgcggatgtccaggctgcgggcctcaccctcccgctctagcagggcggccagctcggcgaaggggatgtcgcaggcgccggcgtccaccagcataaccatggtgaagtccccctggaggatggtctggctgatgtccagaatgttgacattgtgctgggccagcagggcgcagaccagggacatgatacccacccggtccttgccgagaacggtgacgattgctctcataatagaacagctcctttgcagtttttacggatatgggggacactcactgcagctcatccagcgtcagcccgaaggcgggcaggaagtgctccagaaagtagtccagctcgggcagaccatagccctgcagggcctccagcgtctgctccgcggcctgcttgaattcggcgttgcccgccttgagctcctccacgcatttgatgtgggccgagagcttgtcggcggccttgaccagtgttctgagcccggggtcgtagccctcccgcagcaggggggcaaaggaggggcggagggcctccggcagcatatgcagcagcttgtgggcggagaactgctccacttccctgtaggcgtcccggatgtcggggttgtagtacttgatgggggtgggcaggtcgccggtgaggatctccggcgcgtcgtggtaaagggcggctgcggcggccagaccggggtcggcgtcgccgccgaacacgtcccgccggatcacggccagggcgtgggccagcaccgccaccatgtgggagtgctcctgaatgttctcctgaaaggtgttgcgcatcagcccccagcggttgatgtaccgcatccgggagaggtaggcgaagaacgggtactggtctgacatggtcatccctcctgcgaaagcaaactattctaccacagaagcggccggtttgtaaaccgtcgaaaaaggagggcggcccagggccgccctccttatcttatattactgggtctgcttgacctcaaaggcggcgacgctctgctcaaaggcagagcggtcggcgtcggagccgtggacctccaccttcaccgggtgggagagatccaaggagaacaggcccatgatggatttggcgtcgatgacgtatcggccggagagcacgtccacctcgcaggggcagcaggtggccgcgttgacaaactggcgtacatcctcgatggaggacagcgacacgaaaaactcagacatgaaagggcacctcctaaatgactgtatacaaacggtggggctttgctttataattagggtatccccattatagacaggaacggggaaaaaattcaatgggaaagccgcggtaaaccggaaattctgtttttttcacaaagagccgcggtcatatgcgaggaaaagacatgcgagttgctatctacaccttgggctgcaaggtcaaccaatacgagacgcaggcgatggaggcggagctcaccggccggggccacgccctggtgccctttgacggggcggcggacgcctatgtgatcaacacctgcaccgtcacggcggtgagcgacaagaaatcccgccagatgatccggcaggcccgcaagcgctccccccacgcggtggtggcggtgtgcggctgctacgcccagaccgatccggaggcggtggaggccctgggggtggatctggtcatgggcacggccgaccgcatgggctttctggacgcgctggaggccctcagccccgacggcggacacccggtggtaagggtggacgacgccctgcgccgccgccagtatgagcatctgcccgccggcggcctggaagggcgcacccgggccatgctcaaggtggaggatggctgcgtcaacttctgcacctactgtatcattccctacgcccgggggccgatccgctcccttcccttggaggaggccgcctgtgaggcaaagcgccttgccggggcgggctaccgggagctggtgctcaccggcatcgaaatctcctcctggggacacgatctcaaaaatgggcagggcctgatcgaccttgtggaggcggtgtgcgccgccgcgccggagtgccgggtgcggctgggctccctggaaccccgcaccgtcacggaggacttctgccgccgggccgccgccctgcccaacctgtgcccccacttccacctctccatgcagagcggctgcgacgccacgttgaagcggatgaaccggaaatatgattccgcccggtattatgagagcgtaacattactccgggaacactttgatcgacccggtatcaccaccgatctcattgtgggcttccccggcgagacggaggaggagttcgaccagaccctggactttgtacgccggtgcgccttctccgccatgcacatcttcccctactcccgccgtaccggcaccccggcggccgccctgcccggccaggtgcccaaggcggaaaaggaggcgcgggcccgccgggcggcggcggtggcggaggagctgcgggcggcctggctggagcgctgggtgggggagaccctgaccgtgctcttcgaggaggagaaggagggcctctggcgtggccacgcccccaattatacggaggtctttgccccgggcgagggactacataatgtcataaaagaggtaaaaataacgggaattcatcgggacggactgaaaggaagcgtgctggaatgaaccggaggctgttccccctggccctgagcctcgccctgctggcggggtgcgcccccgcgccggaacccacacccgagcccacacccaccccggccgcggcggtggacttccacacctttctggacgcggtcaacgagaagcgccgggccgtcatcgaggacggggaacccctggatgtctccgcctggacgccggcctttgccgaccagaacaccaccttcacagatggggagatggaacttttgctgacgccccatggcccggaggagaacctgaccatggagcaggcccgggaggacgtggagaccgccttcaccctcctgcgcaccacctacggggcatacgagtacttcggtggcgaccaggtctttgacggcctgcgggaggatgccctggcccggctggaggaggctgaccccggtctcccgctggcggacgtggtggcggaggccctgtataccgtgctgtccccggtggtgcgggacgggcactttgctgttggccgccgacacctgattgagccctatgaactcaacacctactatgtgcccggcgtgtatatcgacacccccgccggactgagcgaagactacataaagcccaccatcggcccggacggggccatcacctatggctttttcgccatgagcaaggacgggagcgatttgccggacaccctgggggatcacgaattgaactgggcactgtgtgagccggcgtcctcctattcctattcccgtgaggttttttacgagggccagtgtcaggggatccccatgctggagtcccggcacatgtccgccagtacgccggagggagaggcccagctggagcggttcgcctcctgtggcggggagtacgccgacgcgcccctgctggtcttcgacgtgcgggggaaccccggtggcagcgaccggtggtttatggagtggttcaaggggtggacagggcagtatgcagagccccgccaggccggcggccagaggttcagccagctgcgccgccagaatccgatgctgagctatccggaggagtggatgggcacatgggatgtctactctgatccaggccgctgggtggagcgggagggctacacctttttattgacggacggcggtaccgcctcctccggggagactgtggtggagcatctgcactcggtggagaacacgctggtggtgggaatcccaagcggcggctgcgccctggttcccaataacatgcacttctatctgcccaacacgggggtagagctctacttcggtaccggtctgtgtttgatagagacggacgagaaccgggacggggtgggctatctccccgacctgtgggtcaaccccgtcgaggccccggtggcggtggcccggctgtgcgggtactatggcctgaaggagccggtgtcgtaggggccgctgccctcagcggcccgcctcgctccggttccgcagggcgccgagcttttcctgccaggcgtccagccgctcccgggggagcagaccgttgatgagcagggacatggccacccccacgccggtgtccagcatgcggttgagagagtaagcgatgtagtcgtccgggccgatggagaacagcagcaggcagagcaccaccccgccgggctgtacggcgccgacccagaagatctgggccagcagaatcaggacgacgataccgccgaagagcaggggcaccagcaacaggtggcgtcccccgtcgggatagaagaccaggtaaatccggtagagcccgatgccgaggaaaccgccgataacggtgccgaacaggcggtttccgccgtggagcttggagtggtccatatccgctcccattccgaagatggcgccgatacaggcaaaggccggattgcggttcaggaaaaagtaaatcagggcgcagagcgaggcggagagggcggttttgaggttgcgcaggccgatatggggcagcggccgggccggggtctccttcatggtatacactcccgtcggggggattccccctttttccataaagaataccataaaacagggggattttccagaccggcgttagaaaccggcgggtttgcgttccggcgcggaatgtggtatgctggggaaaaccaaccggaggaggaacgatatgagccgcgcggacgagctgttcattgaaaattgcaaggagattctggcccacggggtgtgggacacggagcaggaggtgcgcccccggtggactgacggcgcccccgcccacacggtgaagaaattcggcattgtcaaccgctacgatctgcgggcggaattcccggtgcagaccatccgcaaaatggccttcaagagcgcggtggatgagcttttgtggatctggcagaagaagtccaacaacatccacgacctgtccagccacatctgggacgcctgggcggacgagagcggctccatcggcaaggcctacggctaccagttgggggtcaagcaccgctaccccgagggggagtttgaccaggtggaccgggtgctctacgatctcaagcacaacccggcctcccggcggattctgaccagtctctacaaccaccacgatctgagcgagatggccctctacccctgcgcctggtcggtcaccttcaacgtgtcggggcgcaccctcaacgccgtgctcaaccagcgcagccaggacatgctcaccgccaacggctggaatgtgatgcagtacgccgtgctggtgcatttcctggcccgggcgtcggggctggaggcgggggagctggtgcacgtcatcgccgacgcccacatctacgaccgccatgtgccggtggtggaggagctcatcgcccggacgccctacgaggccccgaggctgtggctggacccggcggttaccgacttctacgccttcacgaaggacagcgtccgcctggagggctaccgcttccacccgctggagcagcccatccccgtggcggtataaggagggagcccgatgaatttgatcgcggcggtggacatgaactgggccatcggcagggacggggatcagctctgctacatcccggccgatttgaggcgctttcaggccctcaccaccggccacccggtgatcctgggccgcaagaccctggccaccttccccggcgggcggcccctgaaaaaccggcggaacctgatcctgtcccgcgactccgccttcgcccccgagggggccgaggtgttccggtcgctggaggccctgcgggcggccgccccggcggattccttcgtcatcgggggggccagcgtctacgcggccctgctggactggtgcgacacggcctacatcaccaaaatcggccgggcgtgggagggggcggacgcctttttccccgatttggacgccggcccggactgggagatggccgaggagggggagccccaggagcacgcgggcatccccttccgctatgtgacctaccggaggaggaagccccatgtatgtggatgaaatccgggcctatacgccccaaaatgagcaggaggcggcggatcagcggctgattctggagtacatccgcctgtttccggacaacattctcacccgggacaacgagatcgcccacctgtccagctccggctttgtggtcaatgccgacggcacccgggtgctcatggcccaccacaatatttacagggtgtgggcctggacgggcggccatgcggatggggagggcgacctgctctccgtggccttgcgggaggcccgggaggagacgggggtggagcatatccgccccctcagccccgccatcgcctccctggacattctgcccgtatggggccacgtgaagcgcgggaagtgggtgccctcccatcagcatctcaatgtatcctacctgctggtggccgacgagcgcgacgccctccagatccgggagggggagaacagccgggtgggctggcttccggcggagcgcctgctggagtacaccaacgagtggcagatggacggcgtgtacgccaagctgttggcccgggcgagggagctgctgcggaacgcataagtggattgcgtggacgtgccctcttgaaaatattgggacaatgtgatacagtaaggatgccaagtgtgccggcacacttctgtcttttgctagcaaaagacaataacaactgacagcagtggagccggggcgcaattttgtaaaaggaggaacaacatgaaacgggcaaaaaaaggattggcggcgctactgtctgtgtgtatgttgctgagccttcttcctgtgactgtctttgcggaagagactccggcagcggacacgctggaggaagcggctcctgcgccgatggaggaaaaaggcgcctatgacgcgctgatgcaggcgatcgaagccgctccagatggggaggagaccacggtcgtcctgacgggcgatatcaccgggatgaccacggatcagatcatcaccattccagagaagaaaaacatcgtgctggacatggactgccacagcatcaccgtggcgtcgaactttacgggcaggccgattgtgaacaagggtactcttacggtgacaggcgacggcgtcattgattcatctgcgtctgaaaccggagtgggcgcaatcaacaaccaaaatatacttacgatcgaaaatggaacctatcgcggagcgacctatgccggcggcgcggcaatccggaacacaggggcgtctgcggtactgaccattgaagacggaacctttgagaaggctacatgcgcggtttataacgagggtaccgtaacgattgaagacggaaccttcacggggactacgtgcagccagtgcaacggtaatgtttggggatatacgatccagaatggagctgccgattcccaaatgaccatcaacgggggaacctttacaggggtacagggcgcggtatccgcttctgtggggtacttcgaaatcaacggcggtacgtttaagtcggtcaagtgtgtcaacgattccaagcacacggccacgttctacgccctctatgtggcgggtgaggtcggcgtggtaaaagccgtaatcaatggcggtacctttgagacagagggaacgtataccgcggctctgattggaaacgacaacactggcggggacgggggcatcaatgaaaaggccaccgcggtcatcaacggcggcgtctttaaggccccggaaggagtgcctgccctgaaaggtgcggaaaagactggtaaccccatcatttatggcggcacgttctccagtgatgtgagcaagtatgtggcggagaatgccacgataaccgaaggcccagacggtacgtttaccgtaaacgaactggatgaaacgaatggtgtggccgaggtgggcggtaggtactacgccagcctccagaaggcggtcgacaacgccgggaagggcgagacggttactctgctccaggatacggcggaggatatcgtaatccccgagggagcggagctgaccctcaatctgaacggaaagaccttggccaaccacgagaaccacacgattaccaacaagggcactctgaccatcaccggcggcggcacggtggacaacgtgacccacgccagagcggcaatccagaatgagcccggcggcaatgtggtgctcaacggaggcgcgtatacccgcagtaaagagaacggacagaatgccgaagccagcggcgggaattcctattacaacatcgtcaaccacggcaccatggagatcaatagtggagtttccgtcacgcagaacggccagttctccagcatgattgagaacggctggtataacggaagtcagaatacgggcaaggaaaactccgtgctgaccatcaacggaggcaccttctccggcggcctgaacacgatcaagaacgacgactatggcgagctggtcatcaatgacggcacctttaccagcatgtcccaggcagcgttcctgaactggaatgtggccactgtcaacggcggtaccttcgatgcggcgggcgcctccaacggcgtcattctgaacggctatatcgacggcaccatggatcagggcaagctgaccatcaacggcggtaccttcaacgccggggaaaagacggtaatcaccacaatgggcggtggaacccacagcggcgatattgagatcaccggcggcacgctgaacggctccattgtcctcacggacagcagcgagggcgcccggctgaccattacccagaaggccaaggttaccggaaacgtgaccaacagcggcaaggcggatgtggccatcaccaacggcgctaccgtggacggccaggtgtccaacagcgccgacggcaccatgagcgtggtcaacagcaccatcggcagcgtgcccgagggcaccaccgcagaaaagatcgtcattgtcaacagcactgtggatggaactctgaccacgaatactgccgaaaatgcggcggtgatggtgggcggcaagacctatgagaccttgggtgcggcgatcacagcggccaaagccggggacaccatctacgtcctgaaggacatcccagaggcggccggcattgccgtgccctctggtaagaactttaccattgattttggcggccacacctataccctgaaggacccgggagcgggctctgccggaacggagagcaatggattccagttcctgaaggattccaccatcaccctcaaaaacggcaccgtccgtattgccgagggcacgacctccatcaagcgcatcattcagaactatgcaaacctgaccctggaggatatgcacttcttcgccgagcatcaggcggacggcgaggactacgcgctgagcttcaacaatggcagcatcatcttcaagggagatacggatatcgtgaccaccagcgacgaagccattgcgtttgatgtctgtaagtatagtagctatccttctaccaatgtcacctttgatgagagctacaccggcaccatcaacggcaagatcgtgtatgacagcaccgacgcggacacacacaagctgaccattcagggcaacggcaccttcggtgccattgaggcggccagcggggccgcagaggctgcaaagagcggcatcgaggttaccagcggtcactttgccaagcccgtcaacgaggactatttggctgacagcgtcaaggcccagttggagagcgcctccaaccccgaggctccctacagctactatcccagcctggaggccgcccaggccgccgcccagccgggcgacaccattactgaggtaaacgccacgtctggcgagaagaagtacaccgttaccctggactatgccgacggggatacaaaggacagcgtctacacggtcactgaggggaccgagctcaccctgcccactcccagccgctccggctacacctttgagggctggtatgacggcagcagccgggtgagcagcccctacaaagtgacgaaggatgttatcctgactgcggagtgggactacaacggcagcagctcctcctctggctcgacccggtacacggtgagcgtggaggacacggacaacggcagcgtgaaggtgagccccacccgcgcctccaaggggagcacggtgactgtcactgtgaagcccgacgaggggtatgagctggacaagttgaccgtcaccgacaagaacggcgattccgtcaagctcaccgacaagggcgacggcaagtacaccttcaaaatgcctgcctccaaggtcacggtggaggccgtgttcacggcggtggagccggagccggagggcctgcccttcaccgatgtaacgagcggcgactggttctatgacgccgtggcgtatgtgtacgacaaggggatgatggaggggaccacggacaccaccttcgcccccaccatgaacctgacccggagcatgatcgcccaggtactctacaacctggaggagcggccggaggcacccggcgcggcgggcttccccgacgtggcggcgggcgcatggtacgccgacgcggtgaactgggcggcggcccgcggcatcgtgaaggggtacgacaccggcgcgtttggaccggaggacagcgtgacccgggagcagctcgcggcgattctgtaccgctacgcgcaggcgaagggctatgacaccacccagggcgggatggccgtgcgggagttcagcgactccgccagcatctccgactgggcgcagacggccatgagctgggcggtcaatgcgcaggtgctctccggcaaggggaacggcgtcctggatccccagggcaccgcgactcgcgccgaggtggcccagatgctgatgaacttcggcgagcacgtgggctgaacacagccggtcaaaaagcaaaatccccccggaatcccattgggattccggggggattttattgcttcgcttattcggcgtcctcctccgattcagagggggccagcttggtgacggtggcccactctacccggcggtcggtcagctcctccacccggatgtgcaggccgtacagctccacctcggggtggcttccgtcctccgggatcacgttgagctgggcaaagaccaggccgcccagagtctcggactcctcgtcctcgggaaattccatgtccagggcctccgccacatcgtccagctccgccgagccggcaatgcgccagcggttgtcgcccagggcgatgatctcctgatcctcctggggatcgaactcgtcgtagatgttgcccacaatctcctccagcagatcctccatagtcacgaggccggcggtgccgccgtactcgtccaccacaatggacaggtggatcttccggctctgcatgtcgcggaagagcttatcggtgcgcaccgactcgggcacgaaataggccgggcgcagcagctcccgcaccgggcggggggaggctttgcgggcgttgagcagccagtcgcgggtgttcaggatgccgatgatgtcgtcggcgtcctcctcatacaccgggaaacgggacaggccggaggactcgatggtctgcgcgatctcctccgccgtgtcgtccacccacagcatcaccatgtcggtgcggtggatcatcacgtccccggcggtcatgttgtcaaattcgaagatgttctcgatcatctccttctcaccggcctggatggcgcccttctcctcaccgatgtccaccatcatgcggatgccctcctccgatacctcatcgtcctcctcgttggggtcgatatgtaccagacgcagcacggcatttgtggagacggtcagcagccagatgagcggccgcatgacggcggccaggaaggccaccaccccgcaggtgaagcgggccacctgctcgctcttcttcatggccacccgcttgggtaccagctcgccgaagaccagcgtgaagaaggagaggataatggtgatcaggataacggacagggtgtgcaccgcggcctcggcggcggcggtcagggcatactgggcggcgaaccactgggacaggcggccggccaggttgtcggcggcgaaggcggagcccagaaagcccgccagggtgatgccgatctgaatggtggagagaaacccggtgggctgctccacgatgtgcaggagacgggcggcctttttgtcgccctcctcggcctggtggcggatcaccgcctcattgagggagatgaccgcgatttccgtggcggcaaagtatgcgttgattgcgatgagtatgacctggagtagaagctgaggccataaagggggctgcaagatgattcctcctctttctgaaacgacagattgcatgtgttccatgcgttacagaacttagtatatcatatttatgaaaaaaatccataagcatgcggaaaaaagttgcggcgcatgttataataacctgtacgcgtgagagggggaaaccgggatggaaaccaaagaacggacggaggggcggctgcggcgcttcctggagcagccgtgcaccttcctgaaatgggtgctgtttgccggggtgatcggcctgacggccggcggggtcagcactgccttttattacgcgctgaacgccgtcacagccctgcgggaggccaacccgtggcttctgtggctcctgcccctggggggcgtggccattgttctgctctaccggatttgcggcatggagaaggaccggggcaccaacttcgtcctggtggctgtgcgggagaaccagcccctgcgcctgcgcacggcgcccctcatcttcgccgccacggtgctcacccacctgctgggcggctcctccggccgggagggggccatcctccagatcggcggctccctctcctccaagatcggacggtggatgcacctggacgacaaggacagccgtatcatcaccatgtgcggcatgtccgccgccttctccgccctcttcggcactccgctgaccgccgccatgttcgccatggaggtgaccagtgtgggcgtgctctactacgccgccatcgtgccctgcgtcctctccgccattatcggcctgtgggtggcccagctctgcggcgtgccgcccaccgccttctccctccagggggtgcccaaccttacccccgtcacccttctccagtgcatcggcatgggggtcctcttcgccctgctttccatcctgttctgccggatgatgcacgccgccccccggctgtacgacaagtacctccccaaccccgtggcgcgggccgctgcgggcggggcgctggtcatcgcgctgaccttcctggtgtggctgtggaacccgggtacctacgactacaacggggcgggcacggcggtgatccacgccgccatcggaggggaggcccggcccgaggcgttcctgctgaagatgctctttaccaccattaccctgggggcgggcttcaaggggggcgagatcgtcccggtgttctttaccggggccaccttcggctgcaccgccgcccccctgctggggctgcacccctcctttggagcggggctgggcatggtgtgcgtcttctgcggcgtcaccaactgccccatgacctccctgctgctctccctggagctgttcgccggggacagtctgggcatgttcaccggccagagcctggggctgttcgccgtgtgtatcgccgtgtcctacatgctctccggctattacggcctctacagcgagcagaagatcgtctacagcaagctccggccggagtacatcgacaagaaggccaatgacgatgagtagggggcaggagcgtcagccttttgcagacaggcggcccaactcaattcccagcgccagggcataatagaagcagccctcccgatccagggcctttttccggacgctcatgacttgcccgccatcgcggatgagctggagagcccgcttgactatctggcaggccgaaccggtgagctgtagggcgcggcatccctgacgcgccgtttccccttgacagagcaaggaaatccacatagaatgaacatcttcgacaggatgcgccccgcccgacgacggcccaacgacagcatggaagtagagaaaggaaccttgagcagctatgaacatctttgatatcatggggcccattatggtggggccggtcccgtggggcgcaagcgccccacggattcctctgaaatgattggaatgctcggcggaaatgaattccgcctgcgccgaggttttgccttcggcaaaacgctcgtacgcgccgaaggcgcgggggcgcatacgcgcccgacgacggcccaacaacagcatagaagtaggaaaggaaccttgagcagctatgaatatctttgatatcatgggacctattatggtggggccggttccgtggggcgcaagcgccccacggattcctctgaaatgattggaatgctcggcggaactgaattccgcctgcgccgaggttttgcctcggcaaaacgctcgtacgcgccaaaggcgcggggcgcatacgcgccggacgacggcccaacaacagcatggaagcaggaaaggaaccttgagcagctatgaacatctttgatatcatggggcccattatggtggggccgtcgtcgtcccacacggcgggggcggcaaggatcgggtttctgacccgcaggctgctggggagcacgccccggcgggcagagctgctgctccacggctccttcgccgccaccggcacgggccacggcaccgaccgggcgctggtggccggcctgctggggatgcggccggacgacgcccggctcccccgctccttcgagctggcggaggcggcggggatggagctgaccctggggcgggcggccctgcggggggcccaccccaacaccgtgttgctccgggtggaggacgcggcggggaaacggctggaggtgacggcctcctccctggggggcggccgggtgcaggtgtgcgccatcgacgggctggaggcccgcttcaccggcgagctgcccaccctcatcatccgcaaccaggaccggcccggcatggtggcggaggtcaccggcgtgctgtccaagcggcaggtgaatatcgctaccatgcagctctaccgggatatgcggggcggcctggcggtgatggtcatcgagagcgaccagcccatctgggcggcggcggtggaggagctgcgggcctgcccgggcatcgagcgggtcacctatctgaacatggagggggaggactgacatggcgttttcatcggtggaggggctgctccaggcggccgggcaggtccccctgtggcgggcggtgctggaggacgacctccgggagcggggggtggacgaggcccgctcctggcggcagatggccgcgctctggacggccatgaaggccccagtggcggagtatgaccccgccgcccgctcccgcagcggccttaccggcggcgccggggccaggctggagggggaggggccggggctgtgtcctccctttctgcggcaggtgatcgccgccgccctcaagacgggggagtgcaacgcctgcatgaagcgcatcgtggccgcccccacggcgggggccagcggggtgctgcccgcggtgttcctccccctccaggccagggacggcctggacgaccgccggatggtggaggccctctatgtggcggccggcttcggacaggtgatcgccacccgcgcctccatctccggggcggaggggggctgtcaggcggaggtgggctccgcctccggcatggcggccgccgccctggtttatgtgatgggcggcacgcccggccagatggcccacgcctgcgccatggccctgtccaacaccctggggctggtgtgcgacccggtggccgggctggtggaggtgccctgcgtcaaccggaatgtgatgggggcggtcaacgccctgtcctgcgccgagatggccctgtccggggtggagagcgccatcccctgcgacgaggtcatcgacgccatgcgggccgtgggcgatgctttgcccgcctcactccgggagaccggcagcggcggtttggcggcgacgccgacgggacggaggcttgcggagcggctgtagaggcgcactgtgtgcgcccgcgggcggccacaagggccgcccctacttggaggcgggggtattgggccacccgcagagttgtaggggcgggtgcccacatccgcccgcggctgcgggacacggtcagagccattggtccggcgggccgatgtgggcagaaggggaactgacacgaaggggcaagagaagctgccctggggcgccggtccctacagaccggggctttggggcctgtttgaaacatgtcaacaggcccaatcggcgggccttttgaccgctggacggcgcaatttttccttgaaatccgtccggattcccgcgaaaaaattgcttgccagcagccataatccctcgctgctgggcacatcgacaagtttcaaacaagccctagtctggcggggaagaaaaccacgcccgtagaggcgcactgtgtgcgcctacaaaaccgaagaaaagaggaaaaaccatgctgcaattcaatcattttaactttaatgtgctggatctggagcgatccctggccttctaccggcaggcgctggagctggaggtggtggaggagaaggaggccggcgacggctccttcaagctggtgtacctgggggacggggagaccggcttccgtctggagttaacctggctgcgggaccgcaccgaaccctacgatttgggggagcaggagttccatctggccttcgtcaccgaccgctttgatgcgctgctggcgcggcaccgggccatgggctgcgtatgctttgaaaacccggatatgggcgtttacttcattgaggatccggacggctactggatcgagctcgtcccggagcgggggtaaggggtgagtcagaccataggcggccggctggcctacgccgatctgctgcggtgtaccgccatgctggcggtgatcgtggtccacataaccggcggggccctggaggcgtcgccggtgggaacgcccgattttatggtgctcaacgtgtacgacgggctgacccactggtgtgtgccggtgtttgtcatgctctccggcatgttcttgctggaccccaagcacagcctccccccctccaagctttttttcggccatatgctgcgtatcgccgccgccttggcggtatgggggacggcctatgcgctggtggaacgggtacaggtgcacggcctgagctgggagagcgtccgggcagccctctatcaggtgctcctgggaaagacctgctttcacctgtggttcctttatatgctgctcggcctgtatctggtcaccccggtgctgcgtgccttcgtgcggggggcaggccggggggatttccactggtttttcctgctggtgtttgtcttcaccttcctcctgcccacccttctgcgcctgcggcccagccagacggtgagcctctaccagagctacctgaatatcaagctggtgctgggctatgtgggctactatgtactggggtattacttaaaggagtacacactgagccgcccggcggagtacctcatctacctgctggggatcgcaggggcggcggtcaccgtggggggcaccgcctggctgtcccagcagcgcggggcgctggcacagaccttttacaactatgacagtcccaacatcgccctgatgagcacggcggtctttgtgctcttccgctatttgctgggggtgagcgacgagcgctcccgccgccagcggttttccggcgtggcgaaggtgtccttcggcatctatctggtgcacgtgttcttcctcatgttgctgcggaacttcggcattaccgccctgtccttcccacctgtgctgtcggtgccggtgctgacggcggcggtattcctggcctccctggcggcggcgtggctcctctccaaggtgccgttcgtgggcaagtatttgacttaaaggagaagcggcatgctcttttccagttcggtgtttctcttcctgttcctcccggtggtcctgctggtgtattatctgcccctgcggaggtggcggcaggggcagaacgtgtttctgctgctggcctccctgggcttctatgcctggggggagccctggtttgtactggtcatgctgggctccatcctggccaattacggcttcggcctgtgggtggatgcctgcaagcgggcgggacggacctgcgcgccccctcttgtgaccgccctggcggtgaatcttggtatcctatttgtatttaaatacctgacgtttacactgggtattctgaaccgcctgggggcggcctttgccattcccggtattgagctgcccatcggcatctccttctttaccttccaggccctgagctatgtgctggacgtccaccgggaccggggggaggtgcagcgctcgcccctgaaggtggggctttacatctccttcttctcccaactcatcgccggccccatcgtcaagtatgagacggtggcccagcagatcgaccaccgcaaagagacctgggcggacttctccgccgggtgcagccggtttatcgtgggtctgggcaagaaggtgctcctctccaaccaactggcggtggtggccgaccgggccttcggcctgggggacggcctgtctgcctctttcgcctggctgggcgccctgtgctacaccctgcagatctactacgatttctccggctactccgacatggccatcggcctgggcaagatgtttggcttccacttcctggagaacttcaattacccctacatctcccggtccatcaccgaattctggcggcggtggcacatctccctgtccacctggttccgggactacgtctacttccccctggggggcagccgggtggactccagggccaaacacatccgcaacctgttcgtagtgtggctgctcaccggcatctggcacggggccaactggaccttcctcgcctggggactgttctacttcgtgctgctggtgctggaaaaatatggtggtcttggccggggctggccggtgtgggccaaatggctgtttaccttcctgatggtgaactttgcctgggtgcttttccgggcggacagcctggcggcggcggggcagtacctccaggccatgttcggcctcggcgccggggggtgggacgatctgaccgccctctacctgcgggagaactggacggtgctggcggcgtcggtgctctttgccggcccgctggccccccgccttcgggactgggccgcgaaaaaggacagccccctgctggacgcgggctacgccgtgctggcggcggcggtgttcctggtgtcggcggccttcctgatcaagggtacctacaaccccttcatctacttcaatttttgaggaggcagaagcgtgaagcgacgcaataccatgaccgccgcggtcttcctgctggcggtggcggcgggattcctgctgctggccacctccttcttcggtggggaagggaagcttgaggccctgctcaagaccttcctccgggagcgggacgtgatggcctttgtggacggggcggagtccgccgtcaacggcgatctggaccgggatcacctgtttattcagctctacggcggggtgcagcggctctccggccgccgggtggtggaggacgcggtgggggaaaataccgtagtccggttatccaccggcggactgaattttgtggatcttcaggccgcgcccggcgtcgggccgcaggtggcggagaacgccgccgccacggcggcgtttgcccagagcctggaggctctgggcatcccctatctctacgtgaacgccccacagaagctccagcgtggggaggcgctgctcccgaccggggtggaggagtacggcaacgagagcgccgacgcgttcctggaggagctggagcggcaggggacggactatgtggatctgcgccccctgtttgaggagaacggcatctactccaactggtttttccgcaccgaccaccactggaagccggaggcggcctttttcgcctggcaggcgctgacggacgagctggaggggcggtacggcctggccgccgacccggccctcaccgatccggccaactgggatacccgtgtgctggagcacttcttcctgggcagccagggcaagcgggtgggctccctctacgccggggcggacgacatcacgctttatacccccaaattcgacaccgagctgacctattcctgccccgcctacggttttacccgcaccggcccctttgagacgtcggtgtgcttccccgagcgggtggcccagcaggactggttcaacggcaatccctatacctactacgccggcggcgactaccccatcgccaccatcaccaaccacaaaaatccggacgggccgcgggtggtgctgctgcgggactcctttgcctgcgccctcacccccttcctggccctgtcctgctcggagctgaccaccattgatctgcggtatttcgagggggatttgctggacaccatcgcgggcctggagccggatatagccctcaccctctacgctgcgagcaccacccggctggacaacctgttccaatatgaacatacggaggaatgagccttgaccatacagagacaaccctccctccggcggctggactggcactatatggccatgcagatcggcttttgggccatgtttgcctccatcgtggggtaccagaccgccctgctgctggaccggggcttttccaacggggaggccgggctgatgacctcggtgcgctgcctggcgggcattgtgtgccagcccctgctggggggctttgccgaccggcacccggaattccccctcaagcgtatcgtctccctgtccatgctcctctccctgggggtgagcgtctggtactggctcgccccgggcatggggctgggggagaccgccctggtgtgggcggtcatcggcgggctggaggtgtcctcctaccccctcatggacgccatggccatccagttcatcaacgacggcgtccccatccgctacagtctgggccggggactgggctccctggcctacgccctgacctgtgtgttcctgggcttccaggtggggcgctccggggtggagagcacgctgctcacccatgtggtgctggtcgcggcggagatcgccctggtggccacctacccgccctaccggggcaggccccgcgcccgggatgcggaggggccgaggccacagtcggccctggccctgctgcggtccaatccgtcctttaccctgatgctggccggggtgctgctgagcctgacggcggtgctccccctgtccaacttcctggtcaacatcgtcaccagccggggcggcaccgatgccgacttgggcctggccatgtttgtgatgggggccttcgagctgcccaccgcctttctctttccacggctgctccgccggtttggcagcgggcggctgctggtgctcagcgctgtgttcggcaccctcaaggccgtggcgctgctgtgtaccttcaactacgccggcgtcctgctggcccagcccctgcaactgctgggctacggcctgttcaccccggcgtcggtctactttgtcaatgagtccgtgcccgaggctgaccgggtgcggggccagacggtgatgatggtggcctccaacggcatgggcggaatgctgggcggcctgctggccggctggaccttggatatgggcggcgcaaactggatgctcgccgcctgtatcgtctgcggctgcgccggcgcggccctctgctgggcggcgctccggtgtccggcccggcggacggtttgaaaaatttgtaggcggaaatcataaatttaacccatttcacccttcccaaacggggcgggatggtgtatgatatctgcggatttttgttgagacctggagattcggatacccgacggagggacgattgtatgaacatgagaaagaccaaaatcatctgcaccctggggcctgcggtggaccatgcggagaccattgaacggctgatccggactggcatgaacgctgcccgcttcaacttctcccatggcagccacgccgagcagttggcccggctgaatatgttcaagaaggtgcgggacaccctgggcgcccccgtggccaccattctggacaccaagggccccgaaatccgtataaagacctttgccgacggccccgtgactctggagcagggccagggatttatcctgaccaccgatgacgtgcccggagacggccaccgggtgagtgtcacctatgccaacctccacaaggaggtggggcccggctgccgcatcctggtggacgacggcctcatcgagctgcgggtccagaaggtagagggccacgagatccactgtgaggtggaaaacggcggccccctgtccagcaacaagtccattaacatacctgatgtgcacattctgttgccctccctcaccgacaaggaccgggaggatctgaagttcgccgtggacaacgactttgacttcatcgccgcctccttcgtgcgcaaggccagcgacgtggaggacatccgtgccgaactgcgcaagcacggcggcgacaatatccgcatcatcgccaagatcgagaaccgggagggcgttgagaacctggagggcatcatcgccgcctccgacggcatcatggtggcccggggcgatctgggcgtggagatccccgcccacgaggtgcccatcctccagaagaagatgatcaaggccaccatccgggccggcctgccggtcatcaccgccacccagatgctggactccatgatccgcaatccccgtcccacccgggccgaggtgtccgacgtggccaacgccgtgttcgacggcacctcctgcgtcatgctctccggcgagacggcctccggcaagtaccccattgaggccctgtccaccatggttaacaccgtcaccgccgcggaggaggccatcgactattggggccgcttccgggagcgcagcctgctgcccgtggtatccggtatcagcgacgcaatcactcactcctgctgcctgaccgccatggatctgaacgcctcggccatcctggcggccacccggtcgggctacaccgccaaagtcatttcccgcttccgccccgcctgccccatcgtggccctgtgccagaatgagtccacccggcggcagcttgccatctcctggggcgtgcacccctacctgtccggcgaggtggattccaccgaccggatgttctccctggctgtggatgtggcccgtaaggagaacgcagtccagatcggcgatacggtggtgattaccgccggtgtacccctgggccagtccggcacaaccaacctgatcaaggcccagattgtggagggcggcctgtaaaaacctgtaagaaggaacgcataacaagaaccggaccggctcctacgtatgccggtccggttctttatgaaaggcccgcggccccctcagatggtgccgccatagtctaccacaagggtttcaccattgacggccttagactcgtcactggcgaaaaacagaatggcgttggcttggtcctcaggctgggtgcggggaactgagccgtcgaagtggcgggcgcacgcccgtgcgaactccttgtcaaaggcggcggcgttctctggggagaagatgggagtctcggtggggccggggcagacggcgttgcagcggatgccggtgccggcgtactgtatggccacattcttggtcatgccgatcaccgccatcttggcggcggtgtaggagatgccagcattggagcgggtggcgccgatggaggagatgttgacgatggagccctggccggcccgctccatgtgtggcaggacctccttcatcatgaagtacaccgagttctggtctgtggagatcaccttctcccacagctccagatcacagttggtgatggatttgttcttatcatcaatgccggcgttgttgaccagaatatcgatgcagccgaaggcggccacagcggcctccaccaagcggcggcagtcctccggctggctcacgtcggtggctacggaaagggcccgcactccctgggccacggcataggcctccacctccttaagcttgtccagccgccgggcggccagcaccagatcagccccctccagtgcaaaacgctccgcggtggccttgccgataccggagttagcaccggtgatgattgcgacttttccttccagacgtcccatggttgtgtcatcctttctgtcgtgggtagcggaaggacgggggagaggaatacagcgcgtcccgccccttccgccgagctgctcccagtatagcggaaaaagcgggacatgcaaaatgccgcttgcggcgcagcattatgccgtagtagttataccgggcgtgcaggccagctttgcctcctcctgggctagccaggcggaggcgaagtcgatgaaggcgttggccgcgtcggtgagggcatagcccttgtgataggagacccccaggctggccggtggaagcccctcccccaggggcagcacccggatggcggtgtcggggtgtagggtgcggaggcggagcatctgggacacgggcatcagcgccgcgccggccccctgctccagcaggcggtagaccaggccggtgctttccacctcgtaggctaccgtgggctcaaagccacgggcgcggcaggcggcgcggagggcgcgggcatccagccgggaggcgtcgcagatcaggggttggcccgccagctcagccagctccaccgtgctatgccccgacagggggtgctcccggtggagaaacaggccgtaggccatctggcccagcaggcggaaggagagcagcgtgtgattgaggggccggggggtcacggccagggagagggtgcgctccaccaactgctgggccagccgggtgggctccccctggaactggcggataccgatctctgggtggacgcgggagaaggactggagcacgtcgggcaggaacccgtcgattgagcagcccagggagagcattttctggctgttctcatacagccgctgcaccgtctgcatgcaggtgttcagctcgccgaagacgttttccaccccggagaggaaaatccgtccgtattcgttgagcaccacctttcccttccggtgctcaaacagggggacccccagctccgtctccagccgggcaatggagcggctcaggttgggctgggtgacaaagagctcacgtgccgcctgggacaggttccccgtccgggctgcggtgcggaaatagtgaagctgggagaggtccataggttcacgtcctttcccctacagtatactggatgtttccgcaaaagaaaagggaccgcacgcagagctgcggcatacaaatgggaaaaggggggggagcatatggagaaccgcattctggcccggctggacggccgggcggacccggagtggctgctcaccctgctcagcgtgctgccgctcaacacctacaccctggaggagtggaacgaggcactgtcccaagcggcagggaggcggatcttctgcccgtcttaccggacgttatccgactatttacaccggctggttttaggagtacaatagccttgtagaaactgcacaaggaggtgccccatgaaactgacctttttcggcgcggcaagggccgtcaccggaagctgccactgtgtggagtgcgggggaaagaagattctggtggactgcggcttgcagcagggccgggacgagcgggacaaccaggagctggactttgccgccgggtacatcgacgccgtggtggtcacccacgcccacatcgaccactccggccgcatccccctgctggtgaagcagggcttcaccggcaacatctactgcacccgcctgacggggcagcttctgtccatcatgctgcgggactccgcccacatccaggagagcgacgcccagtggcagaaccagaagggcaagcgggccggggaggagccggtggaacccctctacaccgttcacgacgcggaggaggcggtcaagcgcatcgtcacctgcgagtacggcaccaccctccagatcgccgacggggtgaaggtgcgcttcgtggacgccgggcacctgctgggctcggccagcgtggagatgtggctcaccgagggggacgacacccgcaaggtggtcttttccggcgacatcggcaaccgggatcagcccatcatccgcgacccccagtacatcagggacgccgactacgtgctcaccgagagcacctacggcgaccggctccacgacatggacaaagacccggactacaccgccgatctggccgccatcatcgacgagaccctgggcaatgggggcaacgtgatcatcccctccttcgccgtgggccgcacccaggagctgctgtacttcatccgggagatgaaggagcagggcctcgtcaagagcgtgcccggcttttccgtggtggtggactcccccctggccggcgaggccacccgcatcttctccggggatctccacggctatctggacgaggaggccatcgccgccctcaagggcggggccctgttccagttccccggcctcaccatcaccgagagcagcgatgagtcccgcgccctcaacctggaccctaccccgaaggtgatcatctccgcctccggtatgtgcgacgccggccgtatccgccaccacctcaagcacaacctctggcggccggagtgcgccgtggtgttcgtgggctatcaggccgagggcagcctgggccgacggctcctcaacggcgtcggctcggtcaagctcttcggcgaggagatcgccgtgcgggcgcggatcgtcaacttccacggcctctcctcccacgccgatcgggacggcctgctgcggtggatcgagcacttcagcccccggcccaggcaggtgttcgtggtccacggcgaccaggaggtgacggaggtctacgccaacaccctccgggagaagggactggccgcccacgccccaaactacgaagaggtctacgacctgctggataaccggatgctctcccccggcctgccgccggagaagaagcccgagcccgcctccggcggctcgccggcctaccagcgcctggaggatgtgggccgcaggctcatggaggtcatcgcccacaacaagggcggcaccaacaaggatctgggtcggttcgccgaccagctccgcgccctcatcgagaagtgggatcgctgacgcgcgtcccaaacccccggcccgcagggccgggggttttccgcgccccgcatccgcgcaagagcgccgccagctttgctggcggcgctcattttgtatttattcggccaggctgctgtggccccgcttgaggtagcgtccagcgccccgcttgcccacgaactggttgtcccgggccaccacttctccgcgggagagcaccaggtcaatggccccctggagctccataccctcatagcaggtgtaatccaccgccgagtgcagcccggcgtgggtgagggtgcggcgcttggccgggtcgaggatgaccacgtcggcgtcggcgccgggctggagggtgcccttccgggggtagaggccgtagaggcggctggggttggcgcacagcaggcgcaccagctcgcagatcgacaggcggcccttggccaccccctccgagtacagcaccggaagccgctcctccacgccaggggcgccgttggggcaggcggtgaagtcacccgcgccgaactgcttctccactgcgaagcggaaggggcagtggtcggtagccacggcgtcgatcaccccgtcctggagcccctgccagagggcgtcgcagtccgcctgggtccgcaggggcggggacatgacggccttcaggccctcctgggggtctgcgtaggcggcctcggtgagggtgaggtactgggtgcaggtctccacgcccacgcccttctgccgctgggcacgggccttgcgcacctcggccaggccggcggcgctggacaggtgcaccacgtacactggcgcctccccggccatggcggccaggtggagcaggcggctcaccgcctccgcctcacagcgggcggggcggctcctggcgtggtagataggctgggtgaggccctgggccttgtaccagccccgcaggtagttgaccactccatcgttctcgcagtgggcggggatcacgataccgtcctccttggcctggcggagcacctggaacagggccccgtcgtccaagccaaagtcataggtcagataggccttgaagctggtgataccctcccggtcggcgagttcccccatctcccggagcacccgttcatccacatgctggagcacgccgtggaagccgtagtcgatgaccgcctttccgtcggccagacggtggtactcctccacctggtgccacagggagcagcccttggggccgaaggccatgtgatccacgatggtggtggtgccgccgcaggcggcggccacggtgccggtgtagaagtcgtccaccgcccggtgggccccggcctggagatccatgtgggtgtgcacgtccaccgcgccgggcaggacgtacttgccggaggcgtcgatcacctgggcgtccgggaccgacagccccgcccccacggccttcaccacgccgtcctccaggagcaggtcggcccggaaggcggcggtgtcgctgacaatggtgccgttttgaatgatggtacgcataagaaccccctttatcagatgtcggatgtggaaaccaatgtgttcagcggtcctggcgcttgcacagggcgctgtaaatcacgaaggcgaacacacagcccagcaggtaggagctgtcgtagatccacctgaggacgggaataaactggcacacgaaaatgaaaatgaacaggactgccatggtcaccagggccagcacgttccagccgccctgatagtagtaggcgccgccgtcctggtagtagaggtcgggcaggcggagccggttgcggtactggctccacagggccgccagacagatgccggtgatgggacccaggaacacggccaaggttccatttaaagtatacacatagctctcgggattctcaaccagtttccagggcaggaagcagatggagaggatcgtggccaccacgacggcctttttgtaggtgagcaccttgccaaagagggaggagaacaccacggaggcggccgccaggttgcaggctacgttcgtggtcagggtggccaggatgatgaacagggagaagatgatcaccacagcgggattgccgaagtgggagaccagaatgctgggatcccagaaggcctcgccgaaggccagctcggagccggaggtgccgcagatgcccacaaagacgatgaaggccgtcatgatgggcgcaccgatgagctggcccttcacctgggccccctcagtcttggcgtggcgggtgtagtcggagaaattcagggcgatggtggcgtcaaaggcgatcatggaagtcagggaggggaagaactgagaccagaagctctcgccgttgccgcctgccacctgagtggtgaacagtgcggcaaatcctcccttctgactggccagccagaaggcccagacaatgactacgccgctgagaatgatcaggatgggggcggcgaaatcctccaggaagcggatggcccggctgccgtggtagccgatgtagaaattgatgagtacaaacaggccgaagctgaggaagctgtggaacgccagaccggtgtaggccgggaagatgacggcgatgatggcgtccagagctgtgccgccgatccagttctgaatcccgaaccacaggcagcccatgaaggcacggatgatggtgggaatggccgtgcccttgggtccgaataccatcttggacaggacgggaaaactggcaccgtagcgggagccgaactttcccagcaggatggaggggatgaggaccagcgtgtggcccagcacgcagataaacagcgcctgataccaggttaggccggcggacagcagggcgctggccatcatatacacgggaatggaaaccaggatgccggtccagagggttatgtagttcttggtggaccactcgcggccggacaagggaatgggctttgtgtcctcggtgtagatatttttgtgggactggatttcctgaacgccctccggggtcagctcaaccacgaaggagcgctccgtctggagctctgccatagaatagcctcctctgttaaatggataaaacaaaaaataattagcgctaaatatttttcagatcaataatataccggagaactcccgttgtaaaggtcaaatctgatgaaaaaccagtaaattttttgtgcagaaaagcaaagaaaagagagccgtataactttctcctggtctgccatactaaccccatcaaggaagaaacaggggaagcgcgatggaacgatttcaactcaagcccacaattttctttggatcggacgccctggcggccctggaggggctggccgggcggcgggtgatggtgattaccgactccttcctggcccagtccggcctgctggagcgggtacgcgcccgcctgcgggactgcaccgtggaggtgttcgaccaggtggtgcccgacccgcccctggagctggtggcccagggggccagggcgctggcggagttccgcccccaggcggtggtggccttcggcggcggctctcccatggactgcgccaaggccatgctggagttcggcaagaagctggggaccggggcggacatccgctttgtggcggtgcccaccacggcgggtaccggctcggaggtcacctccttcgccgtgctgaccgaccgggcgaagggagtcaagtaccccctggtggacgacgcccttctgcccgacgaggccattctggacccctccctgctggcgggggtaccccccgccgtgacggcggacacgggcatggacgtactcacccatgccgccgaggcctacgtggcccgcggggccacgccctacaccgacgccctggcggagaaggcgtttaccctggcctggcagaacctgcgccccgcttgggaaacggcgggggagagcggggccaaagggaacatgctgctggcctccaacctggcgggcatcgccttcaacgccgccgggctgggcatctgccacagcctggcccacgctctgggcgggcggtttcacctcccccatgggcggctcaacgccctgattttgccccacgtcatccacttcaacgccgccgatgggacagcggcggagaaatacggacgtttggccaggctgtgcggcctggcggccaatccgcgctccctggccgcgggactgaaccggctgcgcgcccagctcaagctgcccgaacgcctgagcgcctgcggagtggagggaaaggagctcaccgctgcgctggacggcctggccgaagcggcgcaggcggatctctgcgcaccctccaacccccgccccgcggcggcggaggacttgaagagtctgctgagggagctggcgtgatggaggagaccttattatccgtcggcatcgacaccggcgccgcgtctccccagacaggccagcctgtttgggggccccatatgatgttcgcatcctcggcggaagtgaattccgtctgcggaaaatctccgcgttgcgtcgattttacgggcatgcgcccgccccgcagagcgggggcccggtggtggaggtgccgaaatgagtgaaaccctgttatcggtcggcatcgacatcggcacctccacaacccagctcattctctcccgcctgaccctggccaaccgggctaaccccttctcggtgccccgcatcgccatcgaggatcgggaggtgctctaccgcagcgggattcacttcacacccctgctctccgacaccgtgatcgacgccgagggggtgcggaccatcgtggcggaggagtaccgcaaatccggctttgcgccggagcaggtggacaccggggcggtgatcatcacaggagagaccgctcgcaaggaaaacgcccgggaggtgctctccgccctctcccagttcgccggggactttgtggtagccaccgccgggccggatctggagtccattctggccgcccggggggcgggcgcggatgaatactccagggagcatcacacggatgtattacactttgacatcggcggcggcacatccaacctggcgctgtactcccacggagagctggcggccaccggctgcctggacgtgggcgggcggctgatcaagcttgaccgggaaggaaccgtgacctatgtctcaccggtgctgaagcgcggggcgatgtgggcatcgcctcctaccgttgggcaaaaggccgcgccggaggggttggagcccgtcatccgctccatggtggaggccctggagcaggcggcgggcctgcggcctgggcgggaccggctggacgcctttctcacccagggaacccgctgggagccccgggcggtgccggtggtctccttctccggcggcgtggccgactgcatctacgcgccccccggcgactggaaggcctacggcgatatcggcgtgctgctgggacgggccatcgcggcctccccggcctttcagggcgcggggcgcttccggggggaggagaccatccgggccacggtggtgggggcggggagccactccaccgagctgtccggttccaccatctactaccgggacatggccttccccctgaagaacctgcccatcctcaagctgactggagaggaggagcggggggacgccgccgccctggcacagtgcatccgggacaagctggggtggtttgccgacgagggcgggctgagcccgcttgccctggccctgcggggggagggaaacccctcctacgcccgggtggacgagctggcccgcgggattgccggggggctggaacccctgcgcgcccaggggatcgcccccgtagtgctggtggaggccgaccaggccaaggtgctgggtcaggccatggcccagagggtggagggccctctcctctgcctggacagcgtgggggtggacaacggtgattatatcgacatcggcgcgcccgtggcgggcggcgcggtattaccggttgtcatcaagacgctggtattcaacaaatcgtaaccgcgaaggagcgatcacatgatactcaaaacaaagctgctggggcacgtgtacgagtttaagtcggtaaaggacgccctggccaaagcaaacgaggagaagtccggcgaccggctggcgggcattgcggcggagaacgccgaggagcgggtggcggccaaggtggtggtggccaacctcaccctggccgatctgcgggccaaccccgccgtcccctacgaggaggacgaggtcacccgcatcatccaggacgacgtgaacgagaagatttacgaggagatcaggaactggacggtggccgagctgcgggagtggctgctggatgagaaaaacggcggagacgccatccgccgggtgagccgcggcctgacggcggagatgatcgccgccgtggccaagctgatgagcaacctggatctcatctacgcggccaaaaaaatccgcgtcaccgcccactgcaacaccaccatcggcctgcccggcaccctgtcctgccgcctccagcccaaccatcccaccgacgatcccgacggcatcatggcctccctgctggagggcctcaccttcggcgcgggggacgcggtgctgggcctcaacccggtggacgacagcgtggagagcgtccggcgggtgctggaccggttccaggagatcaagacccgctgggacatccccacccagatctgcgtgctggcccacgtgaccacccagatggaggcggtgcgccagggggccccctgcgacctgatcttccagtccatcgccggcagccagaagggcaacgaggccttcggcctggacggcaagctcatcgaggaggcacgccagctcgccctgcgggagggcaccgccaccggccccaacgtcatgtacttcgagaccggccagggctccgagctgtcctccgaggcccaccacggggccgaccaggtggtgatggaggcccggtgctacggcttcgccaagcggttccagcccttcctggttaatacggtggtgggcttcatcgggccggagtacctgtataactccaagcaggtgatccgggcgggcctggaggaccacttcatgggcaagctcaccggcatccccatgggctgcgacgcctgctacaccaaccacatgaaggccgatcagaacgacatcgaggatctggccgtcctcctcaccgccgccgggtgcaactacttcatgggcatcccccacggcgacgacgtgatgctcaactaccagaccaccggcttccgggagaccgccgccctgcgggagctgtacggcctcacggccatcccgcccttccaggcgtggctggagaagatgggcttcgtggaggacggaaagctgaccgagctggcgggggatgcgtccgtcctgctggcgtgaatcggcggcccacacgcgcaccctgcagggcgggggcttgcccccgccgcctactcccatcccgtaggggcgaactgtgttcgcccgccctatatcattgaggtgacaatatgaacgaacaagagctgcgctccctggtggagcgcatggtgctggagctggcgggccagcccaacgccgcggccccggccaaggccgccccggcgcccgccgctgctgcggccggcggctgcctggacgacatcacggagaccgatctgcggcggcagtatctggtgaaaaaccctagaaacggcccggccttcctggatttgaagctgcgcacccccgcccggctgggcctggggcgggcgggcgcccggtataagaccatgtccatgctgcgcatgcgggccgaccacgcggcggcgcaggactcggtgttttcccacgtggacgacgcctttgtggaaaaaaacggctttgtccctgtccagaccctgtgccagaacaaggacgaatacctgacccgccccgaccggggccgccgctttgacgaggccaatcaggccatcatcaaaaagaccctgggccagaacccaaaagtggttctggcggtgggggacggcctgtcctctgccgccatcgaggccaacgccgtggactgcatccaggcggcccaggcggggctcaagacctatggcctggagagcggcccggtgctcttcatcaaatactgccgggtgggcgcctccgaccacatcggggagctgaccggcgcggaggcggtgtgcctgctggtgggagagcggcctggcctggttacggcggagtccatgtcagcctacctgacctacaagccccacatcggcatacctgagtccaagcgcacggtgatctccaacatccaccgccagggtaccaccgcggtggaggcgggcgcgcacattgcggagctgatcaagaccatgctggagaaaaaggccagcggcattgatctgcggtgaaatacgcccgcccgcctccacggggcgcgcattgcgcgtacaagcgttttgccctgcgggcaaaaccttgatgccgggcgaattcagttcgcccgagcagatgaaagaggcgtttgggagccccgtgcggccagccgcacgggggacggcgggcgcgcacattgcggagctgatcaagaccatgctggagaaaaaggccagcgggatagatctcaaataggcgggagatcgtaggggccgatgcccacatcggcccgctcccccgtccctgcgccatccggcgggcgggtgtgggcacccgcccctacaaaacaacggaggtgacattatgacaggcgatttgattccggccaatgtactggccacccataccatcgccaacgtcagcgagacgctggcggaaaagctgggcttaccccagcagtaccgctccattggtatcattaccgccgacagcgacgacgtgacctactgtgccctggacgaggccaccaaggccgcggcggtggaggtggtgtacggccgctccctctacgcgggtgcgggcaacgcctctaccaagctggccggcgaggtcatcggcatcctggccgggcccaaccccgcggaggtgcagtccggcctgcgggcctgcgccgagtttatggccagcggggtgggcttccgctcggccaacgaggacggctccatcgtctattttgcccacaccgtctcccgcacgggcacctatctgtccaagacggcgggcgtgcgggagggtgaggccctggcctacctgatcgccccgcctctggaggcggtggtggggctggacgaggcgctcaaagcctccgacgtggagctggccgccctctttgagccccccagtgagaccaacttcggcggcgggctcctcaccggcacccagagcgcgtgcaacgccgcctgtgcagcctttgccgaggcggtgaaggcggtggcggcccggccgagggagatctgacagggcggcggaaacacgtagggcgggcggccgcaggccgccccggcgatgcaggggcgaactgtgtccgcccgccgccagacaagacgaggtgaaccatttggacaaggatctgcaatccattcaagagacaagagagctgctccggcaggccaagcaggcacagaggacgctggcgggtatgagccaggagcagctggacaaaataacggcggccatcgccgcagccgccggggaacacgcccggcggctggccgacatggcggtggaggagacgggcttcggcaaaaaagaggataaagagcttaaaaaccgctttgccgccaccaccctctatgaggccatccgagacgaaaagacccacggcatcctggcggaaaaccgggagaagcgcaccattgatatcggcgtgccggtgggcattgtggcggggctggtgccctccaccaaccccacctccaccgtgatctataaatccatgatctgtatgaaggcgggcaaccccattatcttctctccccaccccagcgcggtaaactgcatcctggagacggtgaacgtggtgcgccgggcggcggagggggcgggagccccggcggggagcatttcctgcatcaccacccccaccctggaggccaccaacgccctcatgcgccacgacgatacccgcctgattctggccaccggcggcggggccatggtaaaggcggcctactcctccggcactcccgccatcggcgtgggcgcgggcaacgggccggcctatatccaccacaccgccgacgtgcgcctggcggtcaaacggattctggactccaagacctttgacaacggcaccatctgcgccagcgagcagtccattgtggtggagcggcggatggagggggcggtcacggcggagctgaaggcccagggggcctatctgctggacgacgaggagcaccgcctcctctccaaattcatcctgcggcccaacggcaccatgaatccggccattgtgggcaagagcgtggagacggtggccaagctggcgggcctgacccgggtaccccccacggcgcgggtactggtggcccgggagaccggggtgggtcccggctatccctattccaatgagaagctgggcctgattctggcctactatgtggaggacagcgaggaggcggtgctccgccgctgcgtggaaatcctggagtgggagggcgcgggccacaccttcgccatccacaccgaggatgccgacgccgctaagcgctttgccgccgccgttcccgccagccgcgtgctggtcaacacccccgccgccctgggcggcatcggggccaccacctgcctgttccccgccctcaccctggggtgcggcgcggtgggcggctcgtccagctccaacaacatcgggcccctggacctcatcaacatcaagcgggtggcctggggcgtcaaagagctggaggagctgcgggggaaccgccccgcggccggatatgccccctgtgccgtggatgagagcctgctcaacgaactggtcaaccggattatagggaggctgagcgtatgagcgaggtcaacgccgacggcgtgctcctcaatccacatgaggcgctattgcaggaggtgcaggccctgaccaactccctgacggcggaggagccagagggaatggaggacgataaggcccacaccgtatacgccggcaacggcgagcccgccggggcggtgggcggcgttccgcacacacccgtgtcggcggccctggccgccccggcccacaagggggcgggcaccggcagctacgcggcggagcacccgcccgccccggccaggaaggccgcccgggcggccaaaacgaagaaaccaaagccgtctcccccaccgaaggcggaggcggaaccggaacaacccaaacagacgactgacaggaggaaccgtaatatggccaatacaaacgcactgggtatggtggagacaaagggactggtgggcgccatcgaggcggccgacgccatggtgaaagccgccaacgtgcagctggtgggcaaggagcaggtgggcggcggcctggtgaccgtcatggtgcggggcgacgtgggcgcggtgaaggcggccaccgacgccggcgcggccgccgcggaaaaggtgggagagctgatctccgtccacgtcatcccccgcccccacgccgaggtggaccacatcctgccccatgcccagggcgagatggacaacgtgtaacccatggcgctgctgaccgaggaggacgtgcgccgcatgtccaaccagggcacacgggggcccgtggtggtcaaccgggaccagatgctcacgccgggggcgcgggactatctgcgggagcaccgggtagaggtggtctacccccagggggaggcggccggggaaggggacccgtccgcccccgccaaataccgcactctgttcggtgccgcactgaatgaaaagccggagcacatgacccacctgaaggggaatgtactggtgttcaaggaccacccccgcatcgcattccggggctggatcgacgccctggaggcggagatcctgctgacccagcaggcggcggcgggggagggctatggggccctggccggggagctggaggaggttctgggctttgtccggcgctatatccgcttcgacgtgctggacgagccggtgggggccatcgagctgtgcggctatacgccggagcagctccgggagtactcccactatccggagaagcacttcggccagccccactttctggcctgctataccgacggacccgccctgctggcggtcaacaagctgcgcactgtggtgcggcagaccgagctggccgcctacgccgccttccgtgacgcggacggcaacgtgaccaggggcgacatgatcttggggctgaaccggctgtcctccctgatgtggattttcatgattaagttaaaggcgggacgctatgaacgcaagtaatttgagcacggtggagcggctggcggaggagctggtcgcccgcctgaccattgaaatcgaggccagcggacggcatgtccacctgtcccgggtcgatgtggagaccctgttcgggccgggctaccggctcaaccggacgaaagacctgtcccagccggggcagttcgcctgcgccgagcgggtgacgctggaggggcctagggggagcttgaagaacgtggtgattctgggccctgagcgcccggagagccaggtggagatctccctcaccgatgcggtggccctggggctcaccccgccggtgcgcctctccggcgatacggagggcacccctggcctcaccctccgccacggggaccgggtgctccgcctgagccgcggcctgattgtggccaagcgccacattcacatgacgccggaggacgccgcccgcttcggcgtggcggaccggcagcgggtgcgcctccagtgctttaccagccgcccgctggtgttccaggacgtggaggtgcgggtatccccccagttttccacggtggtgcatatcgactacgacgaggccaatgcgtgcggctttcagaagggcgaccggggcgtgattttgaaatgaccctggagtggcgggggcggacgctggtcattacctggctgccggtggcctccatgggccgcctggccgcctgcgccccccagacggcggcggagaccgaggtgctggccgccctgctggccggggcgcgggtgcgggtggagcgggacgccctggagtaccgccgctaccgccgtaccgccccccttggcatctatcagaaatgcgccggtctggagcggcgcctgcgggagatgggtatttgtgttgctgggacaggtggccggtaaggtctgggccacaaaaaaatcccccgccctcaccgggcaggcgtttctgaccgtgcgggtgggtgagcgcctgctggtgtgcgccgactgcgtgggggccggggagggagagaccgtcctcgtggccaccggcggcgcggcccgggtagcggcgggggcggagctccccattgatgccgccattgtgggcatactggacgagagctagaaaagcaaggccgccgcatgtgggcggcggtcatcctctcaggctggcggcccaaccgcccgcctgagccgcggaaaggggacatactatgtccatcaacgagattattgtctaccttatggtcgtctttatggccttgggtgcggttgaccgcatcctgggcaaccggttcggcctgggggagaaatttgaggagggtatcatggctatgggctccctggccctggccatgatcggcatcatctgtctggccccggtgctggccaacctgctccggccggtggtggtgcctctctaccaggccctgggggccgatccggccatgttcgcgggtaccctcctggccaacgacatggggggcgcgcccctggcccaggagctggccctgacccaggaggcgggacagttcggcggcctgatcgtaggctccatgctgggccccaccatcgtgttcaccatcccggtgggcctgggcattatcaaggcggaggaccgcccctatctggccaccggcgtgctggcgggcgtcatcaccatccccatcggcagcttcgcgggcggcctggcggcgggcttcccggtggggatggtgctgcgcaacctgatccccatcgcgcttttcgccgtgctcatcgccctggggctggccttcctccccgacgggatggtaaagggcttccaggtctttggcagaatcattgtgattattatcaccatcggcctggcggcggccatcatccaaaagctgacccccctcaccctcattccggggatgaaccccatctcagagggcgtggccatcgtgggcgacatcgccgtggtgctggcgggggcgtttccgctggtgtatgtcatcaccagggtattcaagacccctctgatgaagctgggccatgtgctgggcatgaacgacatcgcggccgccgggctggtggccaccctggcaaacaatatccccatgttccagatgctccacgatatggaccggcggggtaagatcatcaacgtggcctttgcggtgtccgccgcctttgtgttcggcgaccatctgggctttaccgcgggctttgattccactatgatctttcccatgattgtgggcaagctggtgggcggtgtgacggcggtggcggttgccatgttgatcaccagaaaatacaaggaggagcgccatggataagaccgcattggaggcgctggtgcggcaggtgctgctggagcgcctgggcggcggaacccacggggtgaaggccgtgcaggtgccccgcatcgcggtgacggaggagcaccggatggacacgggaaatcccctggaccgggtctacacccgtgacctattcaccctacaggagtccccgcggctgggggtgggcgtcatggagatgaccgacaccacctttccctggaccctgcgctacgacgagatggactacgtgctcagcggacggctggacatccgtatcggcggagagaccgtctccgccgggccgggggagctgatctatatcccaaagaacagctccatccagttctccgtcaccgggcacgcccgcttcctttatttcgtctaccccgccgactggcagagccagggcggctgattccgggcgggcggccatcggccgcccgctttttttacacaatctgaacggtgctcaccgcaaacgcacaccctttttacatccgtgctcgtatactggggggcaaacggaggtgccgttattatggattatgggatatggacgctgcttccaatcgtcgtcgtagtggccgtggcgctcaagagcagacgggcgctggagccgctgattctgggaaccctgctcacctatatcatcgtcgatggactttccttccccatcggctggatggacgcctttttccgggtggccaccgaccagagccaccagtgggtgttcatggtgtgcggcctgttcggcgcgctgatcgccctgctgggcgcctcccacgggacgctgggcttctcccggctgctgggtcggctttgccggggccccagaaccacgctgattgtgacctgggtcatggggattctgatctttgtggacgactatctgaatatcatgaccctgagcacctgcatgcgcaagctcactgaccggcagaaggtgccccgggagaccctgtcctacatcatcgactccaccggcgcgccggtgtgcgccctgctgcccttctccacctgggcggtgttctttgccgggctgttctacgccgaggcgggcgctcccggagctgggctacgggagcgccatcaacaccttctgcgctgtgatccccttcatcttctacgccatcgcggcggtggcgctggtgcccctgttctccctggggctggtgcccaagctggggcggatgaagaaggcctaccgccgggtggaggagaccggaaaggtctactcgccggagagcgccgagctgaatctggaggacgaggacgactccccggccattaccggctgcctgtgggactttgtgcttcccatcggcacgctgatcgccctgactatcgtggggggcgagctgttcctggccctggtggccgccatcgccgtgtgctttttgctctacatcccccggaagaagctgtctctcactaggttctgcgacctggccatgcacggcttttgcaacatgatccccacggtggccatcatcttctttgcctttgtgatgcaggagggcatgaccgagatcggcatcgcccccttcgtcatcaatgccgtcaagcccatcctgagcccggcggtgttcccggccatcgccttcctggtggtggcggccctcaacttcaccaccggcagcgtgtggggcatcaccgccgtgacggtgccgatcctgctgcccctggccttctccatcggggccaaccccctgctggtcatgggcgccatcgtctccggcgccaccctgggcagccacgcctgcttctactccgacgccacggtgctcacctccagctgctgcaagatggagaatatggaccacgccctgtcccaactgccctattccctgtgtgcggccgggctttcggcggcgggctatctggtatgcggcctcctgatgtagtataatagggacagaatggggaaaaggaggagtcaggatgcccatgtatttgtatttgggcgatatcacccggatggagacagacgccattgtgaacgccgccggcacggatctgcggcgctgcccgggcatctgcgacgcgattttcgccgccgccgacacggagaagctggagagggcgtgccggaagctgggccgctgccgcatcgggcaggcggtggccacgccgggctgcgggctgccctgccggtacatcattcacgtggccgggccgggctggtacggtggggagccccgggagcggttcctgctggccgggtgctaccagaacgccctgcataaggcgtatctgtgcagttgccggcgggtggcggtgccgctgatcttctccggcgactgccacatgccgcgggcggcctccctccgcgtggctggggcggcgattgccgatttctgccagcgccatccctccatggaggtgacgctggtgctctaccggcagagcatctacgacatggctaagcgtatcctgggctgggaggacgcgccgtcataaggggggacgggcctgcatatacatgccacagttaccgaaaccaggtaggagagtggatggatatgcaaacaggctggaatgagaaccgggcgctgctgcggggcaccgcggcggcggagccggtgctgtcccatgagacccacggcgtggtatacgagacctttcccctcgccgtccggcggctgtccggctcggaggaccgggtcaacgtcctggtcccccgggtcctgctggagcagcggcccgtgacggaggggatggagctggaggtggagggggaggtgcgctccttcaacaacaagagcggcaagggcagccgcctggtgatcaccctctacgccaaggagctgcgccccgccgccggagaacacgaaaaccagctcctgctggcgggggtgctgtgcaagccgccggtggtgcggcgcaccccgctgggccgggacatctgcgatttgatgctggcggtgaaccgccggtacggccgggcggactacctgccctgcatcgcctggggcggcctggcccggcggtgcggggcactggaggtgggggacggcgtgcgcattgaggggcggctccagagccgggcctacaccaaggtggaccacggcgtcagtgaggtgcgcaccgcctacgaggtctccgtcatgaagctggagccggtggagacataacagaagggcggggctgctgacgcggccccgcccctttcgggctatttgcatttcgggttgttacggaacaggcggattcgtgacggcggtttcctttccgctcagttgaacttgtagatcttccgggccaggcggtagagcttgacggacagcttgcggccctggtagccggggatgttgcccacgaaggacagggagcggtacttgagcttgtggtacagctcggggttgctggtgcgcaggtactcccacagctcggtcttcttgcccagggcggcgggagagccgtcgatgatgaggaagatggaggagatggtcatcatcatggacaggtagctggtcatataccgggccagcttgcgctgggtttggtagagctgcttgaggttgtggctgtcgatcatcagcttggtgacccgcacctgctggtctacccgggtgaccatcaccttttcgttcacgctctggtcggcccggccgatgaagtagcggtagagatccacatccatgtagtagatgctctttaccgccggcaggggctggtagacaaagatgttgtccacatagaaggtgtgcttgggcagctccagctggcaggcgcgcagcatctcggtgcggtagatgaccgagtgcatcagcaggtactgggagggccggaagcggccgatctcgttccaggtgaacacgcggccctcggggaacacgttggtatacttcatcaccttctgcgtgttgtcctccacgtgctcatagacgtagttggcgataaagaggtccagcggctgctccgccccggcgaacgccctcagcttgtccagaacggccttcagggccgcctcgtccagccagtcgtcggagtccaccaccttatagtacatcccttgggcgtggcgcaggccctggttgaccccctcaccgtggccgccgttctcctggtggatggcccgcacgatgtccgggtactccgcctgatagcggtcgcagatggcgggggtgtcgtccttggtggagccgtcgtccaccaggatgatctcgatgtcgtccccgccggtgagcagggtgcgcacgcagtgatccatgtaggccgcggagttgtagcagggcaccgcgaatgtgatgagctttgacatgggcagtctcctcacttcaataggtcgtcacacagctccagcgcccgtgcggcgatggcgtccatgttgtagtatttgtactccgccagccggcccagcaggtggaaattcggatagcggtccgcctccgcccggtatttggcgtacagggcgttgttcccggcgttgatgatggcgtagtaggggatctcccccttcgctccggtgtaggcgcgggagtactccttcatgatggtggtttggccgggcagctcctgcccagtcaggtacttgaactcggtgatgcgggtgtagtcctgatccacggtatagtttaccgttccgtggctctgccagaagtccaccgggtgggtctcaaagcggaagtccagggtgcggtagggcaggcggccgtatttgcagccgaacagctcgtccgccgcgccggtatagatgatggggccggagaagggcctcccgtccagaagggcggcgctgccgtccagggtcaggcggctggccgcgtccacccccagctccaccgtgatgtccgggtggtccagcagggactggaacatgggggtgtagccctccagaggcatgccctggtaggcgtcctgaaagtagcggcagtcctccgacagaaagaccggcacccgggcggtggtgttggggtcgatctcctccggcgtctgcccccactgcttcatggtgtagcggacaaagacgtggccatacacatagtcggccagggcggacagctccgggtcgggattctgccgcagctccagaatggtgacctttttctccatgccataggcggataccagcttctccgccagggcgcgggccttctccggcggaaaggcggcccgcagggaggccaggttgaagggcaccgggtactccagccgcccgtccccgtcggggagattggccaccacctggtgctcgtagggccgccagcgggtgaagcgggagagatagtcaaacacgcgggtgctgttggtgtggaagatatgggggccgtactggtggatcagcacccccgcctcgtcgaagcaatcataggcgttgccgcccacgtggttccggcgctccagcaccagtacccgcttgccgccccgctcggccagctccctggccgccacggaaccggccaggccggctccgatgacaaggcagtcatattgatgattcatggggaatcgtcctctcttctctggtgtcaaacacagtgtaccacaggtttcgggaaaaaggggtaaacatcccattaagatattcttaaaattacttccctttcccctcgggagcggttggcttatccggctcggtggggtagaggcccaccttggcggaggggccgcctagaaagcactcggcatagtggtccatggcctgccggatgacctgcacggcggcggcccggtcgttcacatccttggccacggcctgcttgccctccagagccttgtagacagagaagaagtgcttcatctcgtcaaagaggtgggggggcagatccatcaggtcgtggtaggggttgtaggtgggatcggagaaggggatggcgatgatcttctcgtcgttcttgccgccgtccagcatggagatgtagccgatggggtagcagcgcaccagggtgagggggtcgatttcctccgaacagagcaccagcacgtccagcggatcgccgtcgtcgccgtaggtgcggggaatgaagccgtagttggcggggtagtgggtggaggtgtggagcacccggtccaggatgataagcccggtttccttatccagctcgtacttcttcttgctgcccttgggaatctcaatgaccgccacgaagtcctcgggctggatgcggctggggctgatatcatgccagatatttgacatcgtaaacactccttttgtgggtcttttctcccattatagccgtccgggaggaaaaaaacaacatttgtcttgacaaataaaacctacagatgtatgctcagcttgagcaagacatacatttgtaggaggtgaatgggatgaagaagctcaaccgcctgcccgaggcggagctgaccgtcatgcgggccgtgtggcggctggagccgcccgtccccaccggggccattcgcgcccggctggagaaggagcggccgtggaatctgtccgcccttcagaccctgctggcccggctgaccgagcggggcttcctgtccgtggggaaggaggggcggcagaacgtctatacccccctggtggacgagggggagtacctggcgtttgagaacgcccccttcctggaggagaggggcctgcccggcctggtggccgccctgtatgacagccgctccgtcagccgggaggagctggctgagctgcgggccttcctggacgaggccatggggaaggagggggacgtatgaccgcccgctttgccgacgtgctggagatctccctggccatgtccgtggtgctggccgtactgctggccctgcggccccttttgaagaagcggctgcgggccggggccttttactgggtgtggctgctggccgccctccgcctgtgcatccccttcaacctgagcctgccccaggccccggtgacggtggaggcggttcccagggccgtctaccgggtggatacggttaacagcaatcccggaaaccatcactatgcggccctgacagaagaagaggcggcatcggaagaggtagcggcagaaaacaggccggtggatggcggctccattcaggatgtctataccccgctcttcaccctggagggggccgtagccgccctgtggctggccggggcgggggcgttcctggcttggcatctggcaaaatacgtccgcttccgcctgcgggtgcgccgctggggggctccggcggaggacgccgccctgctggcgcggtttgaggccgcaaaggcggagctgggggtgaagaacctggccctgctggtctgtcccgccgtgggcgcgcccctggtgacgggctttgtgaacccagcgctcctcctgccccgggagaccgtgtccgacggggtgctccagcacgagctgatccacacccgccgccgggatctgtggtataagctgctcctgctgctctcccgctccctccactggttcaaccctctggtacactggatggccgcggccgccagccgggatctggagcgctcctgcgacgaggcggcggtggcggggcgggacgccgccttccgggcggcctacggggcagccctgctggacgcggtggaggagggcatcgaggcccgcgcccccctgaccacccacttccggggcggcaagacggccatgaaggagcgcctgctgtccatcgcgtcgggcggaacgcggaaaaagggcgtggccctggtctgcgccgccgccctggtgatctccgccggggccgctgcctgttctctgggggagagagggagttcagcttccgacgtagaaatctatggagaaaactactccttccggtgtcccagcggactgagcggcacctactccagcggcggcgagtccctgattttgagcggttcaccgcctgccggcggcctgatcgtcagccccaccgactttctgtggtatgccgaggggaaccggcggcctgactttgcatccctggtgaccggctatggcgtggagctgtccgatgaggacggcaatcccatcctcccggcggaggcggtggagctgaccgtgaccgatgatcttccatatctggacaagggagagaacatgcagggattccagtggcctctctatacctatgaagtgctggtggagcgggccgacggccgggaggagctgcacaccttttatgtgatggatcaggcagccgcgggaaacggcgtctatgacctgtggttcgatctgtcccaggtgagccgggaggaggcggaggctgtccggaacaccctggtgctgggccgcgaccgcacggagagtcccgacggaagccggctgatttcaattacccccagcggccgtgggtatctgctctatgacaccggcggggagtatcctgtcccgctggggcagattgccgacttcggcggcggcatcctctccgctcccctctggtcgcccgacggcgctcgggcggcggtgacggctaccgacattgctacagaggcggtggcattctctttcccgctggatgatttgtacccggacgagcttcataaggacacagggggcctggcgggcctcacctttgccgccctgaacccggagtaccagatgggagatgccgtcggctatccccggtgcgttcccctggcctggtcagaggacggcctgtccctccagtattcctgggcctggtcggacacggagggacagctccatgagggcaccgcgtggtactgctttgacgaaaacggccgctttacggaaatccgggacgtggtggagaacgatgtgtatcccgtgcacgggtgaggcggcaacgaaacgtttcctgatgccgccgactttttcgacaggcagaagcggggcggaggaatttcctccgccccgcttctgtttttatcagccgatccgggcagactggttactgcatgctgttctcgtacgcctggatcatcttcttgaccatctggccgccaacggaaccggcctcacggctggtcagatcgccattgtagccctgcttcaggttgacgccaacctcctgggcggcctccatcttgaacttgttcagggcctcacgggcgctgggaaccacgggctggttggaattggaattgttagagctagacataatagcgcatctcctttggtgacaaatttgttggattcggtgaatccagacatagctttgccccagggcggatttctatgtgcgccattttttgctggtcgggtctgcgaaaaaaggggaataataatacagatagataaaattgaagtaaactgtgttggttttggaaagaacatcagaaatagaataaaagagaagataaaaaagaggaaaatgtaccgctgccgcccggcggacgcggttaaagggcccaggcatgccacacaccgtcctgctgctcgcgctggagccgtccctgccggcgcagatggtccaggtgggcgatgcactcgcccacggcaaaccacttctgggctaggggaaagtcgtcccagctcctggagcggatgttccaggtcatgtgggcggcggcttcataggcggtgctgccggggcgggcgcggaggatggcggtcagctcgtccaggcgacgggcgtggtgctccagcagggcgtccacccggggggccagcgtaccggggcggcggtggccgggcagagccaggcgggcgggcagcccccgcacggcccgcaagctgtccagatagcatcccagggcgtcctccatgccgttccaaggcgtgatattggggctgatgtcaaagagcacgtggtcgccggtaaagagaatgccgtccgactcgtcccagaagcagagctggccaggggtgtgaccgggcgcgggcaggcaggtgagccggcggccgcccgcctccagcacagcgccgggttccagcgtgcggtagcggccggtggggacgggggccagagcgcgggcggggttggccctgttttgtgccaacagctccggcggaaagccctcagagatataaaaggcatcggtgtgggcccatttggcctcctccggctgctccagataggcccggtcgggcccgctgacgtaaatccagccggtttccccaacgacctccggggccaggccggagtggtcggagtggagatgggtgagggccacatctacatccctggggtccacatccagctctgccagcccggcaaacagagcgcggcggccctcctcctgtcggaagccggtatcgataagcaggctgcgctcccgcccgcggagcaggtagctgttcagttcccggagagggttgccgggcaggggcaccggaatccggtacaggccctccgaaatacactcggtcatcacatgcactcctttctgtccacgatccatcctaccaaaacgctggggcgccgtcaagcgtatcagcttgcaggcgggaggggatcggggtataatgggaaaaaaggcgaagggagtggaaaagagtggatttctgtggaatatgcagagctttcgcggcacagttccgaagccggtggagggcagcgtttcccaccattctgttttttgtggttctttttttgacggtttcactcctgttcgggagccggaacgccatggtggtgtccagcaccaccaccctgtttcagatccggcggcaacgcaacaacaccggtacatattacatcaagctgctgttcatcaccctcctgctgggtatgctcgcctatctggccagtcggaatgcggtgctctgtgtgcttttgaacttcacggttccctttgcgctggtgtttttccagagcgaccagttcgcgccaaagggctacttcggctacgccatgaccttcgtgttcctggagctccggccgcccacgccggaggaatttccggttcagatgctgtgcctgctgttctgtacgctggtgctcatcggggcgctgctcctctatgcccggctgtctgccccgtccgccccgccggaggaggagatcacccggggcctgacccgcctggcggagctgctggaggaactggccgggggcggcggggcggacggggcgcgccgggagctggaggggctggcccagcggttccggcggctgggctatgcccgccgcagccacttccacctgccggatgggcaacggcggttttattacctgttcgcactgctgtttcagcgcctgagctacctcctggcggacgaggattgggggcggctccaggctggccccgcctgcgggaaggtgctggttacgctggcggggctggtgcggcagctccagaacgccgcttcaccggaggcacggggagcgctgacagaacggctccagatcctgctggcagaggacgccctgcctcaggggcggctgcgtatcttctaccgcagctttctccaccgcctgctcctgctgctggcggagggagagccccggacccggtggccccgggtgccctggcgggaggtatttgccagcggccgccggcggctgagtctcaacaattttgaggtgcgctttgccttgcgcctggccgtggtcatgaccatcagcacaaccgtcagccttttgtgggaatttgagcacacctactggttcccgctccacgcctttcttttgctccagcccagctatgaggagagcgcccaccggatgatcacccggccggtgggcaccgccatcggatgcctggtggtacatctggtctatccatggctgcccggcctgaccggcgtcttcgcctttgccctggccatgatctccctgatgtattgctgtactccgggctcctgggtacaccccatcttttccacctccttcgcccttgccctggccaccctcacggtaaaggagggccaggccatccaattgcgcctattctacttgctgcttgcagtggcgttggtgttggtggtaaaccgtttcctggtgcccacccggaaggctacccagttccggcacaacctgcgtaccttgtgccgcctccaggcctcctactgggagatggtgcagcgcagcctccacgcgcccggccggccggagcgctccggcgagattctggcctgctttcatctggtgtaccacgaggcggcccagtatgcggcggccctgccggcgggagaggcggagcggtaccggacggtgctgctcaccctgtggaacctgtttgcccatgtggagcaggtggagtgcctggtactgaccggggagctgggggaggaggagtaccctgttctgagccgcctggccggagaaattcaggagctgctggacccgccccggcccgcactggcggagttggggctggaaggtctgccggcctccggggcgctctgccgggccatggagcgctaccggcataacgcccggctactgctggaggcatgggagaaacagccggtttcgtgctgaatcttgcgggaatcggtgaaaaaaagccagtatttgggcaggaaagattttcctcgacagatttcgacacggaaaccgcaaggataactcaaactttagcatacaatgtctgtataccaaagccgattcccgatacactaagaaacgggtgatcggatgaacgtggattatggtgcaatcggacagcgcatcaagcaggtgcgcaggagccgcgacatgacgcaggagcgtctggcagaggccctctccgtgtcagtgggctatatcagccagatagagcgcggcgtgaccaaaatcaatctggacacgctggctgcggtggcggcgcacctcaactgtgaactttccgagctggtaaccggggtgtcggtgctccaggggcgctacctggagggagagctggcacaactggtggatcagatggacggacgacagaggaagatgcttctggaagtggccaagctgatcttggccgagtgagaaagcaaacaaaataccgggccgcacgccgtgcggcccggtatttattgttttgcagtgggcagaccggtcagcccttctgctccagaagggactgcttgatgtcccagagcttctgagacaggtccacgtagtagttatggggattctcaaagcgcttaacctcgtcccacaacaggtcgatctgtccggcgcagtaggcccgcatctcggcgatggggggggagtcgtatacccgcctgccccccaggaagatgggagcgagcagctccttggcggtgaagttggtgacacggctgcgcttccaggtggcgtcggggtcaaagagctccaggggctggctctcgtccaccgcctcgtcgtggagggtgatgaggtcggcgaaggccttgccgctctccttgtcgaacaggcggtacaccttcttgaagtgggggttggtgatcttatccgggttggcgctgatcttgatcttgggaatgatattgccctgcttgtcctccacggcggccagcttgtaaacgccgccgaacaccggctcactcttggaggtgatgagccgctcacccacgccgaaggagtcgatcttggccccctgaagcagcagatcccggatgatgtactcgtccagggagttggaggccacgatcttgcactcggtaagccccgccgcatccagcatcttgcgggccttgcgggacagataagtgaggtcgccgctgtccagccggatggcgcagttggtaatgccctgagggagcaaaatatccttgaacgctttgatggcgttgggcacgccggacttgagcacgttgtaggtgtccaccagcagggtggccgagtggggatagagctggcagtaggtcttgaaggcggtgtactcgtcggggaacatctgcacccaggagtgggccatggtgcccccggcgggggaaccatacatctcgtcggccagggtgcaggcggtgccggcgcagccggcgatataggacgccctggcacccagcacagcggcgtcggggccctgggcccggcgggacccaaactcgctcaccgggcgtccgtcggcggcccggacgatgcggttggtcttggtggcgatgagggactggtggttgagggtgagcagcaggaaggtctcgatgaactgggcctcaatggcgggggcgcggacggtgaggaagggctcccgggggaagatgggagtgccctccggcacagcccacaggtcgcccgtgaagcggaaggtgcgcagatagtccagaaagccctcgcagaagcagccctttccccgcaggtaggcgatgtcctcctcggtgaagcggaggttttcgatatagtcgatgacctgctccagaccggccgcgatggcgaagccgcctccgtcgggcacattgcggaagaagacatcgaagtagcagatctggtcggcatacccctccgtctgaaagtagccgttgcccatggtcaattcgtaaaaatcacacaggagtgtgtagttcatgtgttccttcatctgtttcacaacctttatcggttcagtaccgtgatctggagggcctccatcacgtccaggcccttggcgtggagcgccggatcgggtccggcggtacaggaggcgtccaccacgatctccgcctcgggcagggcggccttgaccatgatggcgttggagagtacacaaaggtaggataccagtccagccagctccacccggtcatagccctgctccttcagccagttggccagccacagggaggggaaggtgcccttgccgatgaccatatcccggctgcgctccatggcctgtcccgtctggccgtagagctgccagccctccgagttcagcaggcagtggggcaccggcagcttccgcccctcctgggtgtccaggtagtccgggccatgggtgtccagggtgaaggccacgtcatctccggcggcgcggcaggcggcgattttggccgcgatgggcccgtccagtgcctccgcaccgggaaagcccagtgctccgtctacaaagtccttttgatagtccactacgagaagcaaccgcttcaccgcgtccaccgcctttctgtcaagacacctgtattataagcagttttttaccaaaatgcaagagcagtcttgccgcgccgggatatcaggccgcccgccggggaaccggcgggcggtgtgatttactcggccagaggggtgggccccatggcctcgtgaagctccttggtgatggcgccctggaacaggcagacggcgaaccggtgcatccgctccagcttttcgggcaccgcgtcggggttgtgcttgcccgcggtggagaagtcgccgtccagaatgaacttgacctccttgtcggtcttgccgccgccgatgaggccgggaccggcgtggagcttcatgcggtagtcccccaccaggggagtctccacgtccagggagcacttggcgatctcgctctcctccacgtcaggctcgccgagtatgccgatatactggctgcggatcagatcgtcccagagttccccctccaggcccaaacgctggcgggagacggcgttgacataccgcaggccgatgcgctcgaagaaggcgggctggtagagctggataaactgggccagggggcggtccagccgggtggcgaagtcctcccaccgggtgtagctcagggtggacagggcgatgaagccctgggtcaggttgagcttccagcggccgtcctccgagatgaagttgtagttggtaatgggcttctgaggctccagcgcggtggcgttccccttcttgaccaccttgggggggagctgctcctgacgggccgcatactgggggaagtccttgcggatggcctcctgaaactcggcgggctccttggcgccgatggacaggatagtggggaagcggagctggcagatcacctccaccagcggggcgcgggcgtactgatagcgttcgtatggtgcaaacagcatagtgggctgctccttcctgtttttcgatcggttctattgtagcccggaatgggcgatctgtcaaaccattccaccttgcaaatggagaattggggcggtataatgcagacaatacacaaaggaggcggagaccatggaactggagctgaagcggggcggccgcaccgcccgggtggagaccctgggcggcgagctggtatcctaccgggacgagcgggggctggagtacatctgggggggcgatccggcctactggccggggcgcaatcccctgctgtttcccattgtggggatgctgaaggagggaaagatccgctttgacggcagggaatacgccatggagcgccacggctttgcccggcggcgggagttcaccccggcggcgcggggggaggactgggtgcgcctggagctgcgggagagcgccgagaccctggcgctgtatccctattccttccggctggcggtggagcagcggctgaccgacacgggtttttccacggcggtgacggtggccaacccgggggaggggccgttgcccttctgcctgggggcccacaccggcttccgctgtcccctggaggcgggggagcggttcgaggactacgagctggtgttccccgagcgggagagctgtcccaccctgctgctgcgggacggattgctggaccggccggcggccctgccctgcctggaggacaccgacaccctgcccctggactaccgctggtttgacgcgctggataccctgatcttcgagggcctgcgctcccgctccgtcaccctgcgcagccgcaaaagcggcagaggggtgcgggtgtccttcgacggcttccccatgctggccttctggaccatgccggggaagaaggccccctacctgtgcattgagccgtggcacggctgcgccgccgggacggcggaggggccggaattcaccgataaagcccactgcatcgtcctggcccccggcgagagccgcaccctggcctaccgggcggacaccctgtgagctagtattcccgcaaaaaagcgcggaccgtacaacggtccgcgctttttttgtcaggagaggccctcgcccatgccgagggtgaagtacaggatgaccacgatgaccagaggggcgagaaagcgcaccgcgaaggcccagggcttctgcatccgccggaggccgtgctcgccggcgatctcctgcccggcggctttggtgccccacacccagcccacaaagaggcagaagcacagcgcccccagagggatcatcagattgtcggtgaacttctccatcaccgcgttcatggggagcatctgcatcccgtttttgaagtcgaaccagggcaggttgatgccccgcccggcggactgggagagggagtagcccgcgctgagcagcgccatgggcaccgacaggccgatggccgccctggcccgggagaggtggaattcctcggtgagaaaggccaccaggctctccaggatgctgatggcgctggtgagggcggccaggaagagcagggcgaagaaggccgtgccgaaaaagcggccgccgggcagctcggcaaacatggcgggcaggctgatgaaggcgaagccgccgcccatgcccagtccctcctctccctgggtgatcatcaccaccgggacgatggccagggcggccatgacggctaccagggtgtccagcgcgcagatccaaccggcgcttttggccaggttctccgacttgggcacgtaggagccgtaggtcaccatgatgcccatgcccacggacagggaaaaaaaggcctgtcccaatgcgcccaccagggtgtcgccgctgagcctggcggggtcgattccgaacaggaagcgcaggccctcccccgcgccggggcgggtgactgagtagaccaccaggcccgccagcagcaggaaaagcaggggcatgagcaccttgctcaccttctcaatgccctgggacacgccccgcaccaccaccacgatgcacagcaccagaaagcccaggccccacagcaggggctccaccggacgggcactgaaggcggagaagtagtcggcataggcgcccggcccggcgccgaagtgggcgccggcggcgtagatctggacatacttgagcacccagccccccaccacacagtagtaggacaggatgacaaacagggtgacgatgccgatgtatcccgcgaaccgccaccgggggttcagagtgcggaaggcccccaccacattcttctgggtggcccggccgatggacagctccgccagcatgaccggaaagcccaccaggaacacgatcagcagataacacagcaggaaggcgccgccgccgtaggcgcccaccttgccgggaaatttccagatgttgcccaggcccaccgcagagccggctgcggccaggatgaagcccaggttggaggcccactggtgcctcttttccgtcataaatccattcctcctcattccaacagaatccgatctactataccgcagaattcgtcttttttcaagggaaatgtccgcccggggcggacgcacccttttccggcgcgggaatacgatgggagtagtcacgttgaagggaggcgcattccatgcggaatgaactgaatttgtgggtggcggggggcgatatgaggcaggccaagctggccgagctgctggccgcagacgggcacacggtgcacgcctatgcgctggagcggctgggcgcgctggacggggtggagatggaggagagcctggagggggccgccctggcggactgtgtggtgctccccctgccggcggcgggggagggcagcctgctcaacgcgcccctgtccgggcggaagcaccccctggccctggtgctggacgctttgcggccggggcaggtgatctgcgccggtatggtgggcccccagacggcggcgctggcggcggaccggggactcacactccacgactactttgcccgggaggagctggcggtggccaatgcggtgcccaccgccttgccggtaggacactattccgcccgccgggaacacacagccccgcccctggccatgccgggggcggggctgaactgttagccggcggaaggctcctgggcatcagcgtagcgggtgtcgatggaggtgaagtagctctggacaaaggcgcggaagcactggcccagctccgtcaggggacggcgcttgttataggcgatgccccagtaggcggtgggcgcgccgtcggcatactcccggaacaccaggtcggggtgtttgccctgaagagagagctccttgtacttgacggcggggacaatggagacacagttgttggactccaccagggaggtgagaaggtccaggtgccgtacgtcgtagtcgatgatgggagtcaggccgaacttgctgttctccgcggcgcagaaggtctccttgttgacccgggagccgtcgatggccaggtgtacccctgccagctcccggtgggctaccgcaggcagggcggccagtggatgctcccggcgcatgagcatgccgaagttgcacgcatagatgcgctcatagaccacctcttccgacgggggcgggagcaccgtcatggccagatccacctcgcaccggtccagcagactggtgacgttgggcaggtcggcccgctggtggatcaggttgacctcggggtgctccagcagaaaatgctccaggagggtggtgtcgtccgtcatgcagacgatggagaggggctcgggccgtccgctgtgctggttccgcacagcctggacgccggcgtccaggagtgaaacggcctgctccacgcttttcagcagcagctcgccgttctgattgagggcgatcttgccccgccgccgctcaaagagggggacgcccacctcctcctccaaccgggagatgctggtgctcagattgggctgggagacgaacaaggtctcggcggccttggacatattgcccagcttggctacggcgatgaagtatctcaactgtgaaagttccatgccaacttccctcccggtaagtatataaattgcttataccgttctaaagattatatatttttcaaacgcggctgtaaaggatatactgggcctgcgttaaaaaaatcacaaaaaggagaggacgcggaaaggaaaggggcggttcaggactatacggcgcggcgcactcaattcatgaaatgacgggcgggcatccgctccccactcaggaggattgcgtattatgagagaaaaaagaggatttggaccctggggctggttattgctgatctttgggctgctggtgtttttcagcaatggcggcttctttgcagacggaaccaacatcatttctcccgctgtggcggaacggctgaacgtggatcaaagcatcatcctgaccatgaactccgtggccggcatcgtcggcgtgctgatcgccgtcgcagcagggcaggtgaaccagcgcatcggccccagcaaagtggccgccggctgcctcattctggcgggcttgggccatatcgcggcctgcaacgccgtcaatgtccccatgtacttaatcgccatgtgctttgtgggcggcggcctcagctccggctcctttgtgggtgtgggtactctggtggccatgtggttccccaagagacagggacaggccatgagcatcgtggcaatgggctccaactttggaaccatgctctttgtcccgctgctcaacgtcctggcgggctcgatcggcatgcccatgggctctgtgatctgcggcggcgtggccgccgtggtgggtgtgatcggcatggcgcttctgcgcgatacccccaaggagcggggcctctatcccgataacgtcaccgaggccgagttcaaggccaactactcctccgcgccccccgagctggacaactccggctggaccaccggcaagctgctgcgcaccaaggagacctggctgtgcgctctgtccaccggctttctgatgctggcccagatgggcatcatgacccagctggtggcccgcaacattgaggtgggcattgcccccgatctggcggtcagtgttatgagcgctatcgccgtcatcggaattattggcgccgtcatcttcggccgcatcctgttcaggctgggcatcaagaaggccggcgtgctcacaggcgtgctgtatattgtggccatgctcttcaacatcagcggcgtgatgcctctggtgtgggtgtccctggtggttatcggcttcctgggcgccgcagcccccgccctgatgaactccgtccccggctctgtgttcggtcgggtgggctacgccaaggtcaacagcgtggtgttccccctgaccaacatcatcttcatgtgcaacttcgccgtcaacggcctcatcaagaagctgttcaacagcctgagcgtggcttacatcgtgtttgccgggctggcgttcctttcgattctgctgattctcgccctgcaggatcacaagtatgaccaggattacatggccgcgcacaagcagtaagcggccgggcccataaataggcaatctttagaaggaggtaaacgcaatgagcaagaagtcccttgtggcgctggctcatggcctggacgtgcaggagaatgtcacccgcgtctttgacatgatgggcggcgctgccaaaatgattgagcccaactctaccgttgtgctcaagcccaacgcggggcacgcggctcccccggagttcgccgtgtgcacccaccccgagaccgtccgcgccgtcatccgtgaggtaaaaaaggccaaccccaagcgcattgtcatcgccgaggccgccgccgtgggctgcgacaccgacgagtgctatgaggcctgcggcatcgccgccgtcgcccgggaggagggcgtcgagctggtggacatcaagaaggacaaggatctcatcaatgtggccgtgcggggctaccgctccaacatcagccacgtcaagctgccccgcctgctgctggaggccgagcacatcatcaacctgcccatcctcaaggcccacgccagcatggtgttctccggcgcgctgaagaacatcaagggcgtggtgcaggatcaggtccatgtgcagatgcaccagcagaacctgaccatggccatgatggacgtgtggtgggcctgccgcgccgacatcaacatcatggacgtgatgcacgccgccagcggctactctccccacacccccgtgcccatcgaggtggactgcatcatgggctcctatgaccccgtggcgctggaccgcatcgcctgcgagctggtgggcattgatcccgacggtgtggactacttccgcgtggcccaggaggccggcctgggcaccaccaaccgcgacgacatcgaggtggtgggcgacaaggtggccgactgctacaagaagatgtgggtcccctacctggaggacatccgcaaccgctggcccgagtatgaggtccactgtgagggcgcctgctccagctgtcaggccctgctgaccctcaacatggagacgctgaaggccatcggcgtctacgatgacaacaccgacatggtggtggtggccggcggccggaacaccctgtcccccgataccccggacgagaagatcctgctccacggcaactgcgcccgcaagcacctgaaggagcatcccaacgccttcttcctccaggggtgcccccctggagagggctccctctacatgtccgtgctgcgcaaggaggccatgaccggaaagcccgagcagatgcactggatccgcgagcggatggagatcgacgcccccgcttggcgctcctacgtggaaaaagaggcggagaagttctatggatcagacgataagtaagggctttgtctttctggaaaacgccccggagctgatgcgcctgctggaggacatcttcaccgacgacttcatgcaggagtatacccgcttcgagagctttgagggcttccggtattccagcgccgtgatggtcaactggaaggcggataccctgatctacgccccgccgctgctggacgcctttgtgaaagagagcaccgacttcgccacctgggacgagatggtgagctccgccaccggcctgcgctaccgcagataacgcctgtccgcggcttttcagcacagcctgcgagacccctccgggcctctaccggacgacccttcggaatgctgaaccataacgaggccgccagacgcttgtccccacaacgcctggcggctcgccatatcccggctggggcggagcaacgccccgccgggacacctgccaccccggcaaaaggagatatgtcattatgaaggttgcagatatcaagcgcgccgcctgcgtgggcggcggcgtgatcggctccagctgggccatccagttcgccatgcgcgggctggccgtgaccctgtacgacatcaacgacgaacagctcaaaaggagcgaggcccagatgcacaagagcctggacgctctggagcaatttaacgccattaccccggagcgccggggggagatcgtggcggccatccgcctgaccacctccatggaggaggccgtggcggacgcccagttcatccaggagagcggcccggagcgcctggagatcaagcagtccattctggcccaggtggaagcctgcgccgcggcggacgccctctacgccagctccacctccggcctgctcatctctgacattgccgccaaggcggcccacccggagcgctgcgtgggggcccatccctacaatccgccccacctcatccccctggtggagctgacctccggcgacaagaccgaccccgccctgctccggctggcctacgacttctaccagtccatcggcaaggaggccgtcctcctgcgccgggagtgccccggcttcatcgccaaccggctccagttggccctctaccgggaggtgcaggatctggtgatgcggggggtgtgctccgtggaggacgcggacaaggccctggtctacggccccggcctgcgctgggccatcttcggccacaacatgatcatgcagctgggcaaccccggcggcctgaccggcatggtgaatatgctgggcaactccggcgaccgctggctggccgacatggcctcctggacccaccagcccgacaactgggccgaggtggcccagcccggcgtggacgaggagatgaagcacttccccgaccacatcggccacaccaacgaggcgtgcgcggcctaccgcgaccagatgctcattgagctgctcaagctccacaagaagctgtaaaggaggaaaccgggtgaccgccaatacgaccgcatccgtccgggccttcgccggccgccgctggctgtgcctgatctccgccatggtgatctgcgtgtgcgccggcttcggctacgcctggagcgtgctccagacccccattatagcccggttcggctgggccgactccggggtggccctggcctacaccatcacggtggtgtgctccaccatggcccccctcctcttcggcgggctgatccgccgcatgtccagccgcctttgcgtggccgtgggggccgtcctctttggcgccggcctcttcgccgccggcctgatgagccagctctggcagctctacctgttctacggcgtgatttccggcctgggggtgggcttcatctatcccagcatgatggcctatgtggtgcgcctctttcccgaccgctccggcatggcctccggcctgggcaccgctgcctacggctccggcgccatcctgtgggcccccaccgccgccgcgctgatggagaaggtgggcctgggcagcgccttccgggtgctgggggtgctctttgccgcggtgattctgctgggctccctgctgctggccgagccgccggagggcttccacgccgccatggctcccgccgccagcggcgggcaggggagcggcgccgacctgaaccggggacagatggtgcgcaccggggccttctaccggatggtggcggtatttacctgcggcctggtggccggggtgatcgtcatcagccaggcatcccccatcctccagcagaccctgggctacgcccccgcccgggccgccctcttcgtcagcgtgttctccgcctgcaacatggccggccgcttcgtgtggggcagcctctccgaccggctgggcctggtcaacaccgccggggcggtgttcctgctgtgcatcctgtccatggccgccctggccgtgacgggggcggaggggctggtgctcctcttcatgggggtggccgcctcctgctacggcggactggcctccctcctcacccccctcaccgcccgcatgttcggcccccgctacattacggagaactacggcgtcatgtacgtggtgttcggcctggccagcctcatcggccccagcctggccaccaccttcaagaccgcgggaggcggcagctacaccggcgcctatgtgaccgccgcggtgctggccgtcatcggcctggcgctctcccgcttcctgaaagccccgtcccgcaaaggagaatgatatggaactgagtaaagtgagaacggccgaggagatcatcgcccggttcaaggatgggcagatcatcgccatcggcggacagaccaaccagtacatgcccgaccgcctgatcgactgcgtgctggagagcggcgccaggcacctgaccatctactccatcgactccagcgacccgggccacggcgtcagcctgctggtggaggccggccgggtggacgccatgatcaccacccacgtgggcaccaaccccctgaccaacgccaaaatccagtccggggcgctgaaggcggagttcaaccccatgggcaccttcatcgagcgcatccgctgcggcggcgcggggctgggcggcgtgctcaccaaaaccggcctgggcaccgtggtggaggagggtaaacagatcattgaggtcaatggcgagagctatctgctggagaccgccctccgcgccgacatcgccctcacccgctgccgccgggccgaccctctgggcaacctggcctacagcggcagcagcggccacgcctctcacccggtggtcgccacctgcggcgcactgtccatcgtggagtgcgaccacttctgcgacctgggggagctcgggcccgacgaggtcaaggtgcccggcttgttcatcgacatgattctggcgtaaggaggcgggacaatggacaacagaaattttatcgccaagcgggcggccgcctacttccggcccggcgacgtggtcaacctgggcatcggcatccccagcctctgcggcagctacgccgtggacggcgtactcttccagagcgagaacggcttcatcggcatcggccccacggtgcaggaggggctgatgaaaaacgagcgcttcgtcaatgcgggcggagtgcccttcgtccccgtgccggggagcagcgccttcgatgtggccatgtccttcaacgtcatccgctgcggacgtctcgccgccacggtgctgggcggactccaggtgtcggcacagggggatctggctaactgggccacccccggccgggccttcggcatggggggcgccatggatctgtgcaacggcgcccggaaggtcattgtggccatggagctggtggccaaggacggctcccctaaggtggtcagccggtgcaccctgcccctcaccgctgtaaagtgcgtcaaccacatcgtcaccgaccgctgcgtcatcgacgtgacggaggaggggctggtcctctccgagatccggaagggccacaccgtggaggagatccaggccgcggtggagcccgtgctcctggtgtcccccgacttgaaggaaatggaggaagattgatatggcaaaaccgctgagcaagacggtcgtggtggcctatggccgctccgccgtggccaagtctggcaagaagggcgccctgcgcaatctgcaccccatcgacatgggcgggctggtgctcaagggcgtgatggagaaaatccccaagttggaccccgccctggtggaggatgtgattctgggctgcgccatcccggaggccaagcagggcctcaaccccgcccggctggtggccgcccgggccggcctgccctacaccgcctgcggccttaccgtggaccgcttctgttcatcctctctccaggccgtggccctggccgcctggcagatcgaggccggacaggccgactgcatcgtggccggaggtatcgagtccatgaccgccctgcccatgaccctggaccgcagcggcgacatggacccctggctgctggagcacgaccccgcccagtacatctccaacggcgagaccgccgagaacgtggcggagaagtacaacgtcacccgggaggagatggaccgcctggctctggagagccaccgaaaggcggccgccgcccaggacgcggggtattttgacgagcagatcatccccctgcccggcgtggacgccgagggcaacgagatcgtctttgacaaggaccagggtatccgccgtgacaccaccctggaaaagatggcgtccatgaagccctgcttccgggagaacggccgggtcaccgccgccacctcctcccagaccagcgacggcgcggctttcctggtgctgatgagccgggacaaggccgccgagatgggcatccggcccctggcctctttcctgggcttctgtgtgggcggcctggatccggcctacatgggcctgggccccatctacgccgcgcccaaggtgctggagtacaccggcctgaccatggacgatatggacgtgattgagctcaacgaggccttcgccgcccaggtcagcccctgcatcagggagctgggcatggatcccgccagggtcaaccccaacggcggcgccatggccctgggccaccccctgggtgctaccggtgcggtgctgagctgcaaggccatctcggagctgcgccgtaccggcggcaagtatgctatggttaccatgtgtatcgccggcggcatgggcgcggcaggcattttccagacagagtagacggccttattctgcccgtttgtgaggaggtgaaaaagaagagggcacggaaaaagtaaataaatagagaggagaagattttaatgtcagctagcgtactagtttccttgatggtggtcatcattgctttcgtgctgtttttctttctcagtttccgtggcgtcaacctgtttctgaccgtctttgcctgcactgtgctggtgtgcctgtgcaccccggacggcctgacctccatcttcaccacgttcctgccctccatgggcaacatgtttcagcagttcttcctgctctacaccatcggcggcgcgttcggcttctgtctgatggagagtggcctgggcgatgccatggccacccacatgatcaaaatcttcggtgagaagtggatcgccgtggccctattcgtcatcacctgcctgatgatggccgccggcgtggcctcctaccagtacgctgtcctggccatctccctgcccgtactgaaaaagctgaatatgtcccggaaggtggccctggcggccatgtccgccggcgccggctctgtggcctacggtaccctcattggcatgccaaacgccctgaacatcgccccaaccacctacctgggcaccaccaccatggccggtcccgtcatcagcctggtgtgtaccgccttttccgtggcgttcatcgtgggctacctgattctcctgagcaagcgcctgaaggccaggggggagggctttgtgacctacgaggacgaccctaaaaacgataaggacgaggcatccctgccccccgcctggaagggatacctctgcgtggcggccatcatcggcctgagcctgctgttccagtggttcggcatcaccgccatccaggccacgacctacgctcaggtgctctccatcgccctgcttttcctgctggtgggccgcaaggggctggcccatcccttccagacctgcgtgcgcggcattcagggctccctgatccccgtcgtctttatttccatcgtggtgggctacggcaccgccgtgcaggccaccccggtgttcggctggctcgtggagcaggtgctctccttggatatgaacccctacctgctcacctttgtggcggtcaacctgctggccggtatgacggccaacggcaccggcggcgtgaccctgtttatggagaatttcggcgccacgattcttggcaaccccgccatcaatgtgggagctctgcaccgcatcgccgccatctccggcgcgggcttcgactccctgccccacaacggggccattgccttccagctatccgtgttcaagctctcctataaggacggctacttccagcagttcatgatgagcgtgctggtcaacctgctggcggggctgctggctgtgcttatggcagtcgtgcttttctgaaagtgaaaaatcaatccaatccgtatatcaaatgaaatttggaggtatgccttatgggaaaacctatggccgattatgtcaagctccccgagctggaggagtacaaggagtggttcaaggacttcgcggatctgtaccgggaggacggtatccttcaggtaacctggaagaccctggacggtcccatgcaccacagcggcatgtcccaccgcgccatcagccaactggtccgcgtgctgagcctggactacaagaacgagatcatcatcttcacccacatcggcgaccactggatgaccgagtccgaccccaacggctgggagacttactccgagctacccacccagcggttccagcaccagtattttgacgacaccaacctcatcaagaacatggtatttgacctggacgtgcccaccatcggcgccatccccggctccggcttccactgggactccgccatgctcagcgacatcaccatctgctccgaggatacctggatggaggtgccccacgcccacggcggcctggtgcccggcgacggcatgggcctgatggcccagcactacttcggcaccaagcggggcaactactacatgatgaccgcacgccagtggaccgcccagcagatgctggactggggcatggtcagcgaggtggtgcccaaggatcaggtcatggcccgcgcctgggagatcgcccgcatgtggaagacgatgccctatgagaaccgcaccatcatgtccaacctggccaagcggccgctgaagaagctgctggtggaggatctgaagctgcacaccgtctccgagcagtacggctccctgctgcgcatcgccgccggcgacatgggcgaccgcaacgccgcacagcaggatgagaagtacatcagccagaccaacgactggcgctacaccttcccccacatgcagcaggcacccacccgtgagagctgggccgccttccgcgccgagcccatcgagtggttcaagaaggtggaggccggcgaggcggtcaacccctgcgaccccacccgccccgtgaagccctaccgccccgatggcgagtaaggcactgtatggaatcaggaggtagttaccatgggaaaaccaatggcggattacgtcaagctgcccgagtttgacgagtacaaggagtggttcagggacttcgccgacctcaagcgggaagacggcatcgtgcaggtgacctggaagaccctggacggccccatgcaccacagcggcatgtcccaccgggccatgagccagctcacccgctggctgagcctggacttcaaaaacgagatcatcatttacacccacatcggcgacaactggatgatcgagtccgacgccaacggctgggagacttactccgagctgcccacccagcggttccagcaccagtattttgacgacaccaacctcatcaagaacatggtgttcgacctggacgtgcccaccatcggcgccatccccggccccggcttccactgggattccgccatgctgtgcgacattaccctgtgctccgaggacaccaagatggaggtgccccacgctcagggggggctggtgcccggcgacggtatgggcctgatgtgccagcactacttcggcaccaagcggggcaactactacatgatgacctcccgccagttcaccgcccggcagatgctggagtggggcatggtcaacgaggtgctgcccaagggcaaggtgctggagcgggcctgggagatcgcccgcatgtggaagaccatgccctacgagaaccgcaccatcatgtccaacctggccaagcggccgctgaagaagctgctggtggaggatctgaagctgcacaccgtcagcgagcagtacggctccctgctgcgcatcgccgccggggatctgggcgacgagcactccgcccagcaggatgagaagtacatcagccgcgtcaacgactggcgctacgccacccgagacatggaggagccccagaccgccgaatcctggcgcaccatgcccctcaaggccgccgagtggtggaagaaggtggaggccggtgagattgagaacccctatgtcttcgagcacagcaacgagccggaggactacgagttttaattccaaagcgcggaagaaggggcggccggtacgtcccttcttcctgtgcattgcttataaaggagtgtcacagctatggcaaagaccatcatcaccgccgcgctgaccggcgcggtcacccccgcgggctacaagatccccgagacgccccagcagatcgccgacgaggcctacgacgcctggaagctgggcgccgctgtggtccatctgcacatgcgcgccgacgacggcctgggcgccatggacaaggagaagttccgcgagaccatcaagctcatccgcagccacaaggactgcgacgtgatcatcaactgcacctcctccggcgcctccccggagcaccccgccaccgacgacgagcgcatggcccaccacagggagctgtccggcatcgagatgggctcctacgacgcgggctccttcaactggatgcccggcggcgtgttcgtcaactccccccagttcctccagaagctgggcgatctttacatggagaagggcatcaagccggagctggagatctttgacgctggcatgctgggcgtggccaactactttgtaaagaagggccatctgcccaccccctgccactaccagttctgcctgggtgtgctgggcggcatgcccgccacggtggagaacctgctctacctagtgaagcacatccccgccggttccacctggtcggccttcggcgtgggcaagggccacctgcccatcctgttcgcctccctggccctgggcggccacatccgcgtgggcatggaggacaacgtggtgtatgaggtgaaggagaacggcgagaaggtcatggccaccaaccacatgctggtggagcgggccgtcaacgccgttaaggccttcggcaatacccccgccacccccgacgaggcccgccggatgctgggcatccccgccttcgacggcgacaaggtgcgcgccgccctgggcattgactaactgaatttcctggccccagcggcggcaggagcagacgctcctgccgccgctttgttttccacacatttcaggcagacgggggaaaacccgcgcatagagtaggtggaaagggggcatggaaggatggaacatgcgctgcgggtggcggcctactgccgggtatccacggacaaggaggatcagcttcactccctggccgcccagcaggcctactttgaggggtacatcgcccggcacgactggcgctgcgcgggcattttcgccgacgagggcctgtcaggcaccaccctccgccggcccagattcgccgagctgctccggctggcccggtcgggggcggtggatctgattctcaccaaggaggtgtcccgcttcgcccgcaacacggtggacgccctccaggtgacccggcggctgagggaacagggggtgggggtaattttcctcagcgacggcattgacacccgggacaacgacggggagttccgccttaccatcatggccagcgtggcccaggaggagagccgtaagatctccgagcgcacccgctgggggcagctccaggccatgcggcggggggtggccttcggcaacgacacggtgtacggctatgcgctgcggggcggggcgctcaccatccggccggaacaggcggaggtggtgcgggaggtgtaccgcaagtgtctggaggagggtaaaggggcccacaccattgcccgggagctcaccgaggcgggggtggccccgcccctccgggcggacggggcgtggtcggccgccatgatactgcggctgctccacaacgagaagtattgcggcgacctgctccagaaaaagtaccgcaccgtggaccatctgacccaccggaaggtggtcaaccgcggggcggaggagcagttccgcctggaaaaccaccacccggccattgtcagccgggcccagtttgccgccgtccaggccgagctggcccggcgcgcggggttggcgggggagaggagccgcttttccgcccgctactggtattccggcaagctggtgtgtggggcgtgcggcgggcgcctcaccgccaagcgcacccggcgtcccgatgggcgggagtacctgcgcttcgtttgccggggacggggaacgggatgcgccatgagggcggtaccgggagacgtgctgaccgcctgtgtccgccacgtgctgggcgaggtgggactgcctctgggggcgatggctgcggaggtactggcgtcggcccggccggcgggggcggagtgcggggcggcggctctgcggcaggccctccgccgtcaggaggcccgccgggccagggcactggacgcctttctggacgggaccctcagccgggaagagctggcggcgctcactgcccggagcgaggcggagcggtcccggctggcccggcggctggccgacctggaaatggcgggggcggaacggccggagcgccgcgccgccctgctggactggctggcgggagagctggccgggggcgaggcggtgctggacgcggcggtaaagcgggtcacggtccaggccgacgccctgctggttgagctggaggagctgcccctgtgcttccgtgtccgggcgcaggccggcgggcggggggcggcgcggcgggttgaggtgaccgagtgtacccccctcccgcgctgaacagcggtgtcctttcggaaaggcggtgcccaccgcagagggggccatccagctggctatggaggagctgcccattaccctccacggcgcccgggttctggtgatcggctacggccgtctgggccgggtgctggccgaccggctggcgggcctgaaggccagggtcagcgtggcggcccgccggtatgccgacctggcctgggcagagaactgcggctacggcgtggagcacaccgggcagttggagggctggctgtgcggctatgatctggtggtcaataccgtccctgtccgcgttctgcgggaggcggagctggcagatctgaagccgggctgcctggtcattgacctggcctccaagcctggaggggtagacttcgacgcggcggcccggctgggggtcaaggccttctgggccctgtctctgcccggcaaggtggcaccggtcacagcgggcaagagcatcaagacaaccatctataacatcctcaccgaattaggagtgtgaacatggaacataggaagattggattcgccttctgcggctccttctgtacgtacagccaggccatggaggtgctggagcgggtacagtccaggtacggcgacgtactccccatcgtctcggaggccggcgccgccactgatacccgcttcggggcggcccacgactttatgcgggagatggagcgcatctgcggccggagggtggtggacagcatcgccaaggccgagcccattgggcccaggcatctgctggatgtgctggtcatctgtccctgcacgggcaacaccctggccaagctggcaaacggcgtcacggacaccacggttaccatggcggccaaggctcacctgcgcaacggggggccggtggtgctctgccctgccaccaacgacggtctggcggcctcggccaggaatatcggcgtactgctggacaagaaaaacgtctatttcgtccccttccggcaggacgatcccgccaagaagcccacctccctggtggccgacttttccctggtcccagccgctatcgacgcggcgctggagggccgccagctccagcccgtgctgcttggaccgcaggaggcggattaaaaaacacaccgcccccggcgtagccgggggcggtgtgtttttgtgattgtttacagggttttggcaaaatccatggggatataggtgaagccgtcccgcacatagcagtagtgggtcagctcaatggtttcaccagtgccggtgacacattcatagctctcaggggtaaaggtataggtgacatcgcccttggcgatggtggtggaaccgtcggccttgttccaggtgacggtgtagccgcggctctcggccacctggcgcaggggaacgtcggagaggaaggtggtgggtgtcttgctggaggacaggcctgtgttgtgcatcatggtggtcagcaacttggcgtacaggttatccgccagaagcatctcccgctccgccatatcaatgccgagctgggttacataggcgtcgcctgcggcgcggctctcggagtacttggccagcatggcgggggcggcatccagcatctcctggtacatcagctcctcctggagcttccagaagtcctttacaccctggctatacagggagcggttctgttcagcaatggtgcagatgctcttgaacttccagaaggcgccgtcggggttgtaggtgtcgccgtccagatgataggccggggcggtgtcggtaatgccggagaagaagggaatgaacacggagtgctccgtgttgcccagggccagccagtcgatggaggagcactccgcgggccagtcggggaaggtctggaggatatggatctgggaggaacgctcggtgccgatgacgcggttctcctcattgccgggcagggtcacgtccaggggagtgccctcgtaccggttgcggtagatatccatgacggtcagaacgctgaccttctcgtcgggggagtagaacagaggatagaattcatcggagtcgtactcgcccgccagggagggggccaggatggtcatgccggcccagttgcgcatgttgttgtagtcctcgcgggtgttgttggtcaccgatttggccaggtggtacagctcgccctccttgacggccaggcccagcttgtcgatggtgtcgaacagaccgtcagagtagatgtagccgtcctcgggagtggccttggggtccaccagcccgatcatgttgtggttgccgaacacggccaccttgtcgtcgggcatcttcatggcgcagtactggtgcccgccgtagatctccacgatccaggcctcgtcctggtcggtgatcatgacggtgttgccctcttcggagccgtactcgtccacatagcccagcagcacgtccacggcctcccgggcggtggtggagacggcggctaccgaggcggccagaatggcctcacgcaggccgggctccacaaagggatcctcagcctcccaggcctcgcaggtggaggtggaaacggtggcggtgatgctcacaccgtactcattggtgcaggaaccggggtacatgccgtcgtcgccccgggtgtagtcggggacataggtgtacttataggtggtggcgggcagggggatctggaacccggtggcggtatcggtgatgaagcggccgggcacattttccacccggggctgtacctgaaacattttgttgtagtcgccctggccctggtcctcgctgcgtgcaatgagataggtcccctggtcgctgacatccttgcctacgtacacgccggtacacgccagagcgctggtgctgaggagcatcgcgcccgccagtgtgacggataagacgcgaagggattttttcatgtttgattacctcacctttttttgaattcagccggcctcggcttgggacaggtccatgagccccccttctgcaagaaagcgtgcagattttaatatgggaaatgctgtatctacatttttgcacaatatagacaaaatgtcaaggagaatcattgggcgattttacggctgtatgtgtggaaaaggagaaagatcaactgcaaatagccaggagggacagcggattttagcagaagtatagagagcgtatggtacggtttttctgggatcaacaaaaaagctgcgcccccatgggggcgcagctttgggactcagaagcggctgatctgcgcggcgtccatccgctccaaaatggcggcggccagccgagcggcgttctccacgtcgctgtgggcggcgatgccgtagtgggtatggatgtaacgcacagggatgccgatgacgatgacgggcacgccctggttggacagatggatgggcgcgccgttggtagagccgccggtgcgcacgctctcctgcacggggatgcccagctcctccgccagatccagggcatagcgctggaagcgggggttggtgatcatgcgggcgtcgatgtggcgcagcatgggccccttgtggatggcggtctgtatcatatagggttcggccacggtgtcgtcggcggggcagccttcaaagacgatggccaggtcgggtttcacggtgttggcggtgacagtggcgccgcgggtacccatctcctcctggacggcgaacgcgccggtcacgtccacattcagcgtcttgtcccgcagattgtccagggtgcgcagaatggaggcgcagcccaggcggcagtcaaaggccttgccaatcatcagatcgtgtttctcctggtactcgaaggtcacgtcgggcaccaccggggcggccatgcgcacgcggaagtcccgcagtacctcctcccgggaggaggcgccgatgtcgatgctcatgtcctctacggcgggctgggccttgcgctcggcctcgctcataaagtgggggggcttgctggcggtgacgccggggatatagtccccggcggccgtctgaacccaaacccggtgggcggggatgttggagggaacccagccgcccagggtggtgaagcgcagggtgccgttgggcttgacggcctgcaccatgaaggccacctcgtcggtgtgggcgtccagttgaaccatgggccgtccgccctggttcccgctgcgggagaggtagaggttgcgcaggctgtcctcccggaaggagcccagcccctcgccgtagcggcgcagaaccgcgagaacctcgtcctcaaagccgggcgcgcccttggcgttggagagggcggcgcacagttccagtgattgctttttatccattcgtgtctatccccacattctaaccaattaaaattcggtgccgcaggccttggcgatgtccaccttcttgaactcctccatgaagtccacgatgtagtcggcggtggtctggagcatcttccggccccactcctcggtggcggtctcggggtggtcgggaccaatccatccgttgtgggtgacggagggggtcaggcggggaatgttgacggtgacgcccttgtattcaatggaggtgaagccggtggccttcagggtatcggacacgtcgtggagcttcatggggccggccacctcgctctgatccaccagggaggggtcaatacccaggatggccgccgtctcttcgccgccgccgtggccgcccttccaggccgggtccatgtcccaggccatgagccaccagttcagttcagccaggataccgcccttgcgctggatgtcatagcccacccggtcgatggacttgatgttgccgccgtggccgttgaggatgacgaagcggcgggcgccgtgctggaacaggctgtcgcacacccggccgagcacctgatagagcagctcggtgcccaggttgatggtgccgggatagtcgcacaggctctcagtggcgccgtaggggatggtggggcagatgagcacgtcgctcttctgctcgatcttgtccagcaggaagtcggggatgagggtgtcggtgcccaggggcatgtggcgaccgtggcactcgatggagccgatgccgatgaggacggtatcgtgagcgcggaaatattcctctgccttgggccaggtcaggttggataaacgcatggtattacctccttgtattgtgcggagcgcagtccggtcgggctggcttcagagtggatagtggcaggcgcacaggtggccgggggcgatctcctttaactcggggacttcgctgcggcacttgtccgtgcagtaggggcagcgggggtggaatttgcagccggtgggggtgtggatggggctggggggttcaccctcgatggcgtagtcccgctggcggttcaggggatccagcttgggggccgccttggtcagcacctgggtataggggtgggcggggtgctggaagatggcctcggtgggacccacctccacattgctgcccaggtacatcaccatcacccggtgggtgatgtggcgcaccacccgcagatcgtgggagatgaacagcaccgtcagctccagctcccgctggagctgggccagcagattgatgatctgggcctggatggatacgtccagggcggacacgggctcgtccgccacaataaaggcgggattgagggagagggcccgggcaatgccgatgcgctggcgctggccgccggagaactcgccgggaaagcgctcggcgatgtccatggtcagtccgctcatggtgaggagctgctccacccgggcggggagctcctcggccggcaccaccttgtgtacccgcagcatctcggcgatggtgtcatataccgacatacgggggttgagggaggagtaagggtcctggaagatcatctgcatctgggggcggagcctgcggagcgcatcgcccttcatgtgggagatgtccgtgccgttgaggaggatggtgccgctggtgggctcatacagccggagaatggtgcgggccagggtggacttgccgcagcccgactcgcccaccagacccaggttttcccccttgaagagctggaaggacacgtcgttgacggccttgaggtagcgtttctccttccgctggagcacgtcgccggccgtccgcttcagcggaaaccatttgcacaggtgttccacctccagcagcaggggacgggaatcagccatggggggtgtcctcctttcgtccggcgccgtccggcacctcgatcaggccctggaaggacgcggtcacgtccaggcggtgacagcgggccaggtggcccggctccacctcggtgagcgcgggccgctccctgcggcagaggtcgcaggcgtatttgcaccgtggggagaaggggcagccctccggcaggtgggccaggttggggggcgaacccttgatggcctccagcgtggtgccggcggtctcctcgttgggcagggagcccatcaggccgtaggtataggggtggcggggccggctgaagagcgtgaccgtgtcggtcatctccacgatctggccggcatacatgacggccacccggtcgcacatctgggcgatgacgcccagatcatgggtcaccaggatgatgctcatacccagctcctgcttgagctggttgagcagcttcatgatctggtcctggatggttacatccagcgcggtggtgggctcgtcggccagcagcagcttgggccgggcgcccagggcgatggcaatcatggcgcgctggcgcatgccgccggagaactggtggggatactcatccagccgggtctcgggggaggggatgcccaccagcttgagcagttcaatggcccgccggcgcttctcctccttggacagcttctccccctcaaaggcctcgtacatctggctgcggatgcgcagcaccggattgagggcggtcatgggctcctggaagatcatggagatctccttgccccggattttttgcagctcccgctggctcattttggcgatgtccgcccccttgtagcggattgcgccgccggtgatccggccgggctgcttcagcaggcccaggatggagcggagggtctggctcttgccgcagcccgactcgcccaccaggccgaaggtctccccctggaagacctggaaggagacgccgtccacggcgcggacagtctcccgcttgctggggaaggctacgtggagatcactgacttcaagtagtttttccatgccgggctcaccgtcctttcgtgcgcaggaagtcggtcaggccgtcccccagcagggagaagccgacgccgctgacggccaggaacaggccggggaacagggtgggccaccaggcgaaggtgatgaaattgcggccctcgttgagaatggagccccactccggtgtggggggcgagacacccaggcccaggaagctcatggacgcgcccgtgagcatgcacatgaccacgtcggaggcggcgaagaccaccgccgagctgatgacgttgggcagcaggtggcggaacagaatccgggcgtcggagaagccggccacccgcgcggcctggatgaactcagagtccttgagcaccagcacctcgctgcgcaccagcttggcgtagctcatccaccccaccagccacagggcgatgaacaggttgatcagtccctggcccaggatggccatgatggtgatgaccaggatggtgaaggggaaggccatcatgatatcggtgatgcgcatgagcaggctgtccaggaagccgccgtagtagccggccagcagtccgatcatgccgcccaccagaaagggaatcaccacgcccagcacgccgatgagcagatcgatgcgggtaccccagatgacgcgggagaagatgtcgcggccgtagaagtccgtaccgaaccagtgggccgcactgggggcctggttggacacggtgacgtcggtggcgatgggatcgtagggggcgatgaactgggggaacagggccatgaggatgaccaccagcacaatcagcaggccgatcacgaaagagggcttggccagccacgccggcatggagcgcttctgctccagcggactgacgccgtgataacgtttcattcgtacacccctttctacagattgacccggggatccaggaaggaatagaggatatcggtgatcagattgatgaccagcaccagcaccgcaaagagcagcaccacatactgcaccaccgcatagtcccggccgaagatggcgtcgctggccagcttgccgatgccgggtacggagaacaccgtctcgatgatgactgagccgcccagcatggccgccatgcgcatactcagaagggtgacggtggagatcatggcgttgcgcatcacgtggcgggtacgtacctcaccgctggtaatgcccttgctgcgggcaaagtccacataatccatgcgggtgatatccaccaccgagttgcgggtgttgcgcagcagcagggcggaggtcatgagggactgggtgacggcgggcaggatcaggcagcggaactgtcccagaagggtgtccgaccagccgccggccggcagccatttcagcttcagggcaaagacgatcatcagcagcaggcccacccagaaggagggcatggagatggccaccagggaggtggtgcgcaccacctggtcgcccaggcggtccttgtggacgccggcaaaatagcccaggggcaggctgatgaccagagagatcaccgtgctcatcagggtcagcgccagggtcaccggaaagcgggaggccagaagctcggacaccggcatctggtaggtgaaggagttgccgaagtccagagtgaaaatctgcttcaagaacaggaggtactgggtgagcaggggctcattcaggcccagcttctccgtcagggcggccacagcctcctctgtggccttctcgcccagaatcaggcgggctggctcaccggggatgaagcggatgatggaaaacaccaggatggtgaccacaaacagaaccggaatcatctgaaggatccgtttgaggatgtagttgagtcgattcaagaagttacacctgcctctgtcagttcgtgggaccgcgcgtcccgttcccggggaactgcggaacgccttgtccacggggaagccgcaccttccccatggacagagcgtcccgcaaaaagagccgggggatggagccgtatgctccaccccccgcggctggggccccgccgtccgggcgaacgggagggcgcggctcagttggccttggtccagtacatggcctggtacacgtagaaggggttgacctgcaggccgtctaccttggcggagcgggcgaaggcgaagtcattccggtacagggggatgacgttggcgttgtcatacacctgctgctgaatgtcgcggtacatctccacgcgcttatcgtggtccatctccgtctgggcggccatgtagagggcgtccagctcctcgtcgttcaggccggtgtagaagcactgggcctgatcgtagtccacggtccagcccaccacgccggagggatcctggtagtcgtccacccactggagaatggtggcctggtggctctgagagctgtacttgtcggtcagggtggcggactccagaagctcgatgttgcaggagaagccggcctggtccacctcggacttgatgagggtggcaatctgctcatagaaggtggagccggtgcggatggacagggtaaactccacgggctcggtgtagccggcatcggccagcatctgcttggcggtgtcgggagcgtactcggtcacctgcagatcggtgttgcaccagtcgccctgggtctcggagacaatggcggccacaggggtgccgtactcgccggcgatggcgctggccagctcggacttgttcagcgcgtaatacagggcctggcgcaccttgacatcgtcaaagggaggcttcgtggtgttgacggtcagatagtagatctgggtggaggggaagatgtccagcgccagggcctcgttgctctccacgccctgggcgagagagaaggggaaggtgggggccacgtcgatctggccggactggagctgcatcaggcgggtgttgtcgtcggcgatcaggacgtacttgatctccttggtcttgggcatgccctccacgcggtagtaggggttggcctccagagtcaggctgctgccctgggtccagtccttcagcatgtaggggccggtgccgaccgggttcttcaggtactcctcgtcgctcatgctctcggcataggactggtcgcccagcaccatgttgaagcagcccagctcggccagaaaggcggcgttgggttcggtgagggtgatgaccacctgctcgtcggtggcctccacggtgtcgatggcctcggcgatatagcggtagttggaggtttcgtagtcgcgggcgcggtagaaggaccagacccagtcgctgggctccacatcctcgccgttggagaacttgacgccctgcaccagattgaaggtataggtcaggccgtcgtcgctgatggtccagtcggtggccaggacgggctcgatagagccgtcgtcgccggtgcggaccaggccctcgaaaatctgctgggacacctgaacctcggcagggcccataccgggggcattgggctcaatgtacttgggctcggcggtaatgccgaccacgatctggtcggcgtaggatgtcggctctgcggtggtgccgggggtaggggacgcggtgccggtggcgtccccatttccgctgccgccagagcaggcggccaggcccaggcccatcaccgcggcaagagacagggccgtcagtttccgtgcggtaggattcatgcatactcctccttactaatgttttctactacagcgtttactgtagtaagataaactaaattatagcaaatgcttttgtcaattgcaactgtttttcgcgacggatcgccaggcaaattgatagaaaaatcccctctttccataaaaagaggggattttgtgcaggattaaattcatattgaagtgtttgggtcggaaaaacaactgtcaaactttcggtgcagtgtgtcacggcaggtcttctcctcctgggtgggagcgccactggtaaaggtatagagcatagccagggtgtccaccaggccgaccatggaggtaaaggagttggtcatacccatcagctccacatggcagagcagggtagtctgggcgcagcgggccacgggggaatcgggccggtccgtaagggctgccacgggcatgccgatggaagcgcagtagcgggtcagggcgatggtgtcgttgccgtacgggggcacggtgatggcaatcagcagcccatcctggggcggctgggcggagagccgccggaacatatcctgccgggcctgcagatccaggatgcagcagtccagctccagtgagagcagccggtgctccaggtatccggcgggaaaacggctgaagtcatgggcggcgatgaaaatacgcctggcccggcgcagggcttgggtgaaggccagcagcagctccacggagttgccgtccagggtgctctggagggcctcccgctcggcgcggcagacccgctggtacagatcctgggcactgccgctgcccgccaccgccagtttcagccggtctccggcgttgacgcgcacgatcaggtagtcctgaagcgccttcttgaggtccatatagctgccaagtcccaggccgcggcagaagttcaggaccgtgacctccgtggtcccgacctgctgggcaaagcttctgagggagagaaagcagcactgctccgggtaattcaggataaagtcggagatacgctgcctggggcggctgaaggagccgtaattggccctgatttgctccaaaatatccatggtggtcctttccgtgtgcaaagattcggttcgcctgctagtgtaccatagccggaggagagcgtacaagcacttttgcaccgcaggcagacgcggggcggcccactcataggccgccccgtgttccacttttaccaaaagccggacgcggcgttacagcagaatcaccccggcgtcgcgacaggcctggatggtctgttcatcccagacactggcctgcacctcgccgatgtgggccttgagccccgcccgaccgtggccgggcggggaccccacagattttatctgcgcggggcgaatgaatcgccccggcatcaaggttttgcagagcaaaacgcttggacgcgcccaaaggcgcgggcctgggcaaagcccaatcggcgtcagagcagaattaccccggcgtcgcggcaggcctggatggtctgttcatcccagacactggcctgcacctcgccgatgtgggccttgcccagcaggagcatgcacaggcgggactggccgatgccgccgccgatggtgaggggcagcttgccctccagcagcagcttgtggaagggaagctcccgccgtgcctcgcacccggcgagggtgagctgacggtccagggcggcggcgtccacccggatgcccatggaggacagctcaaaagcccgctccagcactgggttccacaccaggatatccccgttgagggtccagtcgtcgtagtcgggggcccggccgtcgtgtgggcggcccgacttgagcgcgccgccgatgcccatcaggaaggtgacgggatgctctttcacccaggcatcctcccgctccttgggggagcggtcgggccagagctcctccagctcctgggtggtgacgaaggagacctccgtccccagcggaggaagagcggtgagttggggaaagaccgagcgcagggtgtgctgggtctctgccatggcagagacaatggtgcgcacggtttgccggagatagtcggcgttccggtcccggggggcaatgatcttctcccagtcccactgatccacatagacggagtgcaggttgtccagctcctcgtcccggcggatggcgttcatatcggtgtagaggccctcacccacggagaactggtagcggtagagggccatccgcttccacttggccagggagtggaccacctgtgcgtcccgcccggcgtcgggaatgtcgaaggagacggcccgctccacgccgttgagatcgtcgttcaggccggtggaggcctccacaaacaggggggcggagacccggcgcaggtgcagcgcgccgcccagcgtatcctcaaacaggcgcttgagcaggccaatggccttttgagtgtcatagaggttcagacagggggcgtacccctgtggaatgaccgtttgcagcataaaaaggctccctttccacgcagttgcgcaatactgtaccacattatacaggaaaagcgctccgggggcaagggaggaaacgggggaaagaagcaataaatatttcttatagaaaaataaataagtatcattttacctgatggaaattttacggtatgataggggaacccatcagaaagagaggaagtatgacatgaagcactggaacgagagagggaccgggctgctgctgtgcctgtgcatcgccattccctgctggatgctgggccgggcgctcccggtcatcggcgggccggtgttcgccatcctggcgggcatggctatcgccctgcttgtccgggataagggctgggctcaggcgggcatcgcctacacatcaaaaacaatcctgcaatatgccgtgatcctgcttggcttcggactgaatctgtcggaggtcgccaaggtgggcgttcagtccctgcccatcatcctgtccaccatcaccacctccctggtggtgtccttccttctgcacaggctgctgcatatcccctccaacatctctaccctggtgggagtgggctcatccgtctgcggcggctccgccatcgcggccaccgccccggtcatcggcgcggacgacgaggagatcgcccagtccatctcggtcatcttcctgttcaatgtggcggccgccctcctgttccccaccctgggcggcctgctgggtctaggaaacgagggcttcggactctttgccggcacggcggtgaatgatacctcctccgtcacggccgctgccgcggcctgggacggaatgcaccccggggccaacaccctggacaccgccaccattgtcaagctcacccgcactctggccatcatccccatcaccctggcgctggctctccggcgcaccgcccgggccaggcgggcaggcggcgcgggggagggaagcttctctctccggcgggtgttccccttctttctgctgttcttcatgctggcctctctgattactacgggggcgtccctggcaggagtggacgcagcggcctttgctccttttaaggagctgtccaagttcttcatcatcatggccatggcggccattgggctcaataccgatctgatcaaactcgttaggaccggcggcagacccattctgatgggcttgtgctgctgggcggccatcacggcagtgagcctgggcatgcagtacgcgctgggcctctggtaaagaaaacgcgcacccgaagccattcgggtgcgcgtgaggctgttgataaaccctctagcgaaaggattcggagggaaggatagtgtgaaagggaaccgtcagggttccctggaggtgaattggccgcaggccaagagaggccggcctgggccgttcgcgttgaatcaaacaactttttgaacctttagaaaaggttcaaaaagttcagcagcctgtcgaaaagactttttcgacaggctgacgcgcacccgaatggcttcgggtgcgcgtattcagcggtgctccagccacagcttttttcgggcgcggagcacgaagcagatgagccgaacgacccagtcccccaccatggccagccacacgccgatggcgcccaggccgaagtggaggcccagcagatagctgcctcccacccgcaccacaagcatggaggtgatggaaatgaccatgggcaccctcacgtcaccggcggcccgcagagcattgggcatggtgaaggccaggggccaaaacagcattgcgcagccgttgtggatgaagatgagcactgcggcgtaccactgggtctctggcgtcaggctgtagaggcgcaggatgaggggcagacccagcagcagcgcagcgttgagcccccaggtacacaggtaggtgagcttgaccagccgcttggtgtaggagcgcacctgatcccagtccccggcccccacgcactggcccaccacggtgatgagagcaaggcccagggcctggccgggaatgacgccgaaattgtcgatgttgttagccacggcgttggcggcggtctgggccgtgccgaaggtggagatcaggcttaccagcagcacccggcccagttgaaagaagctattttccaggccgttgggcacgccgatgcggagaatctgggccatgaccgccggttcgaatcggaagcggagcaggccggacacccgcacggggttgcgccggccgtggagcagggccagcatgagtccggcggccgcgatgcgggacagcagggaggagagggccacgcccgccacaccctggtggaacacgaacacaaagacagcgttgcccgcaatgttctgcccgttcatgtaggcggagacgcacatggaggccttggagttgcccatggcccgcagcagggcggcgcagccgttgtagacggcgatgaaggggtaggagagggcggagatgacaaagtaggtgatggccccctccatcacctccggctccacttggccgaacagcaggcccagcagccctgccttgcagaaaagcaccagaaccatgatccccagggcagcggcggtgacgatatacagaagttggttggctgcccggttggcccgctccaggttttgggcgccgatggactgggcgcacaccaccgcgcccccggtggccagggcggcaaagatgttgatgatcaggacgttgatgagatccaccagcgccacgctggagactgcggcctctccggcggaggagaccatcatgatgtccgccatacccaccatgacggccagaaactgttcgataattaagggcagaataagcctgcgcagggcctgcttgctgaacacgggacaatcctcttttctctttgtggctgtgttccagtatagccgatccaacccgggcgggacaagaggcaaaacacacggaatcccttgccatttttgacggatgggggtataatttggcccaggaaatgcgataaaaccaaccgaggaggagaccatggaaaagattcagatgactaccccgctggtggagatggacggggacgagatgacccgcgtgctgtggcagcagatcaaggacgagctgctcctgccctacatcgacctgaaaaccgagtattacgacctgggcctgcccgagcgggagcggacgaaggaccaggtgactgtggactccgccgaggccaccaagaagtacggcgtggcggtcaagtgcgccaccatcacccccaacgcccagcgggtggaggagtaccggctctcccagatgtggaagtctcccaacggcaccatccgcgccatcctggacggcaccgtgttccgcgcccctatcatggttaggggcatctccccggtggtcaagacctggaagcatcccatcaccatcgcacgccacgcctacggcgacgtttataggtgcaccgagtaccgggtgcccggccccggcagggccgagctggtgttcaccggcgcggacgggaaggaggaattccgccagaccgtctacgactttgagtgctccggcgtgctccaggggcagtacaacaaggacagctccatcgcctccttcgcccgttcctgcttccagtacgccattgacaccaaacaggacctgtggttcgccaccaaggacaccatctccaagcagtacgaccacaccttcaaggacatcttccaggccatcttcgacgccgagtataaggccgccttcgacgccttgggcatcgagtacttttatacgctcatcgacgacgcggtggcgcgggtgatccgctcccagggcggcttcatctgggcctgcaagaactacgacggcgacgtgatgagcgacatggtttccaccgccttcggctccctggccatgatgacctctgtgctggtgagccccgacggcaaatatgagtatgaggccgcccacggcaccgtcacccgccactactacaagtatttgaagggggaggagacctccaccaacccggtggccaccctctttgcctggaccggcgccctgcgcaagcggggagagctggacggcattgacgctctggggcagtttgccgacaagctggaggcggctgccatcgccaccatcgaggggggcaccatgacaaaggatctggtgggcctgtgggatggggagatccccgccaggggtgtcacctccctggagttcatccgggccatccggaccgagctggagaaaatgctgtaattcaaatcgcgggagcgttcccgaaaccgtcttccctcgtacgagggaggacggtttttttgaaataaagaaaaatgcattgactaaaataaatttcagtgatataatctgcacagaatcaaaaatagaggaggacgatttcttatgaacattatccagacaaaaggggcgcccgccgccattggaccctattcccaggggatttccaccggaaagcttctgtttacctccggccagcttccggtgaatcccgccgacggggccatgcccgaaggcatcgccgcccaggcagagtggagctgcaaaaatgtgggcgctattctggaggctgctggctccggttttgaaaaggtggtcaagaccacctgctttctggccgacattgccgactttgccgctttcaacgaggtatatgccaggtattttacctccaagcctgcccgctcctgtgtggcggtgaaggatctgcccaagggagccctgtgtgagattgaggcggttgccgaactggactgacagccgcttatatatgattggggaccggaatttgccgtaaagcagaagagaaaggagtatggaatatgagcgtccaggataagatcagcaaaaagttccggggaattcaggggggactgtttgaaaaagtctccaaagccgatgtgggaacggcattgaacgacctcattgccaacggcgcggctctgatgtgctgggccgaccccttctatcccgacccggcgatcccggagcacgtgaaaagggctactctggcggggctggaggacgggacatccgcccattacaccatgcccatcggcaacatggagctgaaaatggaactggcgaaaaagctcaaggcattcaaccacctggatgtggacccggagcgcaacataattattacgcccggctcagatgccggcctgatgtttgcaatgatgcccttcattgacccaggcgatgaggtcatggtgcccgaccccagctatccaaacaacttcctgaacgccagaatcctcggcggtgtaacggtgccggtccccctgcgggaggagaacggataccaactggagatcgaggagttcgaaaaacgcctgacgccaaacaccaaaatgattgtccttaccaaccccaacaaccccaccactaccgttatgcgcagagagagtctggagaagctggcccaatttgcagttaagaacgacctgattgtggtgtgcgaccaagcgtttgaggactcggtgtacgacggggtggagtttgtcacccttgcgtccctgccaggcatgtgggaacgcaccgtcacggtatgctccatctccaagggaatggcgctcagcggctaccgggtggcttacatcgtggcggacgaccacatcatggatgtgtactatggcagcgccgtaagcgtgatcggagccaccaacaccgcctctcaactgggagccattgctgcgttgaaggatgcctctttcctggaggagtacaaccgcatctttgaccgccgccgcaaaatcgtttatgagatcttcaactccattcccggtgtgtccatggccatgccggagagcaccttcctctgctgggtgaacgtgtcccggctcggcaccgccgacgaggtcaacgcctacatcatcaaggaggccaacgtggtggtgaacgccggcaccccgtacggcgcacaaggggagggacacctgcggattgtattcggagccttccgggaggacgcgcagatggtgacggcgctggagcgtgtcaaagccgcactcatgaagctgggaaaggagaagggggtttcctgagcaatggaagagagaaagagatatccggttgagttccggggcggacagtggtggtccgttgtacccatgcttattttcctggtattctgtgtggtctattttgtgggctacaaggtctttgatatgaacgccctggcggtgggcggcttcctggggctgctgataggcgcgctgttttgcaaaacctatggtgcctactgggatgcggtgctgcgtggaatcggaagctccacctccgtaagtattgtggtgatcctgctggtcattggtatgtttaccaagctgatggccatcagcggggtatcccagggctttgtctggatggcacacatggtcggtatgccgggcagcatctttacggcctttacattcctggccgcctgtctgattaccacggctaccggctcctccatcgggaccctgaccacggtgtttcccatcctgtatccggcgggaatcctgctgggcagtcaccccgcaatcctggcgggcgcgatcctctccggtgcaattttcggcgataacctggcccccatctctgatgtgaccattgcatccacaaccaaccaacggttccgaaccaaggagggttatgccgatatcgccggcacggtgggttaccgactgaaatatgccctgatcgccggcggcatcgcgttggtgctcttcgccgtattcggcggcggcagcggcgcagtcatggaaggggcggatgagatccttcaggccaacatggatcccaagggcctcatcatgctcatcccagtggccgtcctcctgtttgtgtcgatccgcacccgcgatatcttcaaggccgtcacggcgggcctcgtctcgggcattgccgtgggcctgctctccggcaccttcggtccctctgacatcctgggggtggagaacggcgcggccaccggctttatctataacggctttaccggcatgatcggtatctgcctgttctgcatggccctgttcggcgccatgggcgtactcaacgagagcggcacgatggagcgcatgattcaaggcatctgcaacagccggtttgcacgcacggcccgcggggctgagctgctcattgggctgggctccatgcttaccaccctgttggtaggaggtgtgaccagcgcctcggtacttaccttcggctccgtggctgatgagctgggcgccagacaccagattcacccctaccggcgcgccaatttcctgacaggctacgccaacaccttccccgcaatcctcccttttatcagcgccttcatcttcatctcggcctcgtccattgagccgctgctggaggagtactcctatctgcctgcggtgaccccgctgcagattttcagtggggcgttctatcccatggtcctctttgttgtgctgaccgtatcgatcctgaccgggtgggaccggatttatgagggcccggacggcgcgattctccacaaaaagccctgattataaaaaaggctggaaccaaaccggttccagcctttttcagccgtgattgagattgcgtacatgcatataaaccgtgttcttggagatacccatgaggccagcgaccttgacgaccgcatctttcaggttgaagattcccctctggtaaaggatactgacaatctctttgtttttgttggcgtttgaaatggcgctgtcgttctgaaccttttggctggcttcggtcaccgcctggacaatcagttcatccacattctctacatagctctcctccacgggagaatccggagtctgtgcggcgggcggagtcatactctgcagaaattgaaacaccgaggtgttcatgtaaaagttgatgcacagcaggccgatagccatgcggctatgattgcgaattacaatggtggccgatttaaggggttcgcctttctggtttcggttaaagtaagtgatgcagtttgtgtcgggccgttcctcgatttttgccagcatggacagagccaggtctgtgatggggaagccctcgcgtcggccagtatagtgaccatttataattttgattacggaatggtccaaatcgtgaaggctgtgcaatacgatctcgtatccatccccaaggtaagcagccagaccatccagcaccgatttataagagtccagaattctaaaatcagtctcggtaaacattacattgcgctctttcaccgtgtatccctacctgtttcgtggattaaatcagttttcagtataccataggaatggaaaaatttccacagggaatccgatgaatcagaagacctgccgaaacagaacacggtttgagagcaaagaaacatcccgctcaggggtttcgagtccgtatgctctgtgctgtgctaaccgccggagaactttgctgtacttttttgtatggttttttctggttgtggatatgcttacggtatccataaaacaggagggatttttatgtccgctgattttgcacaaagtgaaaccaggctcaatctcatgcgggcctttgccggcgagagtcaggcccgcaaccgctacaccttcgcagccggactggcccggaggaagaacctgtatgtactggagagcgtgttcaccttcaccgcggaccaggaacgggcccacgccaaggtgttctacaacctgctggagcaggtgtccggtcagaaccttcaggtggacggcacctaccccgtagagctgtttcccgacattctggaccaccttcgctcggcccagcacaatgagtaccaggagtgggaccacgactacgcgggcttttccagaaccgcccaggaggaggggttcccggagattgcccacattttttccatgattgccggaattgaaaagacccatggcgaccgcttcggcaagtttgctgagctgctggagcaggacaagctgtttgtgtccgatgttcaggtcaagtggatgtgcctcaactgcggccaaatcattgacgccaccatggctcccgccgtgtgccccgtctgcaagcatccacagggctactttatccgctgggagatggcgccctttgaataactgcaaaccccatacccaggccctcaccgcccgtagaagacggtgggggcctgggtatgtccatgaagaaatgaggatggtaggagaaggaaacctgccggttctcaatatggctttgtagaatttatactagacttataggtttttattgacacgagagaagtaggttgctatgatttagacagttcctgccatggagtgtgtgtggcggagagagatacagaggaggttgtttcatgttcaaacgctttaccaatggctgcgtacaggttgtgaaccggtggcttccggatccattcctgttcgccatcatcctgaccatcgtggtctttatcgctgccatgatcggtacgcagcagggtcccctggaattggtgtggtcctgggggggccagggcgaagtcaaggatggcttctggagcctgctgtccttcgccatgcagatggccctggtgctggtgctgggctccgccatggcctccgccaaggcgtgcaagaaggcgctggcagcgattgccaccttggctcacgacaaaaagagcgcaatcctggttaccaccttcgtgtccaccatctgctgctggctcaactggggctttggcctgattgccggcgccctgctggccaaggctgtggcccgccgggtacgggatgtggattatcccctgctgattgcctccgcctattccggctttgtgatctggcacgccggcctgtcggggtccatccctctgcaaattggcggcacgggctccgaggtgcttggagttgtataccaggccccggttactgccactatatttcacccgatgaacctggtcatggtacttgtcatcctggtgctcatgcccttcgtcaactatgccatgcatccggataccgaccataccattgcggtggatccagccttactggtggacgaggcggagaagacttataccatgaataccccggcggagaaaattgagcacaataaggtcctgtggtttatcactcttgtgctgggctttgcgtacatcgtgtattactttgtgcagaaggggttcaacctggatctgaacatcgtcaatatgatttttctgttcctgggtattttgctccacggtgatctgcgcaggtatgtggatgccatcgccgatgccgcctccggagcggcgggcattctgctccagttccccttctatgccggcatcatgggactgatggtggcgcagaacgatgcaggggtgtccctggccggaattatcgccaacttcttcacccaaatctccgataatgtcaccttcccggtgctgacattcctttccgccggcatcatcaatttctttgtcccctccggcggcgggcagtgggcggtgcaggcccccattgttatgcctgcggctactgagatgggcatcgagtacggccgggccgccatggccattgcctggggcgaccagtggaccaacatgatccagccattctgggccttgcccgctctggggattgccggattgtctgcccgcaatatcatgggctatctggtcatcattacgatctttactggcctggtcgcctgcggcggattcctgctctggggactcctgttttaggtattaaacttcatgtgaacagggggcaccacgaaactgtgcaaaggtttaggcgcatgaagtttttgcgcaaatagaaacgcggccgccccatctggggcggccgcgtctgcgcttacggttagaacatgctgatccctctggccagcacggcgaagaggggcagggtgaggatggagagcagggttgacagggtgatggactccgccgcaggggcggtatcccggccgaactgctgagcaaagaggctggtcgtaccggccacaggcgtggcggacaatagcaccagggcgcagtagaggccggaggaggagcggagggggagcagcagcagggcagtcagggtggggaacagggccaggcgcaggaaggaaaccaggtagttcctgggttggcggaaggtgctgggcaggtcggcttcggcgagctgggtaccgatgaccaccatggccaggggggtgttcaggtcgctcaggaaggagagggccgctcccacgggggaaggaaagcgcaggccgctgagaaagcaaagcagcccgagcccgatgccgataacacctgggttgagcaccgccctgcgcagggagaaggccgcccggcctcccatgatcagcacgcccagcgtccaactggtcaggttgaaggccagcagggccagcgcgccgtagaccagcgcctcctccccgaggatggactggaccagggggagccccatgaagccgatgttgccgtagacggcggcaaaacgcagggtgtcccgggcatccgccggctgccgccggaagaacagcagggagacggcgaaaaagagcagatagcaggccagcgccgccgcagagccgaccgcaacctcctgcgtcaaggcgggggtccgcttcaccagaaagcagtccaccatcacacagggacagacgatgtagagcagcaggtacgacatctggctgcggcccgcctcagttatctttcccgcccggcccagcacaaaacccaccgccatcatcaaaaacaaagtggccacctgtccggtgaccgtcagcagattggacagcatctccattccccccggatgaaagttcctgttcttattaaaccacagcctggggaaaaagggaatgcacttttctcatcccggcgcttgcggcctgccccagggtagattataataaggccaatggaaacagagagaaggggtcaaacgatggagattttagtgattgacggccagggcggccggatcgggcagcagctcatcaaggcgattctaacccgttatccccaggtggaggtgaccgccatcggaaccaacagcctggccacctccgccatgctcaagggcggcgcgtctcagggggccacgggagagaacgccctgctggtggcctgccgccgggcggatgtgattttgggccccctgggcatcgtcatcgccgacgccctgatgggggagatctccccggccatggcggtagcggtggggcaggcccgggcccggcggatcctcatccccctgaaccagtgtgacaatctggtggccggcgtggcggagctgcccgtggcccggctgctggagagcgcggtgggggaactgggcaagctgctgccgcccgccggcggagcggaatagcgcgaaacccggcggatgcgtcagcatccgccgggtttttctgccagcttggccagggtatccagtcgggcctgctcccgcagggccgccaggggcgggaagggggcggtctcaggaatgccataggtctggttgagctcgtactccaggggcagccaggtgtccaggggggcctcgttgtgctgcaccaccacctccagcttgtccagagccttgtagacccgggcttccggcgtggccagggcgtccatctcggcaaagagggcggtcagttccccccgcagcccgtcgggcaggggggagagcagctctgcgatggcctggcgctcggtttcctcgttggcgtcggtcttctggaaggaggggatgtctccggtgaccgcctccccaacgtcgtggatgaggcacatgcgcagcaccttgtccatatccacctccggcagcgcgtcccgcagcagcagggccagcatggccagccgccaggagtgctctgccaccgactcgtgccgcccggaggaggtccaggagtggcgggtgttgcacttgagcttctccagcctggccaggaaggccagaaattccttgggttccatccttacatctccttttccagcttgaagcgccaccacagggagtagaactgaatgaacagatagaccgccaccatcaccagggtgagggccagatccgcctccatgaggacggagaagaggagcatggccccgaaggcgaaggtcatcacgtcgtaccccttggcttttgcggcattgccgatggccacgttgcgctcgtcccgctccgcaatctcgttctgtttctggagctccgggtgcttcttcatggcctgaacggccagcagctcccctgtaccgccgccgaacaggccgcagcccacccccaggcatagaaaggggaccgcccgccagggggtggtatccaggccgggcagcagcttcagcagcagccaggccccggccagcaggagcagccccgccagaaagagcatccagccctgccgtctccgtttggtcattgcgcatcctcctcatacaaaaaaatctcctcgatgctctgcccaaagcagcgggcgattttaaaggccagcaggatcgaggggttgtaccggcctttctccagggagctgatggtctgccgggagacctccaggatggcggccagctcctcctgggtgatcccccgctccctgcgcagttcctccagccggttcttcaagcgtgcacctcctttggaaagctgactttacatctatgttatagcacagcagggcctgtatgtcaagtgcactttccataaaagggtgaaaaaagcgccgcccattgggcggcgctcagtctgtcgaaaaaccttccccgaaggaaagcctcgcagagttcctgcggccgcagccgcaggaatcgaatgaaaatccgtcatttccgaggacatgcgccttggaatcagccggccttgcgcagcggggtaggagcccagtcggcgtccagccagaagggggtctcccggcggaagcgggtgagcaggggcaccagccctaccagctcggcggcggcacacagcttgtccatggtacttaccaccgccgattccaggcagcggtacaccttggtgggggtatagggaaacatgtgggagcggatgatgtcctcctcccgccaggtgagggagaagcgggccctggcgttgcgcagggccacctccgggtgctgggagccgtggcggatacccggatgggaggcggcgtccctccagttgtagaggtagaaatcgtggagcaggccgccacgggcggcggcccgggcgtccagtcccagccagtcgcacacccgccaactggcgtagctcaccagcacgctgtggtggtagcagctcaccccggcccggtgctggggcagcaggcgcatggactgcacggcggtgtcctgcatcagatcggagacgtagttgagatattggttcttgtatttgaaattccacatggctgggactcctttgcttggtatctgcctcttagtataccgtgaaaagcgaaagagtccatggagagaagattacgatttggtaaagattttctgataaaaggcgaaaccattacgccagaaaatcctccactgcccggacggcctgggtgagaaagtccccctccatgtccagccaaagcacgtcccgatccttctgaaaccacaccatctgccgcttggcaaagcgcttgatggcccggcccagctcgtccttcagcgcgtccagggtggggattttccccgtgaggtaccagaggatatagcggtactccagtcccagcccctccaaaaaggagtcgtcggccccgccggcgcggagggcggccacctcctccaccattccggcgtccaggcgggcctggagccgctcgtcaatgcggcggcacaccacgtcccgggggaaggtcacccccagcagcaggcagtcgtaccgggggcggggcggggggctctcccactggccggagagggccttctccaccgagcgcataagccgctggcggttgaactcctccccgtcggtgagggtgacgccggtcttttcccgcagcagggcgtagagctccgctgtggtctttccctccagcttcgcccggagggccgggtcgggccgggcgtcggtgaaggtgaagccctcggtcaccgcccggacgtacagcccggttccccccaccaggaagggggtgtttccccgggacaggatgccgtcgatggcggcataggccccggcctggaactcggccaccgaatagggctggttgggctccaccacgtccagcatgtggtggggcaccccctccatctcctcctccgtcaccttgccggtgcccagatccaggccccggtacacctgccgggagtcggcggagacgatctccccgccgaagcgcttggccagctccacccccagcccgctcttgccgcaggcggtggtgcccagcaccacaatcagcttgggcagcgccatgggcgtcacatcctttcttcactcgtgtccctgtcattgtaacagaaaagttccccggcggcaatgccgccggggaacttggggaggaacaggatcaggcggccttctcctggatggtggcgttggtgcccaacagggcgttcatgccgtccacggtcaggtagtagtggccgtcaaagagaatggcgggcacggtgatgtccgtaccatccacagatacggtgatgtccgcaggtatttgctcctgaaccgcagcggggatgcgcacgggcagggggaacagctctccgtcataggccgtgctggtggtaatggccaccttaccctcggcccaggatacgttgaactggttcttggagccattaaaggtgtatgccagatcccgcatacggaagtagggggctccgtcggcgcctacaaaggaggcggcggtaccggtcttgtccagatcgctgacctttacgttgtccaccatgcccagcacctcggagtaggtgtccaggttgagactctggttatagggggactccaggcggccggtattgaccagctcaattagggtggcccggtccgggttgtccttctggagatccacgccggtgatcttccagttgtggtccaccgcgggctccagggggtcgtgctcggccagataggccaccagcatgtcgcggacggaggcggaggactcccactccttctcgccggagatgatgccctcgttcttcaggccggtgtagcggtagtcgttgacacagagggtgagggtcatgtcgtcggtgaggggcttgccctggaaagtcacattctcgatgcgctccccggcgggcttggacaggttgacctcatagttcaggccgatgaagtggtcgtggagatagccaggcttctgcgggttaaaggagatggatacatccccttctttccactggttccagcacgcggcggcccactccatgtaagccttcatctccgcgccggacaccttgacggtgtagagcacattggggtacttgtagatgtcgaacaggtttccgtagttgagatcgccctttttcaggtcgctggtgtccttgaacaacgcaacagcggtcacgtcggcgccggagttctccagttggacggtgccgatgagatcgatgacagcggtgtcctcgatgcggccggaggggatgcccttgatctcgtccaccggctggaagtcggcggaggcatggcccagcacgttgtcctgaatgaaggagacggtcttttcctgggcgctcttgacggcgggcagctcacgcaggccctggtcgggctcgatgcccgccatggagacggtctccacggtggcggaggtgatctccttgtcggcgttgagggtcaggtcgtagcgcaccacctcgccggcattgttcttggcctcacccacagggatgggcgcgctgttgatgtaagtggtgtgggtgtggcccaactggagcacgtccacctcggggcacttgtccaggatggtctgggctgcatcggagccgtcggcggagtactcggctcccaggccggcatgggtggacaccatgatgacgtcggcctggccgccgatctcctggatacaagcggccacggcgtcggccataggctcaaaggtcaggtcagccacgccctgcttggtgccgtcccagcgggggatgttgggagtggtgacaccgataatggccaccttcacgccgccccgctccacgatagtgtagcccgcgccggtgaagtagctgccatcggcgttcttgatgttggccgccagcaccggcatgtccacctgctccagaatggacttgagagtgtccacaccgaaattaaactcatggttgcccagggtccaggcatcatagtccatgtagttgagggcggcggccaccgggtggctggcggtgtccttggagtagaggtcgtcggtcatgatggtgccctggatggtgtcgcccgcgtccaccaggatggtgttggggttctccgagcgcacctggttgacgtaggcggatacccgggccagaccgtctccggtgctctccttcatgtcctcgtaggagtagccccagatattgccgtgggtatccgaggtgccgatgatggtcagatgggtctcgccgttcccggccgccagggcggcggaggagagggagagcgccatggctgccgccagagcggcggacagcagcttgccgaaccgtttgttcctcatatcacatgatctcctttcccattccgaagggcataggtacgccggagcgtgcctgccgtggatatccttatcataccacagggaacggaaaaagtcgacgctgtttccagaaatttgactgccctttcaggaggtgagccgtgccagcagcgcctcgacctgggcgcgggtgaggaccccggtgggatcggccccctccgccaccagtccccagcgccacgcctgcgccacggactccgatgcccagggggcgggatcggaggcgaggacgggggcgccagagcgcacctctgccggggtcagcccctgctgccggacgaaacggaccagcatctgggcggcctcctccagggtgacggcgcaggaggcacggaaggccccgccgggcacgccgttggctacgccggtctggtcgcaccagcccacgccgggggcataataggcgaagggcatcagatcggagaagggggcgggctcggcctccggggcgccggcggcctgccagagcatccaggccaggcggccccgggtgagaggggcgtcgggctgctcgggggcggtatagtccgcgccgttggccagcagccagtccaccagggtgtcccgcccggccagatagtcgtccagggtctgctccacccggaccgtggggaccaggggctccacctgggcccccagcccggcctccagcagtgtgcccaggtcgatgtatttgctggagcagctcacccggatgccggagttgggcagggtgaaggagccggtggagccgaagtggttgacgctgccgctggtgggactgcccgccagcacgccgccggcgtccaccagctctacggcgttgatgatggcggaggagtacgtggcctcgcccaccagaccgtagaccttcacgccctcctccaccaggccgggcaccagcataaggatggggaccagcacgccgtcggagccgccgccgttgttgcggagatccagcagcacctggcggtagtctcccgcctccagctcggcctccacctgggcggcaaagccgtccatgggctgcttggggtcctccatgcactggttaaattgaatgtaataggtggtgtcatccagggactgggcaaagtagtaggtgcccttccggtaggcggtggcaggcgtgctctcccgctgctgggacaggctggacagggcggcgtccccgaagtcctccatgggcagggcctccacggtgaaggagcctccggaggtggtcacctccagcggttcgccggactccgcgatgcccagatagtccagacaggcctccgagtagaggagctgctcggtctggcggcggagcttcacggggttgtcggcgctcaccagggtgccgaaacgggtgcagacctcgtccatgggcacgccgttgagggcggtaacggtctggcccagcagggcggcatcctcctcttccgccccagtgagcacccagcttccgtcataccactccgcgccgaaggggtacaggccggtgctgttcagaacggagccgatattggtggtggtgtgggagtcgccgatgagggccaccagactctggaggtccagggcaaagtccacgtcgctctcctccgccagacggccctcaatctccgcctttttcgcctcaaatgcctcctggggggtgttggcgtacaggtcggggtggtgctcctgcagggccgcgtacagcgtgtccagatcctcctggcgggcttgggcctgatccggtccggccgccagagccccggtggggagcagaagcgcggcggccagaccggccgccccaagacgggttccaatgtgcatatccaatgcctccttaccttatataataagaaggataacagggcggagaaaagaaaggcggaagaacttcttaaaaatccttaaagatgggcgacaaaaagggagaataaaagacagccgccggaaccgcaaggttccggcagcttgggtggggctccattgccatgggaatgatttgggagagaaggatcgtgtgaaaggctgccccgcagggcgattcggagcgcaagcgccgccttgcggcggcgcttggtgcggagatgaaccgtcagggttccctggaggtgaattggccgcaggccaagagagaccggcctgggccgttcgcgttggatcaaaccacttttcagaatgaattcattctgaaaagtgcctgtgcctatcgaaataagttcgataggcacagccgccggaactgtaaagttccggcggctgtgcgcttgggaaaaagaggaaagagaggagaatacgtcttacttgcccaggcggcggaccagctccttggagcagaaggtggccacgtcgtcggcgtaggtgcccgcgccgaagccggcgtcatagcccagctccttggccagggcgtgggtgatgcgggcgccgccgcagcagaagatatacttgtcgcggacaccctcggcctcggccagctcgatgagctcggtcaggttctggatgtgcacgtccttctgggtgacggtctgggagaccagcagcacgtcggcgttgacctcggcggctttgcgcaggaactcctcgttgggcacctgggagcccaagttgtacgcctcgatcatgtcgtagcgctccaggccgtagtggccggcgaagcccttgcggttcatgatggcgtcgatgcccacggtgtgggcgtcggtgccggtggaggcgccgatgaccaccatcttgcggcccaggcgctccttgaggaactcatcattctcgtgcatgtccatggtctcgtcggtgacggtctgcaccacgatctcattgtagttgatggagtgggtcagggagccgtagaccacgtagaaggtgaagttctcgtccagcttctggcgcagggccacgttggggtcggccaggcccatcttctgggccagcatgacggccgcggccgcgcccttgtcgtcgtccttcaccggcagggtgaaggaggtctgaaccttgccgtcgttcatggtgtcgccatagggcttcaggcgggtcaggtccagggttgtgtcgaggtttttatcgcgaatctgatacagtccggagctcatttgccggcaccccctttcatcatgggctcaaggaaggggttgaagtacccagcagccttgttgacaacgccgtccaggcccttgccgccgtcgcgggggcgcttgatgtcggcaaagatgccccgctccagggtctcgaagatgccgagctgctcgatctgggccagcagatcggtggccttcttcagaacgtcggcggcgcggttctgcatgatgccgccgtccttgaagacaatctcgctgcccaggtcgtgcatggtgcggaagatgtactgggcgttctgaatggccaggaagcggtcggacaggaagggggtgtggatggcctcggtcatcatgcccagcaggtggatcttctgaccggtcaggatggtcaccatgttgaacagggcgtcctgcacctggccgcggaagatattgccggtcatgaacttcgtggggggcatgtacttcaggggcgccttggggaagatctcgcgggccatctcggcctgcgccagctcgtacaggaagccgttctccacatcggggtcgatctcgaaggcgtggcccagaccctgctgctcctcgggcaggccggcccgcagggcgaaggcctcattgaggaactgggaggccagcacggtgtgggcctcctccactgcgtcggcggtggtcaggtagttgtcctcaccggtgttgatgaccacgcccgcataggcgttgatggcgcgggagaaggactggtccaccagggtgcgctgcatgttgatgtcgcggaacaggatgccgtacagggcgtcgttcagcatgacgtccaggccctcgaaggcgcccatggcggcgatctcaggcatgcacaggccggagcagtagttgcacacgcggatgtagcggcccagctcctcgcccaccttgtccatggcctcacgcatcaggcggaagttctcctgggtggcgtaggtgccgccgaagccctcggtggtggcgccgtagggcacgtagtccagcagggactggccggtggtgcggatgacggcgatgacgtcggcgccctggcgggcggcggcggtggcctgcaccacatcctcatagatgttgccggtagccacgatcaggtagacccaggggccctgcttctcgccgccgtgggcggcaatgaagtcctcgcggcgcttgcggcgggcgcggatcttggccaggctctcctccacgatgggagccagggcggcgtggatgtccgcctcgctgtggacgggcagctcggtcagctccagcttgtcggcggccacgtcctcggcgatggcctggggacccttgccggtctccgccatggcgttgccgatccagaaggcggcgccctggggcagcgcgcccttgtccatcaggtggtccaccacgacgctgggcagggggacatcggaggcgtccacaccgtcaatgcccagcaggcggcagatggtgcgctcgacagccacggtggtgcagccgtcgataaagcgctgggtgtcgtcggccacgcgggcggcgtgggcccgggcctgctccaccagcttgaaatcaagattcagcttggattccaacaataatcacttccattctcggtttcagtcaaaagcagggggaagcggaccgctgtcaaagcagcggcccgcttgggaatattccccgattattcctcgtgatgggagcgcttatgccgctccaggttggcgggctccatggacagcgcctggccgcgctccaggccggccacacccatgagctccttcttcttcttgccggtgcagtagtcgcactggcagtcggtgtagtgctcgggctcggtgtaggtggtgatgacgccctcgtagttgcgcaggatgaccttcttgggggtctgggagatgatgtactggggcatgacaggagtcttgccgccgccgcccggggcgtccaccacgaaggtgggcacgcagaagccggaggtgtggccgcgcaggccctcgatgatctcgatgcccttgctgacgggggtgcggaagtgctccaggcccatggacaggtcgcactgatagatgtagtaggggcgcacgcggatcttgaccagctcgttgaccagcttcttcatggtgaaaacacagtcgttgatgccggccagcagcacgctctggttgcccagggggataccggcgtcggccagcatggcacaggccttggcggactcgggggtgatctcgttggggtggttgaagtgggtgttcagccacacggggtgatacttcttcagcatgttgcacagtgcgggagtgatgcgctggggcagcacgacgggggtgcgggagccgatgcggacgatctccacgtgggggatctcgcgcagcttggagatgatgtactccaggcgctcgtcgctcaccagcagggcgtcgccgccggacagcagcacgtcgcggatctggggcgtattgcggatgtactcgatggcctggtcgacctgatccacgggcaggccggcgtcgttctggccggcgaagcggcggcgggtgcagtggcggcagtacatggagcactggtcggtgatcagcagcaggcagcggtcgggatagcggtgggtcaggccgggagcgggggagtcctcatcctcgtgcagggggtccagcaggtcggagtcggcctgatgcagctccttggcggtggggatggcctgcagccggacgggatcgtggggatcgccgggctgaatcagggacaggtagtagggggtgatggccatgcgcagggtgcccaggcaggccttgacgccttcctcttcctcgggagtcagctcaatgtacttcttcaggtcctccagggtctcgatgcggttcttgacctgccagtgccagtcgttccactcctcgtcggtgacgttggggaacaggattttacggcgggactctaccataaacaaggtcatcctttctaaatcagattggggagacatggaaaccgcgggccgtgcggcggagacagcggcgggggggaagggttggggaggagagagtcccccggtccgcctgcggcagagccgcacaggagcggaaatgtcacagatgattgggacagtggttcaattacaggtacttcttctcgaagtactccttgagctgggcattctcacgcagctcggagagggtgatctcggcgtgatccttggtgtagccgttgccgacaatcatggtgacatccttgccgcagccctcagcgcccagcgccgccttggcgaagtcggtggccatggagaagaagtagacggtgccgttgtcgcggacgggcaggatggcggccatctcacaggcgggaacattgacgatcaggatggacacgtcgtactccttgccgccgttgacggccagggacttctccagcacctcggtggggttggtggcggagcccacaatggcgtggtggcacaggttcatgctcttaagcaggtcggcgtcctcctggcagatgaccagggccaccacgttgccggtggggccgacgcgcttcatggcctcgtagcagcacatcatgccgcccttgcctgcgccgcccaggatcagcacggagtcgccgggcttgaccagcttggcggtctgggcgggagcgccggccacgtccagggcggccagggccagctcctcgctcatgtcgtcgggcagcttggcgtacaggccggactcgaacaggatggcctgggcctccacgtccacgcggtcgatctcggggtggatggccttgatcttgttgatcttcagaggagtcagggacagggaaaccagagatgcgatcttgtcgcccaccttcaggtcgatcttgccctgcagatcctcgccgatctccttgacggtgccgataaacatgccgccggagccggtgacagggttctgcatcttgccacgctcgttgacaatgtccaggatcatctgctcggtcttgcccaggtccttcccgcaggcctcatagatctgggtgaaggaggcggagtcgatattcagcgcggacacgtcgcacaggatctcgttggaccagcactccatggtgttgtcgatcttcttggccgcctgggtcagcaagccctggggctcgatgacgcggtgagtgccgtacttgttgcctttcttctgcatagaaagttcctcctgtttcgttcttggtttggttggggagtttggggtaacgatgtatggttggggagattggaacaacaaagattatgccagggacaggatctttcgggcctcgtcgggggtggcgatctcacggcccagctccttggccaggcgtacgaccttctccaccagctcgccgttggaggcggccttgtggcccttctccaggtagatgttatcttcgaagcccacacggacattgccgcccatgacgatgcccgcggccaccatgggccacgcgccccggccgacgccggtgacggtccaggtggaaccggcggggatctgcttgactaagtaatccaggttgcccaccgtggcgggagtgcagccggagacgcccagcacaaaattgaactgcatgggggcgccggggacctcgcccttgttggccatgttcaccacggtgtccaggtggccgatctcgaagcactcatactcgggcttgatgtggttctccatcatgcgcttgccgaaggcccgcatagtgggcatgtcgttggtaaacacgtcgtcgccgaagttgcaggtgccgcagtccagagtggccatctcggggaacagctcggtgggctggagccgctcctctgcggtcatgccgaccgcgccgccggtggagggaatcaggatcacgccggggcaggcctccttgatggcgtccagcaccacgcggaaccgctcacggtcctgggtgggggtgccgtcgtcctcgcggacatggacgtggatgaccgccgcgcccgcctcaaaagcgctcttggcctcccgcaccatctcctccacggtgtagggcaccgcggggttgtgcttcttggtgacctccgcgccgcagatggctgcggtgatgataagcttttccataacacgcctcctcgaaaaaataacactacctcgcctgtgaagatatgggaccctcctagacgtgatagcgcttcatgcacaaaaaaacactatttgcatctgcgggagccctggggcttccgtcagacacaaatagcgcttcatgttacttcatgacaatccgcaagcactgggcccacggctcagggggagggctgtacgattcacatcccccttcggcggagcggacattcacgtgacacatcgggctcgcctgcccttgtcattgtcccgctaccttgcgctccgcgcctctatccatgcgtattattcatttttgacaacaacactataccccagagagttaaatttgtcaactatttttacgaaaatttaattccgcgcttcaaagtacgctggaatggagaaaaaaacccattccagcgtacaaaaccggccgttatagatcggcctgaaacaggtccatcagggcgtcgtccagcttgagcaggcggcacacccgaagggcgtcccgggggcagggggctcccggcggggcgggcagcaggtggtagtccatccgccgggcgatgcgcttgcgggggtcgtccccctcgtctccctggatgtcccgcaccaggccggccacctgatagtgggccccggccacgtcggacacgccgtcgtagtgggtggtcatgagggccacacagtccagggtgcccagataccgcaccagcgcccgggccagggccgcgccctcctgggggttggtgccccgggcgaactcgtccatggccacgaagaaaaagcagtccctggtctggcgcagcagggtgtccagcaggtggacctccttgccgaaggaggacaggccgccggcccccgggccgctgtcggccagaatgagatccacccggtggaacaggggcagggaggcggacttggcgaatacgaagaagccgcactggcacaaaagcagggagagcacggtggagcgcagggacaccgtcttgccgcccatgttggctccggtgatgacggtgcatccggggcgcagttccaaatccagcgaggtgaactgctccccccgctccgccagatcctccgccacctgggggtgaacgacttcacgcagggcgatggatttatcggcgctgagggaggggcggacacagtggtaacgcagggccagcttgcccttggccacgatcagatccaggtggcccagggcctccatgttggccaggaattccgccttccacgccatgagcctgcccgtgagcatgctccgcacctccagctccagctgatcctcctgtacggccagcacccggcgcttctccagcagggggccgcgcttgtcctcctgggtcatgcggatggccttctccagcttggccttctccacccgcaggggggccaggtcgttgtggtaggaattgacgatggagaaggtgggcagccgccgcccctccgggtccatcagtgccatggcctccgtcaggggcgggaaggctatgcccgccagcgccggcattttggcgtaggcgtcggtgacctgctccatggtgaccaggaagtgcttgatctcgaagagctccaccaggtcgaagggggtaccgggctcccggtcgaaggagccgcggatgtcgtgaaacaggggcaggcagcgggtcacgccccgcagggccgccgccgcgtccttgaggtcggcggggttcacgcggggagcctcgcagccgcagctctccgccgcctggggggcggtgccgccggcggcccacagctccatggccagggccacgttgtccagctcctcctccagagcggcctcctcgccggggccgtaccaccggggggtgcgggcggcctgcttgccgaagggcgacaggggactcaggcgctccagcacccactggagtcccgcgttctcccgcagttcatgggtcagttccatgctcagtcctccttcacgttcaccaccggcaggtcgatgacctcccggagggcgcggacgaatttgtccggttcaaaatgccagccgtaggccgaccaggggttggcccccacggctgcgatggtcagctccctgcgcacccgcagctcgccgccgttgcgcagaaacaggtccagcgccgcccgtccggccagcacgtgggtggcgtccgccgccaccagggtggtgggggcgccccgccgggccagggttttcagcagggggtccataatgccccccgccgcccagagcaccaggggccgccggggcagcttgttccacttgggggcgccgctctcctccaggggcagctccaccggctccccctccggggtaaacagggcgaagcgggcctcctggccgtccagggcggcgcagagggcggcgctttccggccgtttgcgggcaaagagccagcaggtgtgggcggtctccgccaccaccagctccatgtcccggtccagggacgcgccggtgcacagcagggccaccccctccacgccggcccccgccagactcttgcgcccggcggccccgtcgatgagcacccgctgggcgcccagctcctgaaagcggcgggtcagcggggggagctgcccggccgccgacggcccggcaagctgcacatatccgtcggacagggtgcggaacaccgccaccggccccaggggggtcatcacgtcggtgagatccaccacctccagcgtggcatcgcacagggtgagcataccccgcgctgtggcgaacagatcgccttttttcaggtacagatcgggcttctccgtgcccgtcaccaggtcggtgcactccccgtcccggcccaccgaggtcaggcccaggcactcctcccccagctccgccatcaggcggcgcatggcggtggttttgcccgcgtttttacagagaccaatcaccgtcaccggcgaggcatcccccaccaggggcgccagaagctgtttcaaaagacggcctcccttccttgcagtttttgggctgtttgtcaccgccattataagagccctgcaaggattctgtcaatgggagaaaaacgcccggccggagaaaccgctctggccgggaaacaaggggagctgcgccgaattttgcaatttaacgttaaataaaatgcagaaaaggcggctcatgccatccgtaggggcggcccttgtggccgcccgcgggcggggacaagccccgcccctacgttccagccaccccgcatacaagccggtgcggcgggggcgttacggagtaagcccccgccgccggaaagcaaccggtagaacgacttgggggaagttccaagaagggggaatcgcaattcccccttcttggccgtttcaaggggtggattgttaaggcggg

SEQ ID NO: 4221 - DNA, 1017 bp, Unknown
  gut microbiota DNA sequence
ggctctgttaaggcctccgcaggttggaacggctgggggctgacctgggacaagggggccgacatccgcctggatatcgtacccgacaacggtggggcgtcctacctcagcggcgtggagctgctgacgcccaccagagggccgggcaaggccctcagctactccccggagtacgggggcacacggggccggtccgccgtcctgctggccggggcgcgggtgatcctgtactgctccggcgacggcacccgcgatgccaagacccccgaggcgctgcgtgatgagctggtgagcatcggctgccggtacgaccaggcggccaacctgcgggccctgggcctcgacgcgggcagctcctcaaactgcgactttggggacggccagcgcatcagcaacggcaagcgggtcaagggttatctgtgtatctggacgacggagggcggccagcagccgccggacaaggaggagagtatgggcaagtacaccgtgacgcccagcatcggcgtcaacatccgcagcggccccggcaccggctacggcaaggcgggggcgtacccttgcggggccgtggtggacgtgctggaggcccgggacggctggggcaggacagataagggctgggtgtccctgacctatctgaaggccgtggagggccctcagagggccactgacacgggcctcgccatccaggagcatatcatctccgatgggcgtaaaaaccggccgggcagggacaccaacccggacacctacatcaccatccatgagaccggcaacacggctaagggcgccgacgccgcggcccacggggcctatctggacagcgccgccggggaggatgatctggtgagctggcactacaccgtggacgaccacgccattgtccagcacctgcccgactacgagaccgcctaccacgccggggacggcaaggacgggccgggcaacaccaccagcatcggcatcgagatctgcgtcaacgccgggggcgattttgcccaggctcaggccaatgcc

SEQ ID NO: 4222 - DNA, 2092 bp, Unknown
  gut microbiota DNA sequence
aacctgtaccatggagatgaggtgcagcccatccaggtgtggcggcaggtgggcaccggcctggaaaaactgggtgtgtccaagttggacacaaatgggggataagcatgggagactgcgtccgtatcgaggagtaccggcgcacctgtgctaattgctactggcacgatgccgccatgtgggcgtgcaagcgcccgggagaaggaaaggagaaactcaacatgaaaaataaggacctgcggagattgcgctgtctggtgaaggcgcagaccttgtggcacctggagcggctggcctatctggacgggtgcggcgacgtgggccgcatggtagacaagctgacccgggacaaggtgctggccctccgccagtctgtcgtcgggccatgggcggcccaccatgtggcccgggctaagagggtggattgatggcaaagcggctcaagatcatcacggcggggcgcctggtggtcgttgggtgctacaccatcccaacaccccgcagcacagagcgggaaagaaaagcactgcgtgagatctccagcgcagcccagatgacgattaacgccaaccgctcctggcaacggctggagctgctgctggccgccaacttcgggcggagagacctccacgtggtgctcacctatgacgacgagcaccttccggccaaccggcaggcggcggtgaagcgggtgcgcaagatgctgccccaactccgggccgtgcggaagtccagagggcaggaactcaagtacatatatgtgacggagcaactcagctccgagggcgggcggctccaccaccacttgataatcaatggaaccggggcggatctggatgtgctccgctccctttggccttatggtgaggtggagctggagcccctggacacatggcagggctacgaggccctggccaagtacctgaccaaggagcctagggagctgggcaagccggaggtgggggcgcggaactgggcggcctcccttgggctgaaaaagccgaaggtggagagtgaaatcgtcaaggataacctgacggtggccgcgccgcccggagcagtcatcctcagcgcaccgccacccgtgcgaaacgagtttggcgagtttgtcgtgctgaaatactatttaccaataaggaagaaggaggagaagaaaggaaccaggccaccgcgcaggcggaaaagaaaatagccctcgcgtctttattcggtctggaaaccagtggtaacaagtccgtgaggaggtagaaaatgcatggaaaagttgcaaaacagaggcgagtgtggtaaactaatcgtgaaggacggatggctgaaatgtccgtcctgccgcaagcggctgctccgagtggagcgcgacactgcggcgcacaatctcattgtctactgccgaaactgcaagcgcagtgtaacggtagacatcgacagaggccagtgctttgagagccagagcccgacatgatcccagcgtgggatgtggtcgggctctggctttttgttttgcccggaggtgatagcccgtggccatgaagccgctccgaccatgccggcacccaggatgcccggagctcacccgagagggatactgccccaggcataagcccaagcgggcggggcgccgggtgtccgcccagtggcacggctggtacagcctgaccgtctggacgggcgacctgcggcccaatcagctcctgcgggagccgtggtgccgggagtgcgcccgacggggcatacgcaccagggccacggtggtggaccacatccagccccaccggggcaactggacccgctttatcgaccgggacaatttgcagagcctgtgtaagtcctgccacgatcgcaagactgccctagaaatggcggcggaaaaacggcaaaaccgggggcatttttagtgcttggaatcggcgagaccggcgggatgcttgggcgtgcgcaacggacctgcccgcgcacggcaagccggaggcttgccagaccctacccccggcctggaagagtttagggaaattgatgcaagaccgcacggccccctcggtgagagattttttccccacgggaaatctcgggaggcggggccggtgccgaggag

SEQ ID NO: 4223 - DNA, 1250 bp, Unknown
  gut microbiota DNA sequence
acccaggccggtgccaaggcggctgtggacaagattaaggccgcgatcaacacggtatccgacatccgcggtaccttgggcgccacccagaaccgtctggatcacaccatcaacaacctgtctgtcatgaccgagaacatccaggacgccgagtccaccatccgcgacaccgacgtggccgacgagatgatggcctacaccaagaacaacatcctgatccagtccgcccaggccatgctggcccaggccaatcaggtgccccagggcgtcctccagctcctccagtaagagatcgaaacggtatcacagccacaacactgcgggggccgggctcagtgcccggcccccgcttttgtctggaatgaggtaacattgtatggatacaatcgaaatcgcccgcaggctggcggagctgggacagaccgtggaggcccaggcggcctatactctggcactccaggaggcggcggagcggaatccggagctggagctggaggcggccagctatctctttttttctcgggggagctatcaggtagcctatacctcctttgtctccctctataaccgtggtctctaccgggcagagctgctggatttgatgacccaggccttctacctgcccaatgtagaaaaacagcggcgtcaatatgagcgcaactgcgccgccctggccaaatatccctatctctttcggaaggactttcccccctttgaggacctgcccatccagttcttccccttcaacgacgaggggtatgtcccctttctcaaagcggaagaccgattcgataagtatgtcaatttcaatgatccagtaatcgaccggtactttttccgggatctagagcagcccgttctggcggtggacgtatactcccagtaccatctggagtacctgaacgacaacgtccgcaagagcgagtgggtgggccgggaaaaccacatctacctccactacacggattggatgacattctgcgcctacttgcaatgcttggaactgcgccccctcctccctggaaaaaagctggtcttcttaattgagggagaggtggggcaataccctatcgactttcaggcccgtttcggtatcgactacagccaataccccgtcaagccggtgggcatccgggaggtcacccggctgatctggcacacccagttggctgcccacaacggcggcgacttcttcaacgagatcttttatggccaccccaacctcttgtcctatgaatccatcatgtttg

SEQ ID NO: 4224 - DNA, 64337 bp, Unknown
  gut microbiota DNA sequence
ggggatgaagatgtccgtgctgtcgggcagctccgcgcccagcaggccctgcccgtactcaaattccagtttcatcgggtgtattcctccttaatgccctaagtaaaggcgaatgatctccagatactcgtcggggtagaagccgatctccccgctgaagcgggtgagggcgatcaggccgccgtcgatgtcggcgatggaggccagcatggcggcgttgtccgccttgagcccgccgccgtacaccacgtccaggccgccggtctgctccttgacgaagcgggcgatcttctcgatgtagggcttgtcggcgggggtcttgccgggcccgatggaccagatgggctcgtaggcgatgaccacccggctcttgtccgtcccgtccaggccgatggagagctggtcgcccagcacctgctgccactgctcctgctcctcgctcttctcgccgatgcagtagagcaccttgagccccgcggcctgggcgcacttgatctcctggttcagcaggcggttgacggcggcggtgtcggtgacgccggcctccgccaggatgcccgccttgtcgttgcgctcctcacagtggccgatcagcgtccagccgcagcccagggcggcggcggcgtgggcgggccggttggcggtaaaggccccgaagttgccccccaccgcggtgtccgcccggaacaccccctggcagcccagctccacccggctgtcggcggtgcgggccgcggccgcgggaatcaggtgggcctccgggaagaagtccacaaactccgcctccgccgggtcgtagcccgtcaggccctgctgggtcccggccacaatggccctgccccactcggccacgggggctaggcggttgaccccgcccagctccaccggcacgtcaaaacgcttgagattcaaaaaaatgtgtttcattcagttgacacccggctttcccaaattttgaaacatatagcccttgtagccctccacgcccggctggttgaaggggttgacgcccagcagcttgcaggagagatagcaggcaaagaggaagaaatagaacagcccgcccagggtgtgggcgtcgattgcggggatggagaagttcaggcaggggatgccccggtcgctgtgggcccgcatggtggcctggcgggcggtgttgttgatgtcccagaagtccttgcccgtcaggtagtcgaagtagtccttcttggcctcggggggcaggagcaccgacgcgtcgcgggcgcgtacctccacgaaggtctcgaagaggatgggactgccctcctggatgaactggccgatggagtggagatcctccgagttggaggccgccacggggtagagggcggtgccctccttgccctcactctcggcgaagagctgaatccaccacttggcgaagtaatccagccggggttcgaaaaaggagagcatctccaggcggtagccgtgctccaacagcagccggcgcaggcaggcgtagcgcagggccgggttctcctccgccggggcggcgaggagggtatcccgcatgtcccgcatcccctgcaccagcgcgcggatgtccaccccggccaccgccatggggaagagccccacgtcgctgcccaccgagtaccgcccgccgatggtctcggggaaggtgaggaacgtatagccctggtcgaggcagagctggtggagggtggagcccggcgtgccggtggcgaagatgcgctttgccgcgccctccgcgccgtagcgccgctccaggtactggcgcagcacccggaaggcaatccccggctccagggtctcaaagttcttggcgatgcagtcgatgtagatggattgatatccgtccagctcccgcagagtgcgggccatctcgcaggcggagatggtgttgcccgcccacagaatggcggggcccccctccggccgcagggccttgatggcggcccgggacgcctggttggagccgccgattccgatgaccacgaaggcgtcggcgtcggcccgcacccgcgccgcctgctccagcaggaagtccacccgctcgggcccggccgcctcgtccacactgtgccagcccaggttgtcccggtaccgctcctctcccgccgccgcctcggccagcaggggcgcggcggcgcgcacctgctcctccagtgcgccgggggccagcaccggccgcgcgtcggtaaaggacagggtgatgccgtccatgctcagccctccttggcgtagcgggcggccatgtcctccagggtggccggctccaccaggggggccttgccgtagctgccgaactccacgatcagggtacccacggcctccttcacgccccggcgcatggcgtcggtgatccgggccacggccccctcgtcgccggcgccgtacatgacggtgtccatgatgggggccaggaaggcccgggggtcaaaggcgtccctcttctcgtccagcagcttccagacgccgcccgccttggggtcgtccttcagctccgggtggtcgcggaacagctcccggaagttgcgggtcaccgccaggcggatgtcggtgtccacattgatcttgccgatgccgcaggggatggcggccttcagctcctccttggagatgccgtaggcgttctggatgttcccgcccagggcgttgatctcctccacgatgtaccggggcacggtggaggagccgtgggacaccagggcgccctggatgccctcgtgattcatgcactccttgatggcgatggggatctcgcggcgcagcttcacgtccttgcccttgctggcgccgtgcatggtgccgtagctgatggccagggcgtccacctcggtcttcttgaagaactcaatggcggagagggggttggtgtaggtggagttggcggcaaagacgtggtcctccacgccggccagcacgcccagctcgccctccacggacacgccgcgggcgtgggcgtacttgaccacctcgcgggtgagctccacattctcctcaaaggggagggaggagccgtcgatcatcacggaggtgtaccccccctcgatggcggccacgcaggagtcgaagttcttgccgtgatccaggtggagcaccacggggatggggctttgctcggcgaacttcttcaccgcctcggcgatgttgcgggcccccttcttcttgtcctccagagtgccgttggcgaaatccacccggccgcccatgaaggcgttggccaggtcggccccctgcaaaatggccggggagcggaacatctcgtgtacggcgatgaccgcctcggcctgggccacggcgttgacgttgaaggccccctgggcatagccgtatttcacggtggcgtccagaaccggacgcagaggtaccagaggcatagcaattctcctttcggttattcccttatcttgtatagacggtgcgcccgcccaccacggtgcgggccacctggtaatcgccgtccagcaggaccagatcggcgtcctttcccacgtccagctcccccttgccggcccagcccatgaggcgggcggggttggcggtcatgaggcgggagacggtctccgccccctccccggtgaaggccatgaggttgcgcagggcctgggccatggtgagggtggagccggcccggacgccgttgggcagcttggcgtccccgtcctccacaatcacgtcgttgacccccagcttgtagctgccgtcgggcaggccggcggccatgatggagtcggtgacggctaccacccggtcgtaccccttggccttgaggtagaggcgcacggtgcccgggtggaggtggcggccgtcgcagatggcctccacgtacacatcccgctccagggccactccgaagatggcggggtcgtgctggtggaacaggcgcatggcgttgcccaggtgggtgacggagcggacgcccgcctccacacattccacacactggtcgtatcccgcgccgctgtggcccatggcgcagacgatgcccatggcgttgaggcgggggatcagcccaggcacgccggggatctcgggggccagggtggtatagcgcacgtggccgccggaggccttctgatacttggcaaagagctccgcgtcggcggtgtgcatcagcaggtgctcgggcatggcccccttgtactcggaggacaggcaggggccctccaggtggacgcccagcagggccgccccgccgcaggggccgccctcgatgacctgtctggcctgctccatgcaccagagggtctgctccggcgtgtcggtgagcaccgagcacagccagccggtgacgccctgggaggcgaagaaccggccgatcgtgcgcaggccctcggcgtcggcggcgttcacgtccacccctgcggcgccgtgggtgtgcagatccagaaaaccgggcagcacccgcaatccggcggcgtccacctccggcaggcccttctcattgtggtgcccgcggctcagggcggtgatgcgcccgtcctccaccgccatgtccagggggatgaaggccccgttccacaggacggagccgtttttcagataaaaggagttgtccatggcggcctcctcaataggccgtctgggcggcgttggcgttgacgtagagcagggcgtcggggtggttctgggccagggtggcggggaacgcggcggtcacctcgccgtaggccgcccggcggcacacggcccggtgccagtcccggaacacgcccaggcgcagcttccgcgcccccagaatctctttcatgccaatggtgacgcacttcctgggcatatcctccagcgcgccgcccaggtcgcccacgcagttggtggccctcgtctccgggtggatgtccagcacccgggtggggagctgggcgaactgttcagccgtcaactccggctggggctcgttgaaggccaggtggccggtgatgccgatgccgccgaaggcgatgtccacgccgcccagctcctcgatcagggcggggatgcggcccaggtcgttgggatcggggaagacccgctgctcctcgggcatgagcagctccggggcgatcttgccatatacctcccgggccatgaagccccggaaggacaggggattttcctcggcgatccactggccgtcgtcggtgaggtactcgtccatgttgatgaaccagcagttcttcagggagagctgctcccggttgaccagccgcacaaagatggggtactgccccaccggccccaccgggcagataaagacggtgggctttccggcggcgttgttggcgcggatggcagcgcacatctcggcggccatctcgtaaaagacctcgccggagtcgcccagcttgaggatggggagcttggcgcccttgcccagctcctgggcggaaatatgatagtagtccatagtcgtacctccttttgtcattgaaacaggtgctccaaattcatctggcggatcatcttgacgatctccttggtgcgggagcagccgaacttgcccagcaggcccttgatctgggtcttaatggtcaccacctccacgcagcggagcctggcgatctccgccaccttcttgtcctggagcagcagcttgaccagctcgtgctccgccggcgtcaggtgggccacgttgttgatgaagaaaatcagggagcgctcgctgcggcgcagacgggcgtactcctgcatgacggtgttctggatctttgggtccagctccgcccgcccctcgctggcccggcggatgtgctccagcagcctctcctcctcacagcccttcaccacatagtccaccgcgccggtgcccatggcgctggtgatcatgtcgtcggtctcatgggcggtgaggaacaggattttgacctccgggtgccgcgccgtgatgacctcggcggcccggatgcccgcgtcgatggtctccatctcgatatccatcagaatcacgtcgcaggggacggtgtccgccaaggaagcgatctcctctccggaggcggcggagcccaccacctccatatcgctctgggcggagaccacgtcgcagaagtcctcccgcagcagggggaagtcctccgccaccatcacccggattgtctttgccattgtgtgatcactccttctgacgggggtcgtagaggggcagcatgatctggaaccgggccccctccccgtcgcggctctccaggcgcaggcggcccaggtggctgcggacgatcttccgcacatagtacaggcccatgccccagttgtaattggtgtttttgctggtgacaaagggctcgaaaatcttgccctggcgctccggcgggatgcccgggccgttgtcctccacctccagcacggtccacatgcgctcggcgcggacacgaagcaccacctgcggctcctcccgccccgcctgaacggccgcctcatacccattgcacagcaggttgcacaccgcctcgctcaggtggctgagatccgccagcaccaatcggtcggtgcccacatccaggcgaaccggctggccggggtacttgccgtgaaaccgctccaccgccgcctccaccagcccctccaccggcacggccgtgagggcaatggagttgttcttgaccgtgcggtagagctcgtccatccgccgcagcattccctcgttcagctcgttgagctgaacggcgcaggcgcgcacctgcgccatgtccggagggtcccccgccaaagcccgggacagcttcttgtggagcacccggctggacaggagctggttctttaccccgtggacaaagacggatactccggtgcccgccgcgtcgaacttccgcttgaggatcatatcctgccgggtgtcgtcataggtaagctgggtatagcgcaccagattgtagctgcccagcaccacaaagaacaccgtgcacaggcccaggatgatccaccccagggcgggcagcgccccgctgatgtagctgctgatgcccaggcggatatactcggagatgaacatgttgtagatctgtgccgggtccttgctggcgtagagcaggtagagggtggagatactggcgaaggagagcagcacatagcgggtgttgcgcttgaaaactggcatggtggtggcatggtactcctggaaaaacagcagacccgccgccgccagataaaggatgatccaggccagcgaaacgtgaatggtcagcggcaggagccagaagcgcccactcaccaccgtgcgaaacacggccggataataataaacgagggacaatgccggtaccacacatgccgcaaggcgcaggcttttcatcctgcgccggagggccgggatcatggtggcctccagtgcggcctgtagggcaaacaggggaaacagggagcggcctactgccaccacatagcccagccggtccatagggattggaagcgcatggagccacacctgcagctttggaaccagaaacaggaactcccgctgttgggctgctgtgccgccgatggccgcgatatagacaatgatgcccgcaaacatgaccaggttacacacactcatgcccagcaaatacagggagagcgagtccttacgccgcagagccacatacagcgatgtggccagacacagtatcagtacgagaatcagcacggtgcctctcccccctgcgtggattcagttctttattatatcgcgttctctccgccagtgcaacgcataacacaaagagcgccggggctccgccaaatacggagccccggcggggttggcagtcatttacttcgcggcgctgtaggcgtcgtaagcctcctgcattacatcaaagagcacatagtcctccacaggaacattctcggtaatggtgccattatccaggaaaatgccctgctgggtctcatagaccgtcttgatggcatccatgtcgccgcagacctcggtgatggtctgccagtcggcctcgccaactgcggccagcatggtgtcctcgggggcgtccagctccttggccagcaacttggccatctcctcgggatgggcagcgcgccagtcatgagccttgtccagggcctgggcaaaacgcaccaggatgtcgtggttggcctcggcgtactcaggggtacaaatgtagctggaggggaagatggcgctgtccaggaagtcggcgttggtgcccagatccacgtagttgtcgcccagagcgttctgcagggtgacggtattgggggaccaggaggcggcggcgtcaatctgcccggagatcatggcggtggtcataccgtccacggtcatctctacagtgttgatatcatccatggtcatgccggcacgggccagggcctgctccagaataatctcagaggaggtaccggaggacacagcaacggtcttgcccttcagatcctcgatggtttcaatgcccttggccttgttgcccaccaccacatcggacagggaggtggtgtgatccatctggaagatttttgcctcgccctgaatgcacagcttatgggcaccgtggccgatctgggaaatgtcaatgtcgccggaggccatggcggcgatttcggcggggccgccctggaactcaaaggtctcaacggtcaggcccacttcctcaaagtagccctgctcaatgcccacaaacagggagccggcggagcccaggttgggcatgtacgccacgcggacggtggcgggctcataggtgggggtgtcggccgcgggggtctcggtgccgatggcaggggactcggtgttgggcgctggggactcattgttggcgggagtcccgcaggcggccagggagaataccattccgcaggccagtgcaagagagagcagtttcttcttcatgatagttcctccttaattatttatgatgatccggctcatcccggaacaatcatacttacttgcggacagagaggtactcctgatagacctgactccagatgtgattcttcagttccaggaatcgaggactcatcttggtctcctgatcgcggggataggggatgtcgatgtccacaatctccttgacacggccggggcgggcacacatgatgaccacccgctgggccagaatgatggcctcctctacgtcgtgggtgatgaagaagcaggtcttctgctccttctcccaggtgttgagcagctcctgctggagttgggtacgggtctgtgcgtccagggcgccgaaaggctcatccatcagcagcaccttgggattgaccgcgtaggcgcgggcgatggcgacgcgctgcttcatgccgccggagagctctttggggtaggccttggcgaagccctccagatccaccatcttcaaatacttgtgggccagctcctcggcctcctccttgctcttaccctggagcttgagcccaaactggacgttcttctccacggtgagccagggaaacagggcatactgctggaacacgatgccacggtcggggccgggccctgtaacctctgcgccatctaccaaaaccttgccctcggtaggggtctccagtccgccgataatattgagcaaggtggacttaccgcagccggaagggccgacaacacagataaactcattttcatgaatatccatatccacgccgttgagggccaccatctcaccgttgcggccgttaaacttcttgacgacgtggtcgatatgtacctttactgctgaatggtttcctgccatcccgtaaacctcctctcaaggaatttcacaatcttttcaaagcagatgccgataatacccagaagaatgattcccatgagcattacgtccatctggtagtatccattggcctgctgaatcatcatgccgatgcccttgtcgccgcccacaatctcagaggccatcagagtggtcatagaggtggacaggcccagccgggccgcgaccaggatgaagggagtggaggccgggatggtgattttgaagaaaatgtccttctgcttggcgcccagtacacgggccgccttgatcagggtggtgtccactcccttgacgccctgatagatggtgataaccatgaccaggaacgcggcgatgaagataacggtgaccttactgacctggcctacacccagtgctgcgatgatcaggaacacataggccagcggggggatgttgcggataaactgaatccagggctccaccacgtggcgaaaggggtcataccacgccatgaggaacgccaccgggatagatactacaaacgcgatggcaaagccggacagtacacgggacaggctggcccacacatggccccacaaaacgccgctggcggccttactgataaaggcatccaccacagctttcggtgtagcgaacaccagtggccacgtataggcggcgaacagccagattgcaatagcaacggccagtgaaatgagcacccatacccagttgggtattttgctccagaaagacgattttttcagtcgcatcgaaaccgagcctcctttgttgcttctcagtatacaaaaaccagccggtttcggaaagtatgaagttttatcatactttctccggcgctgcatcaaaaacccggccggagcaaacgctccggccgggttcattgggaaccgcaggttcagaacagccgtgccatggacggcagctccggccccagcaggggccggcaccagccgcagaaggcttcggtcacgtcggtgccgccggcggtgaggtactccgccgggagcacccgctcgcccagcatgacctcctcgatgggcaccaggaaggtctcgcagcggtagggcgcggaggacaggcggcggaaggccaccatctgccccgtctccccggccagcaccgcccggcaggccgcgcggcccgcctcctcggcttcggcggcatccaccggggactgccatgcgatggaggcccgggccaggatgcccggcttctcgctgcgggccttgatgcccagccgccgcaccaccagctgcgccagatgggaggacacatctccgaagtacgtggagcgcccggtctggaagatggggggcacgatgggcttgccctcgtcgtcgtggagaccctcgctggccaccacgaccacgccgcccagcttgcggtacatatcgcccaccctgtccaggaactcgtcctcatgaaacggccgctcgggagggtagagcaggtggggcgcgtcgccctcctgctcccgggccagggcggcggcggccgtggtccagcccgcgttgcggcccagagcctccagcaccaccacgtggatgggcaggctgcgcacgtccacccccagttcccgcaccgtgcccgccatgtagcgggccacgctgccgaagccggggcagtggtcagtgacagcgatgtcgttgtccatggtcttggggatgcccatgacggagatccccctgtcccggcacaccgccgccagcttgccgcaggcgtccatggtgccgttgccgccgttcatcagcacgtagcggatgcgcttctccgccaggatatccgccatgcgggcgtagtcctccgcctccagggcgtcccgggaggtgccgatggcggtggcgggggtggtgggcagccgctccagctcctcctcgggcacagagccgaagtccagcagcttctccttcagcagtccgccggtgccgcccacagcgccgtaaacatgctccaccaggccgctggcctgggcctcccggaccgccccatacagggagcagttgagcacggcggtggggccgcccccgtgaatgatgatcaggttctccttcaatggggttccctcctcgttttcagtccattttgtctcattataatgctgtccgccagaatccacaaggaggatttctcgtcataccttttgacaaagaagaggggatgcgcaccgggctggcgcgcacccccctcttgaactccgctaccgggccgcacgggcggccagagccgcccagccgttctgctcccgccgctcaaacacggccaggccattccgctccagagcggcctccacttcgccggcccgggtgtcgatgatgccggagcacaggaacaccccgtccgcgtccaggaactcccccgccttggcggacaggggtatgatcacgtcggccacgatgttggccagcaccagggcgtacttccgccgggccagctcggccaccaaggccccgtcggtgaggacattgcccgcccgcacggtatagcggtcccgcccgatgccgttgagagcggcgttctcgtaggccacatccaccgccttgggatcgatatccactgccgtcgccgcggaggcccccaggaccagggcggcgatggagaggataccgctgccgcagcccagatccagcaccggctttccggggacggtgtaccgctccagccccatgaggcagagctgggtggaggcgtggctcccggtgccgaaggtgaggccaggattgaggtacaggggcgccttccccgccgggacgggctctccccgctcccactcgggcacgatgtagagcctctcccccaccggcatgggcttgtagtacttctgccaggagtgggcccagtcgttgtcccccaggctggcgagcgaatagggctggtcgatgcccgccagccatccctcaagctgcttccggccgtcggcgtcgtcggtgatgtagaacttcacccggcagacgcccttcatgcgggccagcaggccgtcgtccacgtagtcccagtactggtggttctgctccagaaaggtcttgaagtcctcctcgtcctcgatggccagcccggtgaccccgttgccggtaagccgggcgcagagggcgtccagctccgcctcggtggtgtccagggtcacctccagccacttcacgtcctccatcagcggtgcctccccaggaagaacagggccacggtgccagggccggagtgggcgccgataacggggccaacgttgttgagcaccacggtctgcacgccgaagcggcgcttcacgtcctcggccaccctgttggcgtccccctcgcagccgccgtggctgatgaaaacggtctggcccgccgggtcgatggcggtctccgccatgtggtccaccagggccttgagggatgcattgcggccccgggcggtgcccacttttgtcaggtggccctcgtcgtccacatgcatgacaggcttgatggacagcatggtgcccagtacggcggtcgcggaggaaattcggccgccccgcttgaggaagtggaggtcgtccaccgtaaaccagtggcacaggtgaagtttgttctcctccagccagtcccgcacctcgccgatgcccctgccctcgttcttcatgcgggcggcgtaccacaccagcaggccctggcccagggaggcgcacagggagtccaccacatacaccttccgctccggatactgctcggagagctcctgggcggcgatctgggcggagtggcaggtggcggacaggccggaggagaaggccaccaccagcacgtccctcccctccttcaggtggggctctatggtctcggtgaagtcggacacattgaccgccgaggtggtggccatctccccctcccggagctggcggtagaagtccttcgggtcgatctcccggttgtccggccagttgcggtaggtcttgttcctcatggtaaaggacaggggcagcacctccacccccagttcctttaccagcgcgtccgtcagatcggccgacgagtcggtcagcaggacataatcattcatctgcaaattacctccagtattcacacataccgggcacgcccggttattttcggttcttctccggctggggccgccgctcccgcagcagttccagaatccgctgacaggccagccggtcggcatagctgcgcagagcgagggccagggccaggccgggcagctcctccgcctcggcgctgccgtccaggctgcccgccgtcacgtccagcgcccggtccagctcctcccgaaactgttcgtacagcttctggggcggccgcccctccgacgcggcagccagcagcagccccgcgtccttcaccgagagcacctgcttgagggcgcacagggcggtcagataggccaggtgggtgcgggagtaccgctttccctcggcccggggcatggccccgtccttgatgtagttgttgaccatggcggaggtaaggctctccccctccccatagtggatgagctgacggggcatataggaaatgagctggtccatatacaggccgatgtcgggaaatgcctcccactccaccgggcgctcacgctcgaggcgctccttcagctcgcggatttcctccacggacgcctcctcctttctggtttcaaacatgacgtatcaaaatattggtgttattatatcacatcggttttcggtaagtaaaggcccgcagggcatgaaaaagggccgctatggtcacataacaaaattatgtgaccatagcggcccccgatgcggttacatctcccagtcggcgtagtcctccgcctcggagtcgtccacagcggcggtggacaggccgggcagcatgcctctcagcttggccaccacggccatgatcttgtcccagtagagcaccgccgcatagagcagtgcgcccaggacagccagcagggaaaagagcttcacaagggccccgaacaacttcttcatggacagaaagcctccttctgcgttgacactctgtgccgtatgcttccagtgtacacgtttccggtgcaaaatacaagtgtcccctcccactttcttgaaacttttttcccttgtaatttgaggcaaaatagaatacaataagagaacaaatgggatccattctgcccccgctccggcgggtgtacgcttgcattttcccacggaaaggaaggatgcgtccatgaagctccaaaccgaaaagggcgagatcaccatcagcagcgacgtgttcaccaacatcaccggtgcggctgccaccaactgctacggcgtcaagggcatggcgatgcgctccaagacggacggtctggtgcatctgctgcgccgggagtccatgggtaagggcgtcaaggtcacttacaacgaggactcctccgtctccatcgagctgcatattatggtggacaacggggtgaacctgatggcggtgagccgctccatcatgagcgaggttcgctatatcgtcagccgcaccacgggcgccgaggtgcgcagcgtggatgtgtgcatcgactccatggtcatcggctgaaacggcccgcgcccatcgaaaggaaggaacaaccgatatgagagagagcattgacggagcgtcgtttgcccaggccatgattcacgcggcggcctccctcaatctgcagaagcagcagatcaacgaactgaacgtcttccccgtgcccgacggggacaccggcaccaacatgagcctgaccctcggcaccgccgcggcggagctgcgcaagaagcagccccacaccgtgggcgaggccgccgccaccaacgcctccgccctgctgcggggcgcccggggcaactccggcgtcattctgtccctgctcttccgcggctttgccaaggcggtcaaggacaaggacagcatcgacggccgcgatctggccatcgccctggacttcggcgtggccgccgcctacaaggcggtgatgaagcccgccgagggcaccatcctcaccgtctcccgcctgacggcggccagggccgccgacgcagcccgccagacccccaacgacccggaggccgtgctggaggccgccatcgccgaggggcagctcgccctggagcacaccaccgagatgaaccccgtcctgaagaaggccggtgtggtggacgccggcggcaagggcttcctggtgatcctccagggcatgctggactccctgcggggcgtgcccatgcccgagggggacagcgagggggaggcgaaggtggagagcaagaccgactacgcggccattgccgcggaggagatcaccttcaccttcgacaccgtgttcattgtccgcaaaacctctccccacaaggggctggaggcctttgaggcctatctgaacagcatcggcgacagtctggtcatcggcgaggacgacgactgcttcaaggtccacgtccacaccgacattcccggcgctgccctcaccgaggctcagaagtacggcaccctggagctggccaagattgagaacatgcgcacccaggcggaggatctggccgccggccgccacatccagagcaccgacgatctggacgcggtggaggccgagctggaggggaatcacggggcacggaagatcgccccgccggagaagaagtacggcgtggtggccgtggcggcgggcgacggcctggccgcggtattccgcgatctgggggccgacggcgtcattagcggcggccagaccatgaacccctccaccgacgacatcctgcgggagatcgacgctacccccgccgaggtggtcttcgtcctgcccaacaacaagaacatcatcatggcggccgagcagtgcgtccgcctggtggagggcaagcaggtggtggtgctccccaccaagacgatcccccagggcatctccgccctgatggtgatggatcccgaggcggaggtggaggacaaccgcgccgccatggcggaggccatcggccgggtacacacctccgagattacctacgccgcccgggatagcgacttcgacggctttgccatcaagcggggcgactacctggccctgacggagcaccagctcttcggcactgaccgcaagctggagaagctgctccgccgtctggcggaggccgaggcccagcagagcgccgagtttatcaacatcttctacggcgaggatgtcagtgagaaggaggcccagaaggccctcaagctctttaccgagtgttgtcccaacgccgagatcaccctgctctccggcggtcagcctgtctattactatatgatctccgccgaataagcccacgcaaacagaaaaaaggtacgcccctgcggggcgtacctttttttgtgtttctgcatcagagcaccttggacaaaaactccctggtgcgctcctccttcggattggcaaagaaggcgtggggctcgttctgctccagaatgtgtccgccgtccatgaacaggacgcgggagcccacctcccgggcgaagcccatctcgtgggtgaccaccaccatggtcatgccctcgtcggccagctccttcatgacctccagaacctcgcccaccatctcggggtccagggcggaggtgggctcatcaaagagcatgaccttgggcttcatggccagggcccgcacgatggcgatgcgctgcttctggccgccggagagctgaatgggataggagtccgcccggtccttgaggcccacccggtccagcagcttctccgcttcggcgtcggcctcctcctggctcatgagcttggtcttgaccggggccagggtgatgtttttccgaatcgtcatgttggggaacaggttgaagtgttggaacaccatgcccatctggcggcggatggcattgatgtcggtcttgcggtcgttgatcacggtcccctcaaaggagattgtgccggaggtgggagtctccagcaggttcatgcagcgcaggaaggtggactttccggagccggatggcccgatgatgaccaccttttccccctgctcgatggtctcggagatatcgtccagaaccagattctttccaaagcgcttggtcaggtgttcaacggcgatcactttccctcagcctcctttccattttggcaaagatgacggaaagtaccttcgtaatgcagaagtagacgacggcaatgataatcagcggcggcatggcgtccatggtacggctctgtaccgtggaatatgccttggtcaggtcggtcataccgatgtaccccaccacggcggtctccttcaccagcacaataaactcgctggcataggtgggcaggcagttcttgatgccctgggggaagatgatgctccacatcgtctgtccgtgggtcaggcccaggctgcgtcccgcctccatctgccccttgtccaccgcaaggatgccggagcggaaaatctccgccgtataggccgcggagttgaggccgaaggcgatgatgcccaccgctgtcttgttggtccaggtgaccagcaccacgaagtaaataaacatgagctgcaccaccacggggatgccgcggatgacgtcgatgtacgccttggcagggccgcgcagaatcctgtaccgggaaattttcatcagacagaggagcattcccagcaccgtgctgatgcagatggcgccgagggtaatggccagtgtgttccccaggccggagagatagagcttccagcggtcggcggcgacaaacgccaggtagaagcggtcacccagcttggcaagctcctgtagaaacagctccaccgaaaaacctcctttttcgttttttccaaaacacagggagagcctgcgccgcccaatgcggcgcaggctttccactttttagttggccttgcttatttcagcaccacgatcgcctgggtggcctcgtagtactcgttggtgaagtccatcacctgctgcttctcctcggtgatagagatgccggcggccaggaagtccaccttgccgctttgcagggcgccgggcagggcgtcgaagtccatgttctcaatctccagatcatagcccatggtggcgcacaggtacttggcgtagtcgatatcgaagcccatcagggtctcgccgtcgtcgcccacgtactcaaagggctcgaactcggcattggtgcccatggtcagggtgcccttggactcataggagggcagctcgggcagctctacatcctcgttagaaatgtgcttctgcaccagcaggtcgtaggtgccgttctcgttcagggtctccatggcggcgttgaactcctcggtgagctcggagcccttgggcaggccgatggcataggcctccttggtgtcggaggcggcgaagggcaggatcatcattttgtcggcgttggcctccaccagcttctgggcgggcagggaatccaccaccacgcagtccacgcgaccgttgagcagctccatgccgcaggcagtgaccgccttgaagcggctgactgtggcatcggggtaagtatcgctcaccagtgcgtcgccagtggtgccctcctgtaccgcgatcttggcggtagccagggcgtcagcggaggtccagttggcgggactgtcggcggcgggagcgccgctttctgtcacagggggcgtgctgccggcgggggtttcgttggtgtcgtcgctgcctccggagcaggcggtcagcagaccgagggacagaactgcggtcaggccgagggcggccagcttcttacttttcatagtgcattctctcctattccttgtgtgccctgcgtgggcttttttgatgttcttattatacactatattcataaaaatgcaatatttattcattcgtcaaagcacacaaaaaagaaagggcggagccatgcggctccgcccttttgtccaatcagagagaaatttaacccttggtagcgtggaagaacaggaagttgcccagcggggtgtagtacataccgtggacatcgtccgccaccatgtaaggctgagagtaataatacaggggggcaatggcctggtcctcgcccacgagcagatcctcggcctggtgcatcagctccatacggccagcagcgtcggagtcgctcaggaccttggtcatgatggcgtcgtactccgcgttggagtagtgagcgtcgttgttgccgttgtcggtcataaacatatccaggaaggacacggggtcgttgtagtcggcaatccagccgttgcggcagatgctgtagtcgcccttggaacgggtctccaggaacacgttccagtcctggttattcagagtgacctcaacgcccaggacgttcttccacatggactggagggcctcggccacggcctggtgcttgtcgtcggtgttgtacaggtaggtggtctcggggaagcccacgccgttctcataaccggcctcggccagcagcttccgggcctcctcgcagttggcctcatagtcgtccttggacacgctccagtagctgccgcccacggtgcggaagtcgtcgccggaggtaccctcggcgtctaccacgcttacgggcacccaggcgtcagcggcaatctcgccggcctgcgtcacctgctccacgatgtagttgcggtcgatagccagggagaacgccttgcgcaccaggggatcgtcaaagggctccttggtgttgttgaagcaggcgtagtagctgcccagatagtcgccggggatcacggtgccgtcagtcagcagcgtggccatctcatccgggggaggattctgcatgtagtccaggtcgccgttcttgaacgcggtgagctgggcgttggcatcgtccatcagcttgaaggtcagcttctccagggtgatgctggaggcgtcatagtagttctcgttgggcaccatgacgatctcggcgtcgtgggtccaggaggccatcttgaacgcgccgttggtcacataggtgctgggatcctgggtccaggtggcgttgccctccacgatgtcctcacgcagaggcatgcagttggggaacgcgcagatgtccaggaagtaagggcagttgtaggtcagagtgacctcaaaggtgtgctcgtcgggagcggcgacgcccagctcctccttgggcaactcgccggcgatgatctcgttggcgttcactaccatggcaataatggtgttgtagggagaagcggtggcgggatccaccaggcggcgccaggagtacacgaagtcgttggcggtcacgggctggccgtcagaccacttggcatcctcacgcagcttgaaggtgtaggtataggtaccatcctcctcattcggagtgacagtgggttcctcggcggccatgccgggctccagcacggcggtagcaccgttgcgcccgtcgccggagggatcgctgtccacccacttgtagaggccctcaaacaggtgggtaatcataacgttgccgtccacagtacggttcatgctgggatccatggtctcgggctcggacgcgaagcacacgttcagctcgttcgcagcaccggtggtgccggtctccacgggagtgctcccctcgggagccggggtggtctgggtatctccggtgccgcagccggccagcagggacacggacagcgcagcggtcaggcccagagcaaggactctgctcttcttcattcgctttgtacctccaatcaattgtgatcctctattttgtaccaaaatgcccaaaagcattgatacactatgtatcgctgccccgttccggggcagcggacaggggtacccctgtccattgcaaaaatacatttgtctttaatagtctacattatagcacatggcagacgctttgtaaagccgcactttaccagatactgtctgcttcaaatcacggcaaggctctgaaatcagcccagcaggtggcacgcggcccagtaaaggcgcggacatttcctgcgggaaatgtgtcgcttcgctccaaagccgcgccttccagggggaaccagttccccctggatacgcgcctgcggcgcgataccccctccgctctccgagggggaccgaaaccgaccgtcacgtagggcgggggcttgcccccgccgtcggcaaaaccactgtgccggaacctcgcttaccccagcaggtgacacgcggcccagtgcccaggcgcgtgctccttgaactccggcacggcctccttgcacttgtcggtggcgtaagggcagcgggtgtggaaccggcagcccttgggcgggtgcatgggggagggaatatcgccctccagcacgatgcgctggcgctggcggctgacctcggggtctggcaccggaacggcggaaagcagggtcttggtgtaggggtggagaggattcttgttgagctcatagctctcggccagctccaccagggagcccaggtacatgacgccgatgcggttggagatatggcgcaccaccgacaggtcgtgggcaatgaacaggtacgtcaggcccagctcctgctgcatgtcctccagcatgttgaccacctgggactggatggacacatccagagcggagatgggctcgtcgcagacgatgaactcgggcttgactgccagggcgcgggcaatgcccacgcgctgctgctggccgccggagaactcgtggggatagcggtttgcgtgctcggtgttcaggcccaccatgcccagcagctctttgatccggtcggtgcgctcggcctttgaggagcagagcttatggatgtccagagcctcgccgatgatctcgcccactgtcatgcgggggtccagagaggcggaggggtcctggaagataatctgcatcttgcggcggtagggcagcatattgacctgcctgcacttgggaaccttgacgtgctgcttctcaccgttctcaccggcgggccaggggtcctgtccctcgaaaatggtttcgccgccgtactcgatgcggccggaggtgggggtgtagagctggagaatggttcggcccagggtggtcttgccgcagccggactcgcccaccagacccagggtctcgccccggcggataaagagggacacgtcctccaccgcctggacgccgggcccgtgaacgcccttgaccggaaagtattttttcaggtggtccacttgaaccaggatgtcattcttctcactcacggccgctcacctcctgatcctgtaccggcttctcctgtccggccttgtcgagctgatcctgcacccgcagccagcaggcggagcggtggccctcgcccagctccacgtaggggggcatcttctgcaggcagatcttcatggcatgctcacaccggggggcgaaggggcagccctcggggggattgagcatgtccacgggcgtaccctcgatggggatcagccgctcatagctctcggcgtccacgcggggcatggagcgcagcaggcccacggtgtaggggtggccgggcttgtagaagatgtcgtctaccggcccctgctccacgatcttgccggcatacatgacggagaccttgtcgcagatctcagccaccacgcccaggttgtgggtgatgaagataatgcccatgtgagtcttcttctggagctccttcatgagctccagaatctgggcctgaatggtcacgtccagagcagtggtgggctcgtcggcaatcagcagcttggggtggcagatgaggcccatggcgatcatgacacgctggcgcatgccgccggagaactcgtgagggtactgcttcatccgcttggccacgttgttgatgcccaccagctccagcatctccatggcccgcttggcggcgtcggccttggagattttcttgtcgtgggcccgcagggcctcgatgagctggttgcccacggtgtaaacgggattgaggcaggtcattgggttctggaaaatcatggccacctcgctgccccggaaggaggccatctccttcttgctgaaggccaggacatcccggccctcgaaggtgatggaaccgccgatgaccttgccgggggactggagcaggcccatgatggagtaagcctcctggctcttgccggagccggactcgcccacaatgcccatgacctcgtcgtaatccaggtcatagctgatgccgctgacggccttgacctcacctgcgggggtaaagaaggagacccgcagatccttgacttccagcagcttgccggacttttcgttctgttccattgattgtctcctcctctcttatttcttcagacggggatccagggcgtcccgcaggccgtcgccaaacaggttgaaggacaggatcataatgctgatgatgatagcgggaatgatcaaacggtaggggtaggtgctgatgccgcccagcgcgtcggagcacatggagcccaggctggtcaggggagccagcacgcccacgcccaggaaggacatgaaggactcagtgaagatggcggacgggatctgcaggcaggtggtggccacgatctggccgatgcagttgggcagcaggtgccgcttgatgatccggccgctggaggcgcccagggcacgggccgcggtcacgtattcctgtttcttgagggtgaggatctggccgcggatgatgcggctcatacccacccaatacaggcaggcaaaggcaatgaacatgcccatcaggttggggcccaccttcttaaagaactccgccaggaagaagccctggtggtcggtgatgaactgggtgacatgggggcccatggccgtggcgataagcaggatgatcagcacgtcaggcagggagtagataacgtccacgatgcgctgcatgaccacatccaccgtaccgccgaagaagccggagatggagccgtagagcgcaccaatgaccagcacgatcagcgcggcggtgaggccgatgatcatggacacccgggtggcaaacatggtgcgcaccatgatatcgcggccgtagcggtcggtgccgaacacatgggggaacaccttctcgccgtcggcgatgcgctgcagctcgtcgttggagtagccgaagggctgggcggagtagcccagggccttgtagatctcctcctcgctcataccctcgtactcggcgccgccgccggccttggcctgggcgcggatgagcgccttgtccttgctgctgagctcctcgccgcgggcggccgcctccgcttcagcggcggcaacggcctcgtcggggtcctgggaggaggtggcctccttataggcctgttgggcctcaagggagtaatgccaggggtagaggttctctgcgccggcgttgaactggtcgtatccgtagggtaccagcatggggccaacaaaagcgaacagcaccaacagtacaatcacgcccagggccaccatggccaccacgttcttgcgcaggcggcgccaggcatccgcccagtaggatacgctcttgcgctgctggatgaagtcctccttctccccgctggtagccggggcgaagtccgccgccgtcaggtcgttcagctccagcagggggtccacatcgggctgaagggagccaaagacagcttttttctgtttctctgccatttttactctcctttcgtcagatcgatgcgggggtccaccacgcggtagaggatgtcaaccaccaggttcatgatgaccaccagggtcgccaggaagatggtggtgcccatgatgatgaagtagtcgcggttctgcacggactgcaccagatagcggcccaggccgggaatggtgtagacggtctccaccacgaagccgcccaccagggtgaaggcggtcagggggcccaggtaggtgatgacggggatgacaccattgcgcagggcgtgcttgaagatgatcctgggagtcagcagacccttggcccgcgcggtcttgatatagtcctggcccagggcgtccagcatggaggagcgggtcaggcgggcaatatagcacatggggtaaaggcccagggccagacagggcatcaggtaggccttggccccctgggaggcgtcaaaaataacgttgatgcccatgaatttaaagggcgccccatcattgcagaaaagcatcagcaggaaggtggccaccacgaagccgggcatggacacacccagggtacacaccacccgtaagacgctgtccacccattttccccggttgtaggccgccagacagcccaatggtatgcccaccgccacggcccataccagagcgatgacgccgatctttgcggagagggggaacttctccgtgatgatgtccagcaccggacggtccttctgcatcttcagggagacaccgaagtcctggtccacgatgactcccttgaggtagcgcagcatctgaaccccaagggggtcgtccatcccgtacttggcctccatggccgccttctgctccggcgtaatcttttcgtcgttgaacgggctgcccggcacggacatcatcaggacgaaggtgacgcaggcaacgaccagaatggtgatgagggccatgatcacccgtttcacaatgtattttgccattctttcacttcccatattattctctgttcacgcaatcgaaactgccccatcgtaagcgtttctccattttatcgtaatttgtcccatgcgtcaagagtatggccctccaaatttgatggaaactccccctaatcttgcatgtgtccttcatacaaagacaattttccgcttatctgtccacatattatttcgctgtcagacgcttttcgagttgtgccagccaaaaaaccgccttttttcatagtgtggaatttaaatattccgtatattactcacctattcgccctttttatgcaatttcggccgggcatgcaattcccaccgcttgaatcgcttttctgcataaattgcaaaaaggcgggcacggaccgatgtccgcgcccgccatgggctccgctcagtcgaagcccaggcccatatagccgtgggtgccctccccccagagcgcccgcttttcggcgctgtaccacttaatcataccgaagggctggaggtagctacccttcatgccatcccacagggcaggggtgcgcacatagcagcgcgccccggggagtacccgttccagcgccgccagcccgcggcccatcttgtccggggacagcagcagctccttgaacagcacactctccccgtcggtgtactcggcggcggcgcagccctccgcgccgtccacgctcaaccggtacagcccgccccccgacaggcggcccatgccctgctggtagcggatcagctcttccgggtagtccacggcgggcgccccctccagcaggcggcgccggatggcgttgtactcccccggctccacgggttctgcccggtcgccctccgccgcgggctggagcatgctcttgagcagctccagcttccgggtggaaaagcagggcgcaaagcccaccgtcccgaagaatttgaacaggcttggctcggcgggcacagtggtaacgcagtccgctccccgctcggccagatagccgtccacgaagcggagaagctgccggccgtagcccttgctgcgcgccccggggtcggtggccagggcgtagatataccagcccgaggcggttccgccgccgggcagggtcaacgtctggggcagcagggccagcatggaggccagccgcccctcctccaccacctcaagaacgtcggctgaggccccgcagcactcgtagaaccagtcgatatagcggtcctcgtccccgaaggccgccttccacagcgccttctgggccggaacctcctccggacggccgggacgcatctccaacataagctgctcctttcttatcgcttcaaaaaccgtcacttcataaccgccgtgtgcttttccaccatcaggtcggggtaatagctctgcttggctttgcgcaggccctccacgcccatgtcgtcctcccggttgaggtaccggatctccgggtggcgggcccgcacccagcgggcgaactcccggttgatcatggcgtaggccccctgaagctcgccgtaggccttctcgaagtgcacgtcgtaggtgtcggcggacagcctgtcaccgatggtgaaggccaccacctcgccatatacccggatgaggccgccctccaggcccagctcctcatagtgctccatggcggtgcgcagggcaattccctcatcccccagatcccgctcctcggcgtctccctcccgctggagggagcggcggtaccactccttgtccatctccaggcactcgggcagggtggccggggtgatctcctcgtaggtccaggtggggttgttctctacaaagcggttgatgtggttgcgcttggcgtggagcttcttgccccccagctcggccagccgctccacctcgtaaaggtagtcgtagccgtcccggtccgcggtgtaggcgaaccggccggggaaaaattcctccagctccgccatctgccggggcgtgaggcacaccaggcgcaggggctcccccttctccgccgcgtcggcctccagcgcacggatgacggcagcaatgtctcctgagcccgcagggtacatatagctgcaccccaggcggccgcacacatgggtcaccagaaaatcgtccacccgggcgatgcgctggttataggcccggctccagacgtagagattggtaaagttatagtcgcacccccggtagttgccccgggcgagcagttcatccacccaggccttgtccgccggggtgggcgcatggaattcgatcatgcaggtttcgtctccttaaattcctagtatgccgaaatgatatcacgcccgtccgcaaatggcaagcaaaacccgtcaggcaccgtcccaccggcagccgcccagctccacccggccgtcggcggtgaagggcaccccctctgcctccagtatcgcccgctggacgccggggccaaatgctggggtggtggagccgtcggcacgcaccacccggtggcagggcacgccgggcgtgcggcaggcccgcatggcgtagcccaccgcccgggaggccctgggattgcccagcatcagggcgagctgcccgtaggaggcgcacttccccgccgggatgcgccggaccagctcatagacccgctcataaaaattcatgtcaatgcctcctccgaataccgataacagaagcacggcggccgcccgaggggcggccgccgtaccgtattttccgttgtcctcaccagccggggtagacctggctcttcttgggcagcagcaaggccgccgccacatagagccacagccctgcggtgcccgcgaagcacagcgccacccagatgaggcgcaccaagttggcgtccacattaaagtactcggccacgccgccgcacacgccagccagagcgccgtgatccagccggtacagcttttttgtctcgttcatctgaaaatcctcccgaggtgatttcgaattctggacataggataccacgggaggggttaaaaagtccttcgggctttcttaaaaatccatgaaaattatttgccgtcctccaccagcatgaggcagccgtcggcgtcgtatctgagccgctgcacctccgccttggtgttgcgcacgatatcgtccatgcggatgccctcggtgatggtggcgatgaaggtgtaggccacaccgtggcgcttggcccggccggtgcggccgatgcggtgggtgtagttctccagctcgtcgggcacgtcgtagttgaacaccgcgtccacgtcgtcgatgtccaggccccgggcggccacgtcggtggccaccagcaccttgatctcgccccgcttgaacttctccagggtcttctcccggatgcgctgctgaatgtcgccgtggatggcctcgcaggagatgccccgcatcttcagcaggccggccagccggtcggtcatgttcttggtgttgcagaaggcgatggcccgctcgtactccccgtgggtgatgagggccgcgatggtgtccagcttctgctcccggccgtccagatcaatgcggtactgggtgatgtccggcttggactcctccaccgggcggacggtgatctccaccgggtcccgctggtacacccaggagatgtccatgacctcccggctgatggtggcggaaaacatgcccaggtttctgcggtgcttgagctggtccaggatgcgggtcacgtcccgcacgaagcccatgtccagcatccggtctgcctcgtccagcaccacggtctgcaccttgtccagccggacggtgcggcgcttcatgtggtccatgaggcggccgggggtggccaccacgatctggggcttctttttcagggtgttgatctgcctgtcgatgggggccccgccgtagaggcagacggtgcgtaccccctccttgaactcgcacagatcccgcagctcctcctggatctgcaccgccagctcccgggtgggggccagcaccaggccctgcacgtcggcgcactcggggtcgatgtgctccaccatggggatgccgaaggcaaaggtcttgcccgtgccggtgggggccttggcaatgacatccttccactccatgaaataggggatcgcccccgcctggacgggggtggcctggacatagcccttcttttcaatggccctcatgatggcctcggacagccccagctccgcgtaggttttggtcccgttcacctgctcgccgttgatttccattcgggtacaaacatcctttcgtttcgttttgcctgattcaaggtccccacaggcagccgaaaccccgtttcgtacccaaacgcccgcctcaccgcgggggcgcgacctcaaatccatcggccggaagcggctccggcctgtctcgcgccaatactatatcatagccccgcccattacgcaagtgcgccgccgctcccgccgtgctcctccgcccagatctccagggcctcccgggccccgtagaggctcccgcggtaaaagtagtagcggctgctccggcgggcatagcggcggtagacctccagatactcgttcaggaggtaaaccccctccgcctccagccagggcagcagcttctccagcgtgcgctccatctccgtcaaaagggccgtgtcctcggggccataggccccctttccctcgccgtagggcgggcacgcctcaaaggccgattcccagtcattcaccatcttccccgtcctccttcatattctccaacgccacccgtgtcgcctcaattacaaagcgggaaaacgtcacgtttgtcccctggatcacctcgtccacctgctgaataatttcattgggaaaacgtatgttcttgggcgttgtctccggaatggagggcagttgaaattttcttcccatacaaatcaccatctctactgtatggcaatctgtgggctttgtaagcactacatattgtaaggcaaatcgtaaagcacggccgctcctctccgcgtaggggcgacccttgtggtcgcccgcgggcggccataaaggccgcccctacaagggcttgtcaccaccgtcggcctttcgtaggcgccgatgcccacatcggcccgccctgcaccgtgtcggcgcgccttccatactccccctctttatatctgctttcttgtcatgcctccggcggccccgctttcttgccgaagaaagcggggggaaagacgggtcggggcgggggattccgatttcccccgccccgacaccccacccttgaaacggccaatcaggggggctgcggcccccctattggatgtaccccccaggaagggagggtatgccagcccgtccggagcggcgggggcgttacaacgtaagcccccgccgtcggaaagccgccagcaggacggctcgggggaaactccaagaagggggaatcgcaattcccccttcttggtcgtttcaagggggatgggcgttgggaaggggggaaatcgaaatccccccttcccaaccggctctttcgcccctttctggccgctcagaaaggggcccgccggaggcttgacaagaaagcaggtgtcaaaaagggttcccatggaaggcgcgccagcccggcataaggcgggccgatatgggcaagagaagccgccctggggcgtcggcccctacggaacgggtcgggcggccataaagcccagccagtgtccggtccctacctgcgccggaacacatggacgcggaaggaggcccgcacccgcaggccgtccagggcggccagccgctccgccccctccctgggggtcttccagtaatagggggtcatctggaacaggtcgcgcagcgcctcccccgccacgtccaccaccgcctccaccggctccacccgctcgtaggaaaagccctcgtaggggatgtcctcctccttgttgcggtagggctggtcgtagagcacctgcttgagctcccacaggtggtcggcggcgggcaccacatagaggaaggccccgccggggcggagcacccgccggaactcgtccagggccaggggggagaagcagttgagcaccagccccaccgaggcgtccgccagaggcagatggtaggcggaggccacggcgaactccccctccggcacccgccgggcggccaggcgcaccgacggcttggacaggtcgattcccgccaggggcgggcggcccagggcctcccacagtccagcggtgtagtacccctcgccgcagcccgagtccagcactgcctcccccggcggggcgtactccgcccccagggcgcacagggcggccagcaggtggccgtagtatcccccggagagaaaccggcggcgggcctccgccatgcccttgtcgtcgccgggggccttggagtgctttttgttggcgggcagcaggtggacatacccctctctggccctgtcgtaggcgtggccgttggggcaggcataggcccgctccccccgctccaggggggcggcgcagatggggcaggtaaacagagacttttccacagaacctctctcctttgtggaaggtatgacaggaaattgggcccccgcacggccgggggccccggccgttcacccctccagcagctcctttccggagatgccgggctccgtcatggagtaggggtccagaattttgtccagggccgcctcgtccagcaggccctcctccagaatgagccgccgcaccggcgcgccggtctcgatggcccgcttggccacctcggcggccttctcatagcccacgtgggggcacagggcggtgatgatgcccacgctgtgctccaccatgtcccggcaccgctcccggttggcggtgatgccggtgacgcagttgtccacaaaggtatgtaccgcgtaggtcagggtctccacgctctggatcaggttgtagaagatgatgggctcgaaggcgttgagctccagttggcccgcctcggcggccatggtgacggtgacgtcgtttccgatgatgttgaaggccacctggctgaccacctcggggatgacggggttgaccttccccggcatgatggaggagccgttctgccggggcggcaggttgatctcgctgaagccgcagcgggggccggaggacatgagccgcaggtcgttggacatcttggacaggttgacggcgcaggtcttgaccgcgccggacacggccacgagcccgtccaggttctgggtggcgtcgatgaggtcggaggcctgcaccagctcaagcccggtgaccttggacaggttggggatgatgcggcgcagataccgctcgtcggcgttgatgccggtgccgatggcggtgccccccatgttgaggcggcgcatctcgtccttggcccgctcgaagcgggcgatgtcccggcgcaccacccggctgtaggcccggaactcctgccccagacggatgggcaccgcgtcctgcatctgcgtgcggcccatcttgagcacgtcgtcaaactcctccgccttggcctccagggcctcagagagccgctcgagctggatctgggcccgcaccagcagcttgagcaccgccagcttgcccgccgaggggaacacatcgttggtggactggccgtagttgacgtggtcgttggggttgaccagggcgtagtcccccttctccccgcccagcagctcgatggcccggttggcgatgacctcgttggcgttcatgttcaggctggtgcccgcgccgccctgaatggggtccacgatgaacgcctcgtggagccggcccgccgcaatctcatcgcaggcccgcacgatggcgtcggccacccgcttgtccagcaggccgatctccaggttggtgatggcggaggccttcttgatctccgcgatggagttgatctgctccggatgtacggccagcccggtgatggggaagttctccgccgcccgcagggactggacgccgtagtagacgtccttggggacagacctctcccccacggagtcgtgctcggagcggtattggatgctcatggtacaggcgcctcctcgcaagcagtccttcattttatagggacatcatagcaccatccgttttattttgcaagcaatcctgcaaattatagtccctctccgtgccatgggcatgtcaccagatggtcattgatgagccccgccccctggaggtaggagtagacaatcaccggccccacaaagcggaagccccgctttttcaggtcggcgctcacccggcgggacaggtcgtcctcggcgggcatgtcctccggccgctccagccggtggtccaccggcacgccgtccacccagtgccagaggtagcgggcaaagctgccccactcctccgccacggccagaaaggcccgggcattggtgacggcgcagcgggccttgctcctgtttttgatgacgccgggggcggccagagcggcctccacctcgtcctccccccacccggccagcgccgccggctcaaaatccgcgaaggccgcccgcagggccgcccgccgctccagaatcagcttccagctcagcccggcctgaaagccctccagctccagcagctcgaacagcgcccggtcatcccggcagggccggcaccactccgtgtcatggtacaaaatctcgtgctctgtttttgcccaggggcagcgcgcgccctctcccatgtcagctctctcctctccttccccgcccggttgggccgggaaacgcgatatcatctgcactatagcatagaaatagggaaatggaaacccgccggcaaagtcattgctgagaaaaaattttgtaaataaagaaaaaatcaggtgacttgccaggcggaccgtgttaccattaagataccagccaggggacatggcctggcaaatataaaatcaggaggacccctctcgtatgaaaaagcaccgcggaagacatctgctctccctgctggcgtcggcagctctgctggcatccctgctgcccgccgcctttgcggctgaggcagagggcgagaagcacatcaccatcctgggcacctcagacatgcacggaaatatctggggctattcctacgaagacaacgcggagaccgacaacaacggcatggccaggctctacacctacatccagcaagtgcgggccgagaaccccaacaccttcctcgtcgacgccggcgacgacatccagggcaccatcatgaccgacgatctgtataacaagaccccggaggagccccatccggtcgtcaccgccatgaactacatgggctatgacgccatgaccctgggcaaccacgagttcaactggggcatccccaccatgcaggccattctgggacaggccagcttcccggttctggccgccaacgtcaccggcgcccagggcgagccggtcaccggcgcgggctggacgattgtggagcggggcggcgtgaagctggccgtcatcggcgtggtcaccccggatgtccccatctgggacagcggcaaggacggcattgacgacgccgtctatgaggccgccaacgtggccgtcggcaaggccatcgacgagatcggcgaccaggccgacgtaatcatggtgtccgcccacatgggcatgtacgccgaatttgacgaggagggcggctccgactccgcccagaagattctggacgacaacccggagatcgacgtgctccaggtggcccacaaccacgtggtggtcaacgagaagcagggctccaccgtcatcggcggcgtgcgcaacggcggccgggacatcgcccgctttgatctgaccctggacgccgacaatcagatcattgacagctcggtggagattgtggatatgaccggcgtgacccccagccaggagctccgggagatccccctggtggccgaggcccatcagaagaccatcgactacatcaacggcggcggctccggcgacgagggcgagggcggcgcgtccctgggaagcactaccgcccgcttccagcctgagaacgagatccgcggcatccccgccggccgggtgatggataccgccgtcatggatctgatcaacaccgtccagctggagaactccggcgccgacgtctccgccgccgccctcttcaagggcaccagcgatctgcccaagggcgacatcaactacggcaacatcttcgacatctacaagtttgacaacaccctttaccgggtgagcgtcaccggcgcggagctcaaggcttacatggagtggtccgccgagtgctacaaccagtggcaggagggggatatcaatatctccttcgaccccgagtaccccgactacctctacgatatgtttgccggcgtggactatgagatcgacctgtcccagcccaagggccagcgcatccagaacgtcatgttccacggcgcacccctccaggacgaccaggagctgaccctggcggtgaataattaccgctactcctccgccctgaaggcccagagcattatctccggcaccaaggagtgggagtcctccaactccatccgggatatgatcgtggcctactttgccgagcactcccccgtggcccccgaggtggaccacaactggaagatcgtgggcgtggatctgagcgaggacgacccccgtcgggcggagctggtgggctacatcaacgccggcctgctggacaccccctacgccgagagctacaacctgtccgactatgattccctggtggcccaggccaaggcaaaggccgagactctcaccgtgaccgtaaacggcgcggccaaagacgtggccacggctttcgacgcccaggggaatacctactaccgcctgcgcgacctcgcctttgccctgaagggcaccggcgcccagttcaatgtgacgtgggacggcagtgtggccgtcgccaccggctccgcctacgagggcgaggccctggccctgcccggctccgcccccaccggcgaggccgtcagcctgactctcaccgtggacggcactgcggtgagccagcccgccgtactcgtcaacggcaactactatctggccgaaggcttcctcgcccagctgggcgcggagtccgccctggtggagggcgttttggccatcaccgccgcgtaaccgctttccgtcagcaaagggccgcgcctggggcgcggccctttccttgcgtattttaccggactccgccagagctttgaacgatccattcccttcatacggccgtcttgtccaatttttctctggcccctttgagcaatctgtgatataatccgctccgtatgatgattttcgcataaaaaggagtacgacatgattacagtttccgacctgggcctggcctacagcggccagcccctcttttcccacgtggatctccagttcaccaagggcaactgctacggcatcatcggcgccaacggcgcgggtaaatccaccttcctgaaaatcctctccggcgagctggagcccacctccggcgaggtctccatcctgcccaagacccgcatgtcggtgctcaagcaggatcagaacgcctacaacgcctacaacgtcatggacaccgtcatcatgggcaaccagcgcctctacgacatcggcaaggagaaggaggccctctatgccaaggaggagatgaccgaggccgacggcatccgcgcctgcgagctggaggaggagtacgccgagctgggcggctgggaggccgagagcgacgccagccgcatcctccagggcctgggcgtgggcaccgagttccattccaacgacatggccaccctggacgcccggctgaaggtgaaggtgctgctggcccaggccctgttcggcagcccggacatcctgctgctggacgagcccaccaacaacctggatatcaacgcggtgaactggctggaggacttcctgctggactttgagggcacggtgattgtggtcagccacgaccgccacttcctcaacaccatctgcacccacatcgtggacatcgactacaacaagatcaagatgtacgtgggcaactacgacttctggtacgacgcctcccagctgatgcagaacctgatgaagaaccagaacaagaagaacgaggagaaggcccaggagctcaaggagttcatctcccgcttctccgccaacaagtccaagagcaagcaggccaccgcccggcgcaagctgctggagaagatcaccctggaggagatccccgcctcctcccgccgctacccctgggtggccttctctcccgaccgggaggtgggcaaggacatcctcttcgtcaccgacgtcagcaagaccatcgacggggtgaaggtgctggacaaggtgagcttcatcgtgggccacggggacaagatcgccttcgtgggcgacaacgagaacgcccagaccgccctgttccagatcctcaccggcgagctcgagcccgacgagggcaccgtcaagtggggccagaccgccaccttctcctactttcccaaggacaacaccaagttcttcaaggactgcgacgacaatctggtggagtggctgcgccagtggtcctccgacccccacgaggcctatctgcggggctttttgggccggatgctcttctccggcgacgaggtttacaagcccgtcaaggtgctctccggcggcgagaaggtgcggtgcatgctctcccggatgatgctctccggcgccaacgtgctgctgctggaccagcccaccaaccacctggatctggagtccatcgccgccctgaacaacggcctggaggccgtcaagtgcaacgtgctcttcgcctctcacgaccaccagctggtgcagaccgtggccaaccgggtgttcgacttcacctccgacggcaagctcattgaccgcaagatgacctacgacgagtacctggagagccagaaggccgactgagccccacgggccatgccgtggcaagaccataatatctgcgcaaaccgcaagcgataattgccaaaatgcaacccgcttgcggtttcttttttcgttggactgctttatcatgtgaggtgaacagatatggaattgaaggaaacgctgcccgccctgcgcaggaaaaaggggctgtcccagcaggagttggccgaggccctgggtgtctcccgccaggcggtgtcccgctgggaggtggggacagacatccccaccatgaagaatctgctggccctgagcaggctgtttgacgtgccggtgcatgagttggtgggcggagcccagcccgcggattctctggaagcggaaacgacgtcacacaaaaaggtgacaaagccggctcgctaccaactcctgaccaaagtgctgggtggtgctctggccgccgtggttgcggccggactgctggccgccctgtaccagaaccagcttaggcccgcccccacggaccccgcagagcggactattgtggatattgaggatttggacggagaaaggattgagcccgatgcagtaacttggcacacaacatcggaaggaggaaattagctgtgaaaaaagtaattgtttccatagcgacagcctgtgtactctttataagttgcggagatatacctccggccatggccgcagaaagtagtgccctatgtttatcgtctaccgaatgaatatggcacaaatattttagaaaaatccgaaattgagcacgatgtgcctgctaagataattactcaaaacggttgcataacaattgatatgatattagatggcaaccctatagtaatttctgcaaggttggagggaagaaatcttagtgataatctcctttactatgatgctgaatgtataagcgatgggaatatagatgtaatgtcttttacatataacaaagattttacacctaaagcagcgatcacttctgactataataagcagtatccagcagcaaaagatgtactaaaggtttatctaaaagtaaatacttcaactataagagaatactattttattgaattctttgattttctattagaggattttgactctattataagcaatgccccctactgtgacatagactactggagtatgcgtgaatttaaaccaatcaatagtggtattatagaaaaagatatcataacaaggggcactggagtagttggaagttacattatttatgactactatgatattttgaatgttgaatacatggcaaaaatggatgtcgaagtctatgacagcacaggaaatatccccctaaatggggaactttcatggtcacatagactatctataacagataaatcaaccgtttgtccttccgtaagtgattatgagtctgacgattgctatctattaattgactctgcaaccctaaaagttggtgcccctaagggcaccgcatatgtgagttcaactgtggatggatccgttactgaagataatggagcagaaaaatatacttctgtgtcaattggtactggggttggtcctttgtccgtttcgtttgatttaagtggggtattccagcataaaggaagtgtcgatttaaacgaaagctttacggggtataagaatatagctccaaataactatacaacagctattcaacttagttacggtgaagaggactgtctacagactgtaggggactattatgaaagtgtaagtctgcttcaggactatggccatagcacgacttcccccagtccagtatctagaatttgggaaatcactgtttcaaacacgttaatgaacgaggaccataaccgaactttttcaaaaagttttgatcgaggggtatctaaatgacacacaggacgtcaaaagcagtattgacgtttatatgtattttgctcatctttggaggtagcatatatattttaggaagaaatcataacaattctgtagaaaaaatacttgcagataatttagatcgtgaaattgaggtttttgaagaattcacatttgaaacaaacgaagcaagttcctatatcgctgtaggatttgaagacgaaaatggcgttataggatatggcatctttgagaatagagaacataaattctttctgttaagtctaaagcagtgcaataaaatggcgaaagtgggttcacaaatctataccgattatttttttgatagaaacgctggaagatatactatctttttgatcaatcattctttggtaagtaaacttgtatggagctatggcaacaacagcggtgaaataaatgtgaatgagttaccttccatatatgtattagaaggcccagagccaggggtggcaacacttcaatataaatttgttgatgaggctggagaagaagttcactgatccataagagtgctaatgttgttattccagattaagacgaacagggtttttaagaccccctcgccaaatacactgttctcagtcaagatgtagtgaaaatgtaaggttttgtggccagcagcccatagctgttggccactttttgtcaaagtatatggtttgggaatattaacatactgatttggcacttacagtcgttctgcgctttgacactttgcatgtgggcctgcctctccgccgctctccccccttctccagagcaccagcccggccagatcggccagtacccagccgatgggcacggcccaccagatgcccttcaggcccacggcggggatgggggccagcaggtaggccagggccacccgcgtccccagggagaccacggtgagcaccaccgacacgccgggccgccccaggccgcggaacaggccgtagagcagaaacaggatgccgatgccgcagtagcacatgccctcaatgcgcaggtactccacccccacggcgataatctccgtctcgccgggctccacaaacaggcccatgaggggggcggcgaagaggcacaccagcagggagctgaccaggcagaagcccacggacacccacagggcggagcggatcccctttcggatgcgctccgccttctgcgcgccggtgttctgggccacgaaggtggagaaggcgttgcccaagtcctggacgggcaggtaggcgaaggcgtcgatcttgacggcggcggcaaaggcggccatcacgttcaccccgaaggagttcaccagcccctgcaccatcaggatgccgaagttcatcaccgactgctgcacgcaggtgagcagggagtagttcatgatgcgccccagctccccccgggacaccttacagtgccgccgctccagccggagcaggggcacccgccgccagccgtagagggcgataccggcggcggacaccccctgggcgagcaccgtggcccccgcggccccggccaccccccagcccagtcccaggacaaaccagagatccagcccgatgttgaggacggtggacacggccagaaaggccatcggggccacggagttgcccaccgagcgcagcaggcaggcgaagtagttatagaggaaggtgaagcagacgcccagcagcaccacccgcaggtaggcccgggtctcctcccaggccccggcgggaatgcgcagcagggtcatcaccggctccagcagggccagcacccccacgttgagcagcaccgccacggcgccgatgaacacaaaggaggcgaagaggcagcgcttgagctcctcctcccggcccgcgccgtagagcatggaccacagggcgccgctgcccatgcacaggcccagcagcaccgaggtgaggaaggtcatcagggtaaaggagaagcccaccgacgccagggccgacgcccccagcgcccggcccacaatgagggtgtcggcgatgttgtagcactgctggagcagattgcccgcgatcatgggaccggcgaacagcagcatagggcgggtgattccaccccgggtcaaatccatctgcattggctcacgcactttcgttttgaatgttttatctttcttttcgtaagaatcatagcaaatccagaggaaaaatacaaggctatacttgccttttttcttcagccgggataagataacaaacacagcttgacagatagagggggcggaggcgttgtttttaagtggtctggacgacatcgaccggcggctggtggagctgctcatccacaacgcccgtatgtcctactcagatctgggccaggcggttgggctgtcccgtgtggcggtgaaggcccgcgtccgcgccctggaggagcggggcgtgatcgaggagtacaccaccattgtcaatccccagaagatcagcggtgctgtgtcctgctactttgagcttgaggtagagcccgcccaattcagcgcggtggtgaataccctgcgcgccagcgataccgtgacccagatctaccaggtgtccggccgcaacaagctccacgtccacgccgtggcggctggccagtgggaactggaggactttctggaccgggtcatccaccgtctgcccggcgttgccagcctgagctgcaacatcatcctctcccgcatcaaggacatcaagggcctgcgcctgtaagaaaaatcgtgcactttccgccaaagtgtgctatactatggatttgaactcatttcatccggaaagggtggttttcatgcgaaaagaaattctgctgcccgccgtggcggtggctggcggcggggccggctttgtcctgcgccgctgggagctggccacggcctttgaggcggacaccggcttacccattcccggcgccccggccactctcgccctcatcgccctttcggttgccatggcggcggttctggccctgctctgccggggcaaatacccctccttcaccggctacgacgaggcctttcaggccaagggaaacaccctgtacgccaccgctatggtgctctccgccttcctgctcttgggggcggcggtgctgatggtgctctcctttgtccaggggaccaacaccgtctacacccgcctgctgctggccgccctggcggcggtctccttcttctgcgtaatgcagacggcgcagaacagctttaagggcctggacaggggcaagtacagcttcaccctgctgatgcccgcctacacctgctgcgtgtggctgatcgccgcctaccaggtgcgggccggagatccggtgcagttggactatgtgtatgagcttttcgccatcatcgcctccctgctgggactctacttccacgccggcttctcctttgagcggggccgggtgttctgggctgggctgttctccctgctggggatctacttctgcctgaccaccctggccgaccagcacgatctggccacgacgctgctctatggcttcgccatcctctatttgctctcgtccacggtgacgcttctgtacaatgccggccggccggagctcctggcccgggccgaaaacgatacgacggagggaacgcccgatgaatcctgagaaattctatatcaccaccccgatctactacccctcggacaagctgcacatcggccacacctactgcaccgtggccaccgacgccatggcccgctataagcgcctgcggggctgtgaggtcatgttcctcaccggcaccgacgagcacggccagaaaatcgaggacaaggccaaggaggccggcgtatcccccaaggagtttgtcgaccacatcgtggagggcccccggggcgtgctcgacctgtggaggctgatgaatatctccaacgaccggttcatccgcaccaccgacgattaccacgtggagtccgtgcagaagatcttcaagcagctctatgagcagggggacatctacaagggcaaatacgtgggcaagtattgcaagccctgcgaatccttctggacggagacccagctcaaggacggcaagtgccccgactgcggccgggacgtggtggatgccgaggaggaggcctacttcttccgcctgtccaagtacgccgaccgcatccggcatctgctggaggacaccgacttcctggagccccgcagccgggtcaatgagatggtgaacaacttcatcaagcccggcctggaggatctgtgcgtctcccgcacctccttctcctggggcgtgccggtggacttcgaccccggccacgtggtgtatgtgtggatcgacgccctgtccaactacatcaacgccctgggctacggcaacgaccgctaccacgactttgagaagttctggcccgccgacgtgcactttgtgggcaaggagatcgtgcgcttccactccatcatctggcccgccatcctcatggccctgggcctgcccctgcccaagaaggtgtacggccacggctggctgctgctggacggcggcaagatgagcaagtccaagggcaatgtggtggacccctatctgctagccgagcgctacggggtggacgccctgcgctacttcctgctgcgggagttccccttcggcaccgacggcaacttctccaacgaggccctcatcggccgcatcaacaccgacctggccaacgacctgggcaacctggtcagccgcaccaccgccatggtgggtaagtacttcggcgagcgcctgccggaggactgcggcgccaccgaggacgaggcggagctggcgggcatgctggcccaggcccagggtgaggtgaacctctccatggacttcccggaggacgacccccggaagtacgacgtggagctcatcgccctggccgccggcctgcggggccgctacgaggcgcagatggagcactacgccttccaggacgccctggtggaggtgttcaagctcatcggccgggccaacaagtatatcgacgagaacaagccctgggcactggccaaggacgaggcccagaagccccgcctggcccacgtgctctacaatctgctggagtgcgtgcgcctttccgccgtactgctcaccccctttatgcccgagacctgcgggaagatcttcgcccagctcggcgtggacgagggcgcgcgcacctgggagtccgccggagcgtggggcctgctccccgccggcgcggcggtgagcaagggggagaacctgttcccccgcatcgacgtggagaaggagctggccgccctggacgagctacaggccgaggcccgcagggccgccctccccgccgtggaggtggagcccttcgcccaggagagcgtggacttcgacaccttctgcaagagcgatttccgggccgtgaaggtcaaggcgtgtgagagcgtgaaaaagagcgccaagctcctcaggttcatcctggacgacggttccgggactgaccgccagatcctctccggcatcgccatgtactacaagccggaggaactggtgggcaagaccctggtagccattatcaaccttcccccccgcaagatgatggggcaggagagctgcggcatgctgctctccgccgtccacaccgagcacggggaggagaagctccacctggttatggtggacgacgctatccccgccggcgccaagctgtgctgagcgcatcctgtataaacagagggggcgcgcctgcgtttgcaggcgcgccccttgctgttctctatcccctgtcccggcgcagcaggcgccggaagctcaggtcgatggccagggcccccaagggggcagtgaccaagatagcgactaccgccacggtgagcaccacctgcccacaggccaggcccatggccagagggacaccgccgatggcggcctgcactgtagctttgggcagataggccagcacggcaaacagccgctcccgtccgctcaggcggctccccgccacgcagaggagcacccccacggcccggaaacacagcacccccagcaccgtggccacggcggccagccctgccgccgcggcgtagccgatgtccacctcggcccccaccaggacaaaaagcatcacctcggccgccacccacagcttaccgaacttggcagtgagccgctccgccgccggcctccgccaacggcgcaggcccaggcccgtccccagaacagccagcagcccggagaaggggaccaccccctccgccgcgtcctccagggcaaccagcaggaaagccagcgccagcagcaccaccaccttggccgagtcccgcaggtggaagcgggtgaagcatttagccaggacgtatcccagccccaggcccgccgccccacccagcacaatggataccggcacccccgccagggccgcaggggaaaagctgcctccctgagccatgccggtaaaggaggtaaagaggacgatgacgaacacatcgtccaccgaggccccggcgagaatcatctgggggatgcccttgtctgcgccatagccctcctccatcagcctgagcatccggggaacgatgaccgcgggggacaccgcccccaccactgcgcccataatggcggcgtccaacacgtccacccccagcagccggggagccagcagcaccatgcccagcacctcaaaggaagcgggcacgaagcacagcagcacggcgggccgcccggcccggcgcagatcctccagctccagggacaggcccgcccgggtgaggatgatcaccagggcgagctgccgcaggtctgcggaaatacctaacagggatgggctgagcaggttaagtacgcagggccccagcagaatccccgccagcagcatccccaccagggacggcaggcggagcctgcgggctagggcccccagggccatgcccagcagcagcacataggcgagactggttaacataacaaatcattcctctccagagggcagaaaaaaagccaatgccccctgcaatctcttgcagaagtcatcagccaagcggcggttcgggccagcgccccgggagaacctcattcccgtgttccggctgctatcctaccatacatcccttcccctgtcaagaccgcctttttcgatatccttagagattccttagaattacctgctatcctgtggacagaccacaaaaaggagctgtccgcaatggaaacacatcatatcacccccgcccgggggttgtccgagacggggctgaaatggatcgccctggtcaccatggttctcgaccacatccactatttcttcggcttcaccgggtgcatccccgagtggttcagcatggcggggcggctgggcgcgcccctgttcctgttctgtctggtggagggcttcacccacacccacagccggaagcggtacttcgcaagggtctacgtcctctccaccgccatgtccaccctgctgctgcttatggccttcggcggactgctggtgcggcctgacgggttctaccccaccaacggcatgatgaccacctttgtcattctcatggtgatattccagggcatcgactggctggggcagaggcgcatggtccggggcctggcggcgctcctcctccccctggcctggccctttctggccaccgggctgctggctgcgctccccgccctggcctccccgctgggcatcgcctgctacaccgtcctccccatctggggcgtcaccggagacagcagttggccggtgctggccatggggctggtgctctacctgttccgccggaaccggagggggcaggtactggccttcgccgtgttctatttcctctacggggtggtgtatatgggcctcatggcctcccagatgcccgactttgcgtggacgcagctcttcacccggtactacgagatctacggcatcctggccgcgcccctcatgctgtgctataatgggcagcggggcgggggccacaagcggctgttctacgccttctatcccgcccacatctacatcctctacgccctgtcgtgggggctctatcttctgctgaactgaggtggtatccatggcccatattctggtggtggacgacgacggggatctccgcgccctgctgaaaaccgccctggagcgggacggacaccaggtctccctcctcgaccgcggcggggcggtgagcgaggcccactgccgctgggcggactgcatcctcctggacgtgatgatgccggaggaggacggctttgccacctgccgccgcatccgcgccctggccgcctgccccattctcttcctcaccgccaagaccgaggaggccgacgtgctcaccggcctggggctgggcggggacgactacctgtccaagcccttccgcatcgcggagctgcgggcccgggtggccgcccacctgcggcgggagtcccgggcgccccgcagccgcatccgccgcggcgggctggacttcgatctggaggagcgggccgtctactgcggggaggaaccgctgcgcctgacccgaggcgagtacgccatctgcgcccatctggccgcccaccccgcccagaccttcaccaaggagcagatctacgaggcggtattcggctttgacggcacggcagactcctccgccattacggagcacatcaagaacatccgcgccaagctgcgggccgtgggtctctcccccatccagaccgtgtggggggtgggctacaaatgggaaagcgcatgaggcggcggacggggctcaccgccctgttctggcgctacctgctcgtcaccggcggggcggtggtgctgctggccgtcctctggtggggcggcctgtccgccctgctccgcagcggctttgtcctcccggcgggcaccgccgccgggcaggcggacgggctggtccgcgccctggaggccggggagctgaccccggcggagctgccccactactaccgctgggccgcctttgacagctccgcccaggtggtggggcagcgcggcatggacgggtggcacctgggctatgcccgggccgcgctggagggcgaccgcaccctccacggcttcccctaccagcagtaccaccgctccgcccagctccccgacggcacggtgtgcctgctccagttcgactactccatgccctacggctcccccgcgctccagggaagactcccggagttccagacctgcgccacggcggtgctgctggcggcctggctggccgctggggccctctccacccggcacttcgccggcctgctccggcgggacgccgccctcctcaccgccgccaccggagccatcgccgcccggcggctggacctccccctggacggctgggcccgggtgcgggagctgggggagagcctggccgccatggagcagctccggcaggccctggcccggtctctgtccgagcagtgggccatggagcaggagcgcacccaggcgctggccgccctggcccacgacctcaagacccccctgtccatcgtcagcggcagcgcggagctgctggaggaggacgccctctcccccgcccagcgggagcgcgtggacgccattctccgcagcgccggacgcatccgggactatatggagcagctccgcgccctcaccgccgccgggggcccggcggaggtgggcggacgggcgacggcggagctgtccgcgctggcggagggctgggcggccgccgggcgcggcctgtgcgcccccagagggctgcgcttttctctggactgccccgcctcccgcccctgtaccctgttccggtcggagttggaccgggcggtgctcaacctgctggacaacgccgcccgcttcaccccgccggggggcgcggtgcgcctgtcggcgtatgtggaggaggccgtactcaccgtggccgtggaggactccggccccggcttctcccccgaggccctggcccgggcggggcggggcttttacaccggcgacgctagccggccccgggagggccacatgggcatgggtctcaccttcgcccaccagaccgcccgccgccacggcgggacgctggagctgtccaacaccggccggggggcccgggcggccctcaccctgcccctctgaagaaggcggcgcggttttccgcgccgccttcttgtatttttgcccgttccgcgctatcatagagggagaacccatcccaacactgtgaggtctgccctatgatttttgacacccacgcccactactacgacgaggccttcgacgccgaccgggacgcgctgctcgcctccctgcccggccggggggtggccctggtggtctgccccggctgcgatccggagtcctcccgccagtccatcgccctggcggagcggtacggctttctctacgccgccgccggataccacccggagaatctggagggggcggccctctccgacctggacgccgtcagggccctgtgcgcccacccgaaggtggtggcggtgggggagatcggcctggactactactggctcaagacgccggaggagcgggccaactcccgggactttttcgacgcccagctctccctggcggaggaactcaacctccccgccatcgtccacgaccgggacgcccaccgggactgcctggacatcgtccgcgcccaccccggcgtccgtggggtgttccactgctactccggcagcctggaggacgccaaggtgctggtggacaagggctggatgctctccttcaccggcaatatcaccttcaaaaacgcccgccgggcccccgacatcctccgctggctgcccctggaccggctgatgctggagaccgacgccccctacatggcccccgagccgtaccggggccagcggtgcgactccaccatgatcgcccgctccgccgagacggtggcccagcttcggggcctcacccgggacgaggtggaggccgtcaccctggagaacggcaagaaattcttcggcatcgcctgagcggcggacggcccccggccggccgcccgtcctggatctgaattgataagggaggtaatccactatgatgaccatttcctatgagtatgagggcgcgctctacgtgaacctcaccaacaggtgcgactgcgcctgcatattctgcctgcgccacaacggccacaagggctccatctacgccgacgacctgtggctggagcacgagcccacccggcaggaggccctggacaacctgctggcccgggacttctcccagtaccgggagctggtgttctgcggcttcggggagcctatgtaccgcaccgacgacatcgtgtggttggtggacgagctgaaaaagcgggtgcccaacctgcccccggtgcgcatcaacaccaacggccacgccaacctgttcctgggccgggacgtggcccccctgctccaggggcgcattgacaccatctccatctccctcaacggctccacgccggaggagtactgcgccgtcaccaagccccgccagggcgtgcaggcgtgggacgccatgctggactttgcccgggagtgccgggagtacgtgccccacgtggtcatgaccatcgtggacaaggacaagacgccggaggagatcgcccgctgccgcaggctgaccgaggacttgggcgttacccttcgtatccgggcctatatcccggactgaaacagctctctcatatgggcaggcgcgcccggcatagccgggcgcgcctgttgttttgtctctatgcggcggagtcctgctccagctcctccagcgcctcccactcggagtcggcggagaaccggaagcggcccatctggtcgtaaacctccacatgcccacgtacatagcgaatctcgtaattcattggtcagcgctcctttctgtctcgttgtgagtacagtataggaaatgcactgtccaataaacaggactatttcttcaagtccgcctgaaactgctcccacgcctcggggcgctccacaaaggccttggggcagagcttccccgtcacatcatagtggcggatcacctggctggtgtcgaggccgtactcctccatgagccagcgggtgagacgcaccagggactcataggtggcagaggtgaattccccactgtcgtccgggtggcagcactcgatggagatcgtgtcgtcgttgcgctggttggaacagtaggccacctcgttgagcgggacgttctggagcacctctccgtccagccccaccaggaagtggctggaggcgtaggtctcccccgtctgggccaggttggtgaaaaagctgtggttctgcgccgccgtggtgcccgggttgcccacgtagtggatgacgatgccgttgacctcctccagaggcgtgccgggccgggagaactcgttgagggggagcagctccaccgtgatccagtccggcgtctccggcagggggcgctccccgggggcgaaggggtcgatccacttgatgaccagcagcaccgccaccagggccagcagacacggaatcagccggggccggtgcctcacccgccaccggcggcgtaccggagtctctacgggcatgcttccccctcctttccacaaatttatctctattatagcagggttttgccccgccgtcttttacggttttcttacgttttgcctccgcccccgcgggatctgcccggtcggccggacaaaaagccccccggccggcgccggggggctggtttatggttcgcggagggcctggtcgaaggccgccttgacctcgggcagaaagcagacaaaggtgacggtctccaatgtgttatcctgcgccgcaaaatcacgcactgtattcaccgcgatggcggccgcctccgccagcgggtagccgtacaccccggcggagatggcgggaaaggccaccgtccggcagctgtgctccacggccagggtcaggctgctccggtagcaggaggccaggagctccgcctctccgtggccgccccccttccagatggggccgggggtgtgaatcacgtattttgcgggcaatttataaccctttgtaatcttagcctgcccggtctcacagccgtggagggtacggcactcggccaatagctccgggccggccgcccggtggatggctccgtccacaccgccgccccccagcagggtgcggttggcggcgttgacgatggcatcggcctcaatccgggtgatgtcgcccagcacgcactcaatccacgccatgctcctcctcctcgcgggcgtcctgctccgcctcggcctccacagcctgataggccgccgggggctggagcgccgccgggtcggtaaagacctgctcgaaggtcttggcgtccatgttctcgtaccggagcaaatactccgccacgatgtccagctccctccggcgatgggtgaggatctccccgcagcgggcgtaggccccgtccaccagggccttcacctcctcatcgatgagggcagccacctcctcggagtagttcttggtctgggccatggagcggccgatgaatacctcgtcgtggccggagtcgaagaccacattgcccaccttctcgctcatgccgtagcgggtgaccatgttgcgggcgatggcgctggccttttgcaggtcgttgcccgcgccggtggagatgtcccccaaagccaactgctcggcggcccggccgcccaggcagacggcgatgcgctcggtgagctgctgcctggtctggaaggtcacgtcctcctggggcagggagatggtcatgccgccggccatgccccgggggatgatggtgatctcatgcaccgggtcctgggtgggcaggtcgtggatgacaatggcgtggcccgcctcgtggtaggcggtgagcttccgctcccgctcgatgaccacccggctcttcttctccggcccggcgatcaccttgatcaccgcctcgttgagctcggccatgctgatgaagcggtggtgtctgcgggcggccaggagggcggcctcgttcatcaggttctccagatcggcgccggtgaaaccgccggtgcccttggccagctccgccagggacacgtcgtcccccaggggcttgttgcgggcatggaccttcaggatggcctcccggcccttgatgtcggggtgtcccacgtatacctgccggtcgaagcggccggggcgcaggagggcggggtccaggatgtcctgccggttggtggccgccatgaccaccacgccctcattgttgccgaagccgtccatctccaccaggagctggttgagggtctgctcccgctcgtcgtggccgccgcccaggccggcgccgcgctggcggcccacggcgtcgatctcgtcgataaagacgatggcgggggcgttcttcttggcctggtcaaacaggtcgcggacgcgggaggcgcccacgcccacgtagagctccacaaagtcggagccggagatggagaggaagtgaacccccgcctcgccggccacggccttggccagcagggtcttgccggtgcccggcgggcctaccagcagcacgcccttggggatgcgggcccccagctccagaaaccgcttggggtcccggaggaactccacaatctcctggagctcccccttctcctcctcggcgccggccacgtcctcaaaggtgaccttcttctgctcgtcggcgccggtgcgggtgcgggcgcggccgaagcgggcggtgcgatccacaccgccgccgcctcctccgcccccgccggccccggcctggcgcaggaacatgaagtaccacagcaggccgaacaccaccaggatgacgatccacgggataaagctcatccagtagggaggcacccaaccctggggatagtcgtagtcggtgatgatcccctgccgcttctgttccacaatgaggtcgttaaagtcctggtagaaccagtccgggttgccgatctgataggtgagcacactctggccgccctggggctccttcaggtacagggtcacggtattgtcctccagggagacccggctcaccatctgctgctccagcagctggcgcacctgggcataggtgaccttctcctgattccccatcccgccccggagggcgaagatggtcatcagcagaaccacggcgatgagcaggtaaaagcccacatcgcgcaggcttccgtttcgtttcaaactgcggacacgtcctttccgggcagattgggcgcctcaggcgcccgttattcctctcctccgtacacacagggcttaagaatgcctatgtagggcaggttgcggtatttttccgcatagtccagcccgtagcccaccacaaagtagtcggggatggtaaagccggagtagtgcagctccacctccttggtgcggcgggagggcttatccagcagggtgcacagccgcacggaggcggggctgcgggcctggaggagctggagcagatagctcagggtgttgccgctgtccagaatgtcctccaccacgatcacgtcgcggccctcgatgtgctcgctgagatccttgatgatcctgacctgcccggagctggccgtgcccgccccataggaggacaccgccatgaagtccacggtgcagggcaggtggatctggcgcaccaggtccgccataaacacgaaggagccccgcaatacgctgaccagcaggggctccctccctgcgtagtcccggtcgatctcggcggcgatctccgccacccgccggtgcagctcctcctcggaaaagagcacccgctccacgtccttgtccagcatgtgttccatacctctccctcactctttcttccagaataacagctcataggccgcctgtccagggacggccgtccggctctgctcaggcccgaagcccgccaccgcggccacgccccggccgtcggccagaaccggaatccgctcccgctcccggcggggcaccttttcgtcaataaacagcttttttagcgtcttggttccaccccgcccgggcagggtaaccgcgtctcccgtctgccgggggcggagcaccaggggaccctccagcgccccctgggccagatacagggccccgggcttccgctcgctctcgtccgggcagcgtaccgggcggcagcgcacccgccagggcgtgccctccacctcggtctcaccgtccagggccagaggcgtgggcagaaaggggggcagggggtcggactgggtggtgagcagcagctccctgtatacccgctgagccagccgtccgccgggcaggaacaccacggcggaggggtcgtctccccgggccagctccaccaccgccttgaggtgggcggcggagcagttggtgctgccgtcccccatcatctccagcaggcggcgcaccgcacggggggcgatagccgccgggagctgggcgatgtacctggcctcgatcaccaggtcgtcctccgcccaccgggcgttctgacaggccgcggcggcctgggcgttcagatagtcgttgtcggtgcgcaggtagcccatggtctccgccgcgctctcagtgaggcggggattgagctgacgcagcaccggcaccacctggcggcggatgcggttgcgggcgtagccctcgtcggtgttgctgctgtcctccacgtgggccacgccgttggcctccaggtaggccacaatctccgcccgggaggtggtgagcagggggcgcaccaccactccccgccggggcgggatacccgccaggccatgaagccccgccccccgcaccaagtggagcagcagggtttccaggttgtcgtcggcgctgtgggcggtggcgatgcgtccacagcccatggcgtccgccgccccccgcaggaattcatagcgcatctggcgggcggtctcctccacccccaggccccgggccctggcctcatgggccacgtcgcccgcgccaatgacgcaggggatgtcctgcccggcgcaccactccgccacaaaggcggcgtcccggtcggattcggccccgcgcaggttgtggttgtagtgggcggccgccacccggaagcccccctctccggcccaggtgtggagcaggtgaagcaggcacatggaatccgcaccgccggacacggcgcacagcaccgtgcccccccgggggagcatgtcgtattcggttgtcagggctttgatggtttccagcataaagtctcctttgcggcgggcggatgtgggcatccgcccctacgtagggggcgatgcctacatcgccccattccgcgtcaatattcgatgtgcctccggtcgatggacgagaaggtggtgtactcgggcagccactggagctccacggtgcgggtctcgccgtggcggttcttggcgatgatgcactcggccaggttgtggttctcgtcgctgtcgttgtagtagtcgtcccggtagaggaacatgacgatgtcggcgtcctgctcgatggcgcccgactcacgcaggtcggagagcatgggccgcttgtcggagcggctctccgggccgcgggagagctgggacaggcacaccaccggcacgttcagctccttggccatgatcttcagggcgcgggagatgtcggagacgatctgctggcggttgtcgccgctgcgggtgggcccgccggcggaggtcatgagctggaggtagtctatgaccaccagccccagattatccacccggcggcacttggcgttcatatcggccacggagagggaggggttgtcgtcgattaaaatctgcgtctggttgagggccgccgaggcggcggcgatcttggtccagtcctcctcccccagcttgcctgtgaccagctttttgttgtccacaaagctctcgccggagatgaggcgcatggccagctgctcccggctcatctccagggagaagaagaccaccgtcttgccggagaacttgcccgcgtggaggagcatgttcagggcgaaggaggtcttgcccatgccggggcgggcggccaggaggaccagatcggacttgttcagccccgagatggccatatccacgtcgggcaggccggtggacaggccgggtaccgccgagtcgctggcggccagctcgttgagccgctcgtacacattgaggatgacgctggagatgtgggccagaccctgggcggaccggccctggcggatggcgtagatgcgctgctccgccgcctccagcacctcctgggcggtgccggtgccctcctgcaccatggcagtcagctctcccgccgtctcggcgatgcgccgcagcagggccttgtccttgacgatggccacgtactccttcacgttggccgccgtgggggtgatctccatgagctggaggacgtaattgcgggaggtgttctcgtcatacaccccgttctgcttcatgtgctccagcaccgtcaccgggtcgatggtgagggagaagttgaacatggagtagatggtctcatagatctcccggttggtgcgcagatagaagtcctccggccggagggcctcgatcacctcgggcacgcagcgggcgtcaatgagcatggagccgagcacggactgttcggcctcggtgctgtggggcatctgccgggtcaaaagctcctcttcacttggcatgttcctcacctccgggagcgtaaaatgcgggcgggataaaacacaaacgccgcaggggcgacccctgtgagcgcccgcgggcggccataaaggccgcccctacccagggcagaccggctgagcgtatacagggacggcctctttgccctcccgttcccggttcaggcctcggccacgaccaccttgagggtgccggtgacctcgtaccccagcttgaccttcagctcatagccgccgaaggccttgatgggctcgtcctggacgatcttggtcttagggatggcgatgccgtgctgggcctggagggcgtcggcgatctccttgctggtcactgcgccgaacagccgcccgccgttgccgcccttggccactaccttcacggtcagctccttgagcttggcggcggtggcctctgcctccgccttctcggcggcctcctgggcctttttggccttctcctgcatcttcatggtattgacgttctccgccgtggcgggcaccgccagcttccggggcaggagaaaattgcgggcgtagccgtcgcttgcctcgatcatctggcccttcttgccctggcccttcacgtcctgctgcaaaatcactttcatcgggataacttcctttccaaatctcaaaacttattcaatagggcacgtgaaattccgacacccgccagccgccagcggtgcgctccatacgaatgggccagcgctctgtgctgagcgggcgggcgcccgtctcatccggctgcatggtcagatcggcgtaatgccccaccaagtaaaactccacagcatcctcgctctggctcaccagctcataggtgtccggcacatcggcccagccatactccaggctgctgccccgctccagctccaggaagcatgtccggccctccccatcggcggtgaagatggggaatcgctccccgtccatattctccgcccacagcagctcctcctggtacgccggggtgaagatgccgtccagcatggcctggaagtcctcccaccgggcgtaccgcccctgggccaccagataggtccagccgctgtccagggtgaccgtctcatagtcccccagctccggcggatcgccgccgtccaggggatagctgtccacgccgctggtggagcagcccatgaggaagctggcggcgctgtacgcccgcaggaagagcgcctgctgctccgcgtccaggaaagcgggcgccggctggtccgccatccagtccgggatggggggctccgccggagctggggcctccgtcgaggccggagtgacctccgccgggggcgtgggggcctctgccgccggggcggtgcaggcacccagaaccagcgccaggccggccgccaacagcaccagcggtcgtttcacagttctcactcctcctccagatatgcgtcaatggcctggaggagcatatcgttgacctcgtccacgcctttgcccggcacctgggcgccggcggtggcggcgttgccgccgccgcccagcttctccagcaccacctgcacgttcacgtcccccatgctgcgggcggagaggatcacccgcccctcctggtcggggaagaggacgaaggaggtgtcgatgcccgagatgttgagcagctcgtcggcggcctgggcggcggtaatgcggcccacggtgtggtccaccttggctacggcaatgccctcatggtacattttggcgttctgaataatgtcgtacttggcgatggtgccctccaggtcgttctggaacagcttcttgacgtcgccggtgtccgcacccgagcggcggagaaaggcggcggcctcaaaggtgcggctgccggtacgcatggtaaactgcttggtgtccagtaccatcccggccagcagggcctccgcctcggtcttgagcaggtcggcgggctccagcaggtactggagcagctcggtgaccagctcgctggcggaggaggcgtagggctcgtggaaattgagggccgcgtcggcaatataggaggaggcccggcggtggtggtcgatcaccgccaccttgtgcactgcctccagcagatcctggctcaccacctgctcgggccggttggtgtccaccaccaccagcaggcagttggcgtcggccagcaggatggcatcctgctgggagaggaacacatccttgtactcgcccagcccccccagccgctcggacatctcgctggccgggttctgcccggcctccttgatgatgtgcaccggcgcgcccttcttccgggccatggcgcacacgccggcggcggcaccgatgcagtccatgtcggggtacttgtggcccatgacaaacacccgggaggcgtcggccatcagctcgcccagggcgttggccatgacccggctcttaaccttggtgcgcttctccagctccttggtgcggccgccgtagaactcgaagttgaacttgttcttgaccaccacctggtcgccgccccggctcagggccatctccaccgacagggccgcgtactggaacagctcggccaacgtctcggcgtccttgccgacgccgatggacagggtggcctggatgcccgaggggctgaccacctcccgcaccgtctccaggatggagaacttgccctcctgaaactgggccagaaaccgctcctcaaagacaaagaggtagcggtcccgctcgtaccggcagaacagcccctgagccggggccacccactgggccagccgctcgtcgatgccgctgcgcatggcggagcgggcggagtcggtggcccccttcatcagctcctcatagttgtccacggtgagaatccccaccaccggccgggtggaatagtagatgtcccgcacctgggcgaagtcggtgacgtccacccagtaggtggtggccaggtagccccgcccgccctgatcctcggtgcggaccaggtggccgaagaccaggaagcgccgctccccgaggcgcacctcggtggggcactcagtcttgccctccatgagccagcgggaggagaagtcgggcaccgccgcggtgattttggtgtcgaacaggtgctcccgctcgccagtgagctggagaaagcggtcgttggaccagatgacctcgtcgttctccggccggaagatcaccatgggcagcggggcgttgaccatggtatccttggtggccgtatccatgttgcaggtgacgctctcgatgtatttgatgatctccttctgcctctgggcgttgctgcgccggaagtagaggtagagcaccgccaccaccgccgcctcgatcaccgccactgccacgctgaacagcgccgacaccgcggcgaagaggagcaggaacacaaagtagagccgcaggctgggctccagcagatgggtcagcttgtttttccgcattgagacacctcccaagcaggtcgttcggtgcagaacacacataataagagatattattatatcaaagggccgccccaaaaacaagcccgcttgccctggttcttgccttgtgatagaatattccgggtattgtatcatgctttacattcttttttcccctgtactgccatacttttggaaaacaaatgaacgatcgaggaggcattcccatgaaggaatatcccgtgcagcgcgccgcggtgctcaagccgaagcccgatcccgacacgctggtcttcggcaagacctttaccgaccatatgtttatcatggactacaccgccggtcagggctggcacgacgggcgcatcgtgccctacggccccctcgccctggagccctccgccatggtgctccactatgcccaggaggtctttgagggcctgaaggcctaccgcggccccgacggcggggtgcagctcttccgccccatggagaacgtccggcgcatcaactcctcctgtgagcgcatgtgcatcccccccctgccggaggaggacgccctggccgccattgagcagctcgtgcgcctggaggccggctgggtgccctccaagccgggcacctccctgtatatccgtcccttcatcatcgccaccactccctccctgggcgtgcacgccgcccacgactacctgttctgcatcatcacctgcccggtgggcgcctattatgccgagggaatcaacccggtgaagatctatgtggagaacgaggacgtccgcgccgtcaagggcggcaccggctacaccaagtgcggcggcaactacgccgcctccatccgcgccggggagcgggcggagcagaacggctacgcccaggtgctctggctggacggcgttcaccggaagtatattgaggaagtgggctccatgaacgtcatgttccaggtgggcgataccgtgctcaccccggagctcaccggctcggttctgcccggcatcacccgcaagtcctgcctggagctgctgaagtcctgggggctgaaggtggaggagcggctgatcaccgcccaggaactctttgacgccggggccgacggcacgctgaaagaggcctggggcactggcaccgccgccgtcatctcccccatcggcgagatgggctgggaggaccagcacgtggtggtcaacggcggcaagatcggccccctggcccagcgcctgtatgacaccctcaccggcatccagtggggtacccggcccgatcccttcggctgggtggtcaagctctgattttgcgttttttccctttccatataatttccattctgaaacgccgtgcggggccgcctctcatgaggcggccccgcacggtttaacctccggttttcttttcccagccaaaacctgagcaccacgcccttgccctccactccgccgtctgctaggatagaaccgcaggggcggcccgcccgctctcgcgcagcaaggaggcgtctgtacgaacttaaatggaacgatccgccgcctgcggcgggcaaaggggctgacccaggagcaggtggcccaggccctgggggtaagcggcccggcggtaaacaagtgggagcgggggggttcacttagataaagataccacatcaatcccacgctgacttttgctcaaccgatacagccggagggctggataacaagaaaaggcggtatgcgccccgtggaggggtagcgtaccgccttttcttgtgggggtttccaaagggggcaacgcccccatttggcacacgactttgcgaagcaaagtgtagtgtgttatacgctctgtcggcgttgccgtgaaaatgccgttgccgccggggagggcaagggcatttgaagcggcaggaaaacag

SEQ ID NO: 4225 - DNA, 1498 bp, Unknown
  gut microbiota DNA sequence
agtactgccccgactgcgccgccagagttcacaggcggcagaaaacagaaagtgaacggaaaaggaggtctactgtggacagttaggggctgaaaagtccttgattttcaaggctttgcaagcacagaacaggggcaggcaatagaaactaccgtctgcccccggaaacaggcttctaaccgtccacaaaacacgatatggcaaacaccatttatatccatcagccggaaaaggcggtcagctttacccggcttcccaatttcctttttgaagcccccacattcacacccctgtccaacgaagcaaaggttctgtacgcctttatcctgcgccggacagacctatcccgaaaaaacggctgggcagatgaatacgggcggatttacctctactatcccattaacgaggtagtggagctgctccactgcgggcggcagaaagcggtcaataccctgcgggagctacaatatgccggactggtggaaatccagaagcagggctgtggaaaacccaaccgcatttatccaaaatcctatgaagcggtttcaaacaccgacttcaagaaatccggttatggaacgccggaggactgaaaaccgcactcatagagtacgataatcaatcctcttgaagtacgaaaaccggacggtatatagaaatacagagattaaaacgattttatttatatctattccattccaatcctatcagagatagtttcggcgggattttccctgtggaaaacccgctggaaaagaatggaacgaggaaaggagcagaatggcacaacacgcaatcttgcggtttgagaaacacaagggcaacccggcaaggccgctggaagcccatcacgaacggcaaaaggaacagtacgccagcaatcccgacattgacaccagccggagcaaatacaacttccacattgttaagccggagagcaggtactaccactttatacagaaccgtattgaacaagctggctgccgcacccgtaaggatagtacccggtttgtggatacgctgattaccgccagcccggagtttttcaagaagaagcccccaaaggagatacaggaatttttccatagggcggctgatttcttaatcgggcgggtaggccgggaaaatatcgtatcggcagtggtacacatggacgagaaaacaccccacctgcatttggtctttgtccctctgacagaggacaaccgcctgtgcgctaaggagattatcggcaacagagccaatctctcaaaatggcaggacgattttcacgcctatatggtggagaaatatcccgacttggagcgtggggaaagtgccagcaagacaggcaggaagcatatccccacccgtctgttcaagcaggcggtcaatctatccaaacaggcaagagccattgaagccacgctggacggcattaacccgctgaatgccggaaagaaaaaagaggaagccctctccatgctgaaaaagtggttcccacagatggggaatttct

SEQ ID NO: 4226 - DNA, 1482 bp, Unknown
  gut microbiota DNA sequence
catacccaggtactgcgccacgtcgcccagctcctcctcgatgcggagcagctgattgtacttggccacgcggtcggtgcggctgggagcgccggtcttaatctggccggcgttgacggccacggcgatgtcggcgatggtggcgtcctcggtctcgccggagcggtgggacacgatggcggtgtagccggcccggttggccatctggatggcgtccagagtctcggtcagagtgccgatctggttgaccttgatgaggatggcgttgcccaccttcttctcaatgccggtcttgagccgctcggtgttggtgacgaacaggtcgtcgcccaccagctggacgcggtcgccgatggccttggtgagcatggcccagccctcccagtcggtctcggccatgccgtcctccagggagacgatggggtaggtgtcggcaaacttcttccacatgttgaccagctgctgctgggtcagcttcttgccggacttgggctggatatagcacttctcctcctcgttccaccactcggaggaggcggcgtcgatggcgatcttgaagtcctcgccgggcttgtagccggcctcctcgatggccttgacgatgaccttcagggcgtcctcatccttcttcaggttgggggcgtagccgccctcgtcgcccacgccggcggcgggggtgccgttctccttcaggacgttcttcagggtgtggaacacctcggcgcacatgcgcagggcctcgcggaagcagcaggcgcccacaggcatgatcatgaactcctggatctccacgttgttggtggcgtgagcgccgccgttgagaatgttcatcatgggcacgggcagaatcttggcgttggcgccgccgatatagttgtacagggaggtgcccagggcctcggccgccgccttggcgcaggccagggaagcgcccagaatggcgttggcgcccagcttggtcttgttgggggtgccgtccagctcgatcagagccttgtcgatggcggtctgatccagcacattcatgcccaccaggcactcggcgatgtcggtgttcacgttcttcacggcggtgagcacgcccttgcccaggtaacggctcttgtcgccgtcgcggagctcgcaggcctcatagatgccggtggaggcgccggagggcacggcggcgcggccgacggtgccgtcctccaggtagacctccacctcaacggtgggattgccgcggctgtccaggatctcgcggcccagcacgtcaacgatctcaatgatctgcttcatgatgaaaactcctttcgtattggcggcgggagcctgctcccgcctacaggggtattttgtgtggggggcgggctccggcccgccggggctctatggtagggcgggggttcatccccgccggttaccgcttcgccgccattcccttaaacgggaaggtcagttgacaatcagcgtctccccatccatctcggcgggcttttccag

SEQ ID NO: 4227 - DNA, 87174 bp, Unknown
  gut microbiota DNA sequence
tgcgcatctcaccccacgggaggttccctcccgcgggggccccctttttccattctcttgaggcgaagtcaattcgcctcaaccaaggttttgcctccggcaaaacgcttgtgcgccgcggggcggcggggcgcttccgcgcccgtgggagatgcgagacacccggtcacaggctcaggctggcaataaactgtttcgccgttcgcggcgtccggcccgggttgcgcatctcccacttgaccgcctcggcacgaagactatcccggtccaaggcaatccccgcctgctccgccatcccctccaccagctccaggaactccgcctggttcagcgccaagtagggtatgcgcaggccgaagcggtcggacagggaggtcttctcctgaatggtctcactggcgtccacctcgtcccccgcccggtcagagaaggtctgccgcaccagccgccggcggttggaggtggcatagactgccacgttggcgggccgccgctctaagccgccctccaggatggtcttgagggcggagtaggtcttgtcgtcctgatcaaaggccagatcgtcgatgaacaggatgaatttcagccgccgcccgcccagggtacggatgagccggggcagatcagccagcccctccttctgcacttcgatgaggcgcagggcctcaaagccgggcagggtgagcaggttcttcaccgtggcggacttgccggtgccgctgtcgccatacaggagtacattgttcaccaggttgccctccagcatggccctggtattggcgatgacccggttccgctggagctcatagcccagcatctcgtccgcgccgggacagtcgggttgctccaccgggcagagcgccccatcttcccacaggaaagcccggtgccgggcaaagagccccgcgccgttggcccggtagaactccgtcagctccgcaaaagaaaacgggctgctcccccgccaccggggcaggttggccagcaccggcccatactcccgcggcgctttcccccctacctcagcgagcacctggtcccagtccagctccgccagcagggtgaacgtctcaatatcccgccgggcggccgcctccagggcggggtcctccccgccccgctccgccagagcggcatagggggattcccgatcccggagccggccgtccagccactcccccaggctccggctccccgcgctccgcagggcatagaacagccgggcgtagtcctccacggccccgctgccgtccccggcggacagcttatccagtacccccagcgccaggcgcatcactggctcatccacaacaggccggtaggccgctaccccccgcagggcgcagcgcagcatgtcggttgtcattttcctctcccctctcgcgtttgttctatctgtgtcggttttattgtaagcgcctcccctccggctgtcaatgtccgcgttttctttccaaatgaaaccactggctgcgccgcataggcaaaagaaacctgcggataataagggctgtaactacaaccgcaggaggagtttatagatgaaagcgactggtatcgtgcgccgtatcgacgatctcgggcgcgtggtcattcccaaggaaatccgcagaaccatgcgtatccgcgagggcgaccccctggagatctataccgacaaggacggcggcgtcatcttcaaaaagtattccctgatgggcggcctgggcgacttcgccggccagatgtgcgagactctgaacaagaccaccggcgagatcgccgtgatcaccgaccgggatgcctgcatcgccgtggcgggcctggcccgccgggagctgacggacaagcggatctcctctgagctggagcagattatggagggccgccagatttatcagtaccaggcaggcgacaaggcggtgcctgtaagcgacgacgggagcaagtatcttgtggcctgcgccgcccccattctatccgagggcgatgtactgggctgtgtgctctttgtgggcacggagggcgaattggccagcagtgaaaccgactataagctggcccagaccatcgccgggttcctgggccggcacatggaatcctgattccaatgatgatagggggcatccctgttcggatgccccctatcattccaaaaaggccgcatacaggaggcccctgccgctggcaggggcctcctgtgcgtattcacctaaccgcccagggtcatgccgccgccggagaggccgtccttctccagcatgcgctccagcacctgcacgtcggtggcgatatccatggcgtcgtcctggaagagcttgtcaagctgcttctcgaagccctccaccaccttgtccatcatgccctcgatgcgggccttagccgagcggatattctctccctccacgccctgctcctccatacgggcgtaggcccggaggattttgagggtcgtaggcagatagtagcttaaaaagctgcgcaactggcccgcccggttggggctctgcttctgataggcaaagatcttgccggtgatctctccgatgcggtcgatcttctggctcatgaccggatcgtcgatatcgtcgttgagtcggcggatttcccccagcaccgcgtcatcgtcgttcatgtccagcacgtcctcctccggctccggctcgtcgggctcgggggcagggggcgcctcttcctgaaggccctcgtcactgaggatcagacggccggtggacatatccagatagcccgtctctaaaataccgctgtccagcatatcctggagatcgtcacaggccttgtgcaccgacaccggcatggcctgggccagggtggtgatggagatgctctcccgcctgccgatgagggccaggtacttgcggaagcgcttggccttcttagtgcgctgggtacccgcccagatcatggccaggccgccgccgaagaagccgatcaccggggacatcaccgccagggcggagaggaagccgccgctcatggccaccgccgggaatccggtgagtgcgatgccgaagatcacggtcaacacaattccccatacggtcaggcccttgccccggtccaggttcaccggcctgccctgccgggggctgcggcccacatgctgccgccccaccggaggcgtctgccgctgggcgccgggcattccctgcgtgccggggacagggcctccctcccgctggatatcataagggtggcgggaggctctgcgcctggaacctccggtcagctttcggagcagcagaataaggccgatgggccagaccgggctgaccagcaatacgatggtaatgatccaggagagcaggtcccccgaatccggtcgattttcatttcgatagcttgccatgggcaccgccctcctgttactgccgcgtgttctgtctgttattctatcacagaagtgttaaagtttcgctggataagttctttaaaaaagatgaaagattagattgcgccccgctgaagcctctctatcatactgcgaaatccggggcatgtaaagcgctttccgccggaagtgctatgtaaccgttctgtaattgcttttcccgggacgaagtcctataatagtagtcgtattttacatcctctgtgatgttttggagttgatgaagatggaaaatcaggatggaaagagggtcgcaaggggaccgggcatgccccggggcggaaaaatcgccctggccgttgtcctcgttctggtcctggcactggcgggtggatatgtagggctttgcgcctatgcgggcagcagcgctttcctgcccaacacctccattgccggggtggacgtgagcggccagtcccgggaaggagccaccgccgccctggagggcgccctgcccggcctgctggcggacagccgggccgaattcacctgcgcgggccaaagctatgcggtgaacggtgacgatccctctgtctccgtggacgccgccgccgcagtggacgccgctctgaccgaccaggccggcagctttttcacccggggcgggcggtatctcgccgccgtgatgcatggcaaccgctactccgtccccgtgacactgaccggcacgccggacgcggtaacccgggcggtggaggagtgctccgacccggaggcccagaccacctgggaggtcaccgacaccgagctggtgctccacaagggggtcaccggccgcaccattgacgtagccgccctcaccgatgccctggccgagcggctgggccatctggtgtccaatgacgagccggcctcctatgcccccatcgaggcccaggtgaccaccgcgccccccgccgcccccgactttgacgccatccggtccgaggtcgccgccgaacctgccgatgcctacttagacaaggagacgcgtgagatcgtcccctcggtcaccggagtggacttcgacacggcccaggcccaggctgtgctggatgcggccggggagggagagacggtgtccgtccccctgcttctcaccgagccgaagctgaccaccgccaagctggaggccaatcttttcaaggatgtgctgggcagcggttccaccacctgcgccggcccctccaaccgctggtacaacatcgatctggcggccaagcggctcaacggcaccatcctgctccccggagagaccttctcctataacgacacggtgggcccctacaccctggccagcggctacaaggccgccggcacctaccagaacggccagagcgtggacgccaccgccggcggcatctgccagctctcgtccaacctctactgggttaccctcaaggccaatctggagattgtggagcgccacaagcaccagttcaacggcggctatatgcccgtcatcggcaccgacgccaccgtgtggagcgaccagttggacttccgcttccagaataacaccgattaccccatcaagattgagtcctatctggacaaaaaccacaagctccatgtgaccatctacggcaccgataccaccggcatccacggagagccctaccacgtggtcatttccaccgtgccctacaagaacacctaccagcccaaggacagcattcccgtgggcaccgagccccagcgggaccccaactactcccgctacaacggctatacggtggatctctatcagaagctggtggacaagaacggcaagaccatcagcaccaccctgctgtaccgcaacacctacaaggcgtccgacgcggtgtactactacaaccccgctgacgcggcccgctgggggattgacccctccaccggtctgaaaacccttacgccggtcacccccaccccatcgccgtcccccagcccctcccctgcgcccagtccgacgccaggcggcactccgtcgcccgtcccaaccgccacacctgtgcttcccctggagcccagtccaactgtcccccccagcccggagtccccgccggcatatacccctcctgtggaggccaccgccacaccggaatctggcgtcggtcccggcatggagccggtggaggagaccccggccgtcacgccggaaaccggctccaccccggcggccgtaccctcagcggcgcccgccgcctgaccctaaaacaagagtggaggcccaaagggcctccgctgagactgtcgataacccctccaacgaaaggattcggaggggaggatagtgtgaaagggaaccgtcagggttccctttcacgttggatcaaacaactttttggaacttttccaaagtttcaaaaagttcggcagcctgtcgaaaagaccttttcgacaggctgagcggaggcccaaagggcctccgctcttatagagagaaagaaggttctttatgtttcaaggcttttccggcgccaccgtggacttcatgtggggcatccggttcaacaacgaaaagggctggttcgaggcccacaaggaggagtacctgaccacctttcagcggcccatgaaggcgctggccgacgaggtgtacggggcctttaccgaccgccatcccgacctggacctcatctgcaaggtgtcccgcatctaccgggacgcccggcggctcttcggccgcggcccctacaaggaccatctgtggctgagcctgacccgcccccacgaggagggctgcgccgagccggtgttctggttcgagctgggcccggagggctactcctacggcatgggcttctggcaggctccggccgtcaccatggccaagttccgcgcccgcatggaccgggagcccaaggccatggaaaagctggcccgccgcttccagaagcaggacgtatttgtgctggagggggaggactacaagcgccccaaggccgccccctcccggctgctcaccccctggtacagcaaaaagagcttcgccctctcccacgacgccccccacggggagccgctctggtcccacgatctggtggatctcctgctggaggggtacgagttcctgctcccctactatgaatacatgctctccctcagcggtgaccccgatccccgggcacaataacagaatttacatcgcaagcaatcccgccagcagcgcatactaaggccaaaggattttggaaaggcggcgggcgggatggagcgaacttcctggcggcggcgggcgcgggcatttgtccccgcgctgctgctgctttttgcgctggccgggtggatgctcccggccgcgccggggccggcggcggaggctgatgcagtgctggaggccggagagggggggccttgccccacggttccggcgggacagaagctgatcgccctcacctttgacgacggcccccgccgctccaccaccacccgcctgctggacggtctctcggagcgcggggtgaaggccacctttttcctcatcggagcccagatagagaacaacggggacgtggtgcgccggatggacgaggaggggcaccagatcggcatccacaccttcgaccacgtcaagctcaccgatctgagccggaccgacttcgacgcccaggtggagaccacccgggccctgctcaagtccaccctgggccacaacgacttcctgctccgccccccctacggcatgctggacgagagtgtaaaggcctgggcgggctgccccatcatcctgtggtccatcgacccggaggactggcgggatcagaacaccgaccgggtggtgcgggaggtggtggccggggccagggacggcggaatcatcctgatgcacgacatcttccccgagtcggtggacgccgccctccagattgtagaccagctccaccagcagggctacctgttctgcacggtggacgagctctttgccgcccggggccttcccttggaggccggggaaatgtactggaacgcatacccataaatcggccctgggacggcgctgccgtcccagggccctgccgttcaggacagacagaccgcggccccgtaaaagccgcgggtgctccccgcctcgtccacccggaccgtcccggcctccgccatggcgcgcagccgccgggccagcagccagtcccccacgccggagagctgaaccagggcctgtcccagtacgttcgccaccttctgcggcttctccgtgaggcaacggcggaggacggggtcatagaagtcctccgatacccccatcaccctgccgttgaccaccgcccggaggggggcgttctcctccctcagccgctcccattccagggccagcatgcgcagcaccggacgggtcagctcctccgccccgcccaaatgcaggccgaactcctcggggtgtacctcgccccagccccgctcccagcgcaccaccgcgccgtccggccgctcccaccaccggggcagggaaaccagggtcaccctggcgtccagcccggccaggagggcggccgcgtggcgcaggccgcaggccccgtccggggtgtcgtccgcccagatgcgcacctcctccccggcggcggcccgggccctcagctcctccgcagcggccaggacctcccgccagtccgcgtcggcctccgccgcccgctccgcctccgccccgtccagtgggaagtcggtgtggaactgccggaacagcgcccgccggggtccgtcctccgccagaggggcggcgatgtcccccagggatagagccagccccaggcagagtacgtcggagcttttgttccccagggggacggcatacctgtccagccggtcctgctcggcccgcaccttccgcagccgcgccctgaccgcccggcgggagggcttctccccgtcctccgacgtgcaaaatacaatcccgacgctgtggcggcctttgccgccgcagtgctgagccatcttcagcgctccctgtgccgactggttgaagcagagctctaccataatacgatccaccctttcaaatcaaataagacagcgccagggacagggacagcgcgccgaagcagagcaaaccggggctggtgagaaagcgccgccatgttccgcgctctgcgtccggacgggccagaagcgcggggatcagccggaacggcaccatggcgcctgccagcatcagcacacccgtcaccaccaccgggccgcccagccagccccagaggatggaaaagaggttgaccagcgcgtggaggaggacagcctgccacaggcagccggtggagagcgccagctccgccagcaccagccccagaagaaaggcataaaaaaactggttcagatttccgtgaaacaggccgaagcaaagggcggaggccaccagcgcaaagcgctccccatagggccgcaggcggcgcagcagcagcctgcggaacagaagctcctccgccgcaggggcgatgagcccggccagcaggagctggagcggaagggggtagaggccgatggactccaccgggttgaccaccgccgcgccccggagccgccccagcaggccggtgaggagcagggtagccccattcgccagataggccagccccacggagccggcccaaagggccgcgaagcggaccggccccagcgggcggcgggccggggcgggcggggccgccgtcccccacagcaccagacaggcggcgggaatccccagcccgtaggcccccaggacggacgccgcccacagaaacaccggctctcccagcaggccgggccgtgccgccctggccagaagcagcaccccccactgggccgccagcatgacggccatctgggcgaacagggcccagcccaggcgggaaaagggttgacgggcctccattgcgccacctccacaaaaagattaccaaagtattatagcaattttctatctccccgacaaggaacgaaatattgacaactctctttcatgcgggtacaatatcttgtgttcgaatacaactggaggagagatacgatatgcccatttcggaaaacgcaaaggccgtgctggagcggcgctacctggcccgggacgagcagggacagcccaccgagaccgtggacggcctgttccgccgggtggccaacgctgtggccgagggtgaccgccgctttgattccaaggcggacgtggtggccacggccaaggagttttatgagctgatggtcagcctggacttcctgcccaactcccccaccctcatgaacgcgggccgccccctgggccagctctccgcctgcttcgtgctgccggtggccgactccatggaggacatcttcgacgccatcaagaacgctgcgctgatccacaagagcggcggcggcaccggcttctccttctcccgcctgcggcccaagggctccaccgtcaactccaccggcggcgtggcctccggccccatctcctttatgaaggtgttcaacgccgccaccgaggcggtgaagcagggcggcacccgccggggcgccaacatggggattctgcgggtggaccaccccgatattctggagttcatcacctgcaagaacgatacccgcgagatcaccaacttcaacctctccgtgggcatcaccgaggcgtttatggaggcggtgagccaggacaagccctacgacctggtggaccccgccaccggccgggtggtgggccagcacagcgcccgggcggtctttgatgccattgtcacctcggcctggcagaccggcgagccgggcatcatcttcctggaccggctgaaccgggacaacgtggtgcccagccagggggagatcgagtccaccaacccctgcggagagcagccgctgctgccctatgagagctgcaacctgggctccatcaacctggtcaaccacttgatgaagacccccgccgggtgggtgctggaccgggccaagctggaaaagaccatccgcaccgccgtccacttcctggacaacgtgattgaggtcaaccagtaccccctgcccgagatcgaccggatgacccgctccacccgcaagatcggcctgggcgtcatgggctttgcggacatgctcctccacatgggcgtgccctacaacagcgaggagggcgtcgccctggccgaggagatcatggacacggtgaattccatcggccaccaggccagcgaggagctggccgagatccggggccccttccccctctttgaccagagcatctacagggacggcaggcccatccgaaacgccaccgtcaccaccatcgcccccaccggcaccctgtccatcatcgccggggtatcctccggcgtggagccggtgttcgcctacgcctatatccgcaatgtgatggacggcacccacctcatcgagaccaatcagattctgaaggacaggctggtggaggcgggcatctactccgacgagctgatgcagaaaatcgtggagcagggctccctggcccacgtggacggcatcccggaggacatccggcgggtgttcgtctgcgcccacgacgtgtcccccatctggcatgtgaaaatgcaggccgccttccagcggtacaccgacaacgcggtgagcaagacggtgaacttccccaactccgccaccaaggaggaggtcgccgaggtctaccggctggccttcactctgggctgcaagggcaccaccatctaccgggacggaagccgcaacgagcaggtactcaacatcggcaaggtcaacgacggcaaggccgccaccggcgacccggtggtggacgccgtgctggactccggctgcgagggcacggcctgcctgatcaaatccggagcctacggccatatccagccgaggccgcgccccgccgtcaccagcggctttaccgaaaaggtgcgcatcggctgcggcaacctttacatcactgtcaactacgacgagaacggcatctgtgaggtgttcaccaacaccggccgggccggaggctgtcccagccagagtgaggccaccgcccgcctgaccagcgtggccatccgctcgggtatggaccccaaggagatcatcacccagctcaaggggatccgctgcccctcctgcctccggcagcagggcgtgcccgtcacctcctgccccgatgccatcgccaaggccctggaaaaggtgctcaaggtctcccagcagggcggcggctgccccgcccccgcgcccatcagcgccgcgtccaagactgccacgcctgtcccccaccccgatatgacccccgccgaggccaagctggccaagttctgccccgagtgcggcgcgcggctggagcatgagggcggctgcgtcacctgccgtgactgcggctactccaagtgcggctgatgccgccgtaacccccgcgtgaacctgccgcggcgggcggccacaagggccgcccctacctccggtgatcaaactggacatgctgcccagaaaaagcgccccgcgcacggcttttcactgtgcgcggggcgcttttttccgtgaccccatacagaccggtgcggcgggggtgttacgaagtaagcccccgccgccggaaagccgccagcagagtagcccgggggaagttccaagaagggggaatcgcaattcccccttcttggccgtttcaaggggtggattgttaaggcgggggaaatcggcatcccccgccttaactggctctttcgcccctttctggccactcagaaaggggcccgccggaggcttgacaagaaatcagatacaaaaaggggttgcatggaaggtgcatcagcctggcatatgtcgggccgatgtgggcagaaggtgaattgccccgaaggggcaagagaggccgccctggggcgtcggcccctacgctaaagggacgcccgtcccaacgcataacggcgtaggggcgacccttgtggtcgcccgcgggcggccataaaggccgcccctacaacatattttcggtcccctgaaacgcgcaggatgtaggggcgtggcttgtccccgcccgcaggccgggcggccgtagggctcagcggtttatctcccttttgtccgtgcgccctaaaatataatccactgagacattatagtaatctgccagagccactaaatgccgtgccgggggcagcacctcggtaatctctaggcgctggtaagttcggccctcgatgcctaatatttccgccatctgaacttgtgttaagccagcttcttgccgcagttcttttagccgctcttttatcataataatatcctctctcttgacacgagattttttctcgtgtataatcaatacgaatatttttctcgtgttaaggaggttttttcatggacgatatcttcgaggagctctactatcagtttgtctatctcccgaaaaaggacgcctgtcccgagcgcaccgcccgttgggaacccttcttccacggcgctcccctggacctggtcgacgccaaggacggactggtctacaacgcctccctcacgggctttcaggaggggtttcgtctggggctccgtctgggactggccctccctcctcctgaagatctgcaactgtgagggccatcagctcctccttgccgggcttctccagggcggccacccggtcggactggcgggccaccgcccgctcaaatacgttgcgcacgtcccgggcgtttccgaagttctcatcccgctcctcatagagtgttttgaaatacgattcggcatattccgtcgctttatcatccaacgtatacccatttttcgcacacatggactgaaaaatcgccagaagctgggccccgttgtagtcctcgaagtaaaaatacttgttgaagcggctctccaggccggggttggcgtggagaaagcggcccatcagctcggtgtagcccgccgcaatgacgatcagatcgtcccggtggtcctccattcccttgagcagagtctcgatagcctcccgcccgaagtcgttgggggcgtcctggttggccagggcataggcctcgtcgatgaacagcacgccgcccagggccttctcgatgacctcgccggtcttgagcgcggtctggcccacgaagccggccaccagcccggagcggtccacttccacaagctgccccttggacagtacgccgatggcccggtaaattttggccagcaggcgggccaccgtcgtctttccggtgcccggattgcccagaaagaccaggtggaggctcatggggggcacgggcaggccgtgctcctggcgcagcctgcgcaccttcaccagattgatgaggctctttacgtcggccttcaccttgtccagaccgcacaggccgtccagctcggccatcagctcctctaggctgggggcgggctccgcctcctccccggccgccgcagccgcctgtcccgctcccgccggagcggcggccgcggcgggggcgtccgccttgggaggcgcaggccgccgggtgacgaagtccttcacgtccaggggcgccttctcccccttgaggccgtcccggtcgcagagggcggagagggtgtcggcacaggtgttgacgaagcctgcctcctcctcgctcaccacgtcgtccacagcggcaaagagcaggagcatcagggtgaccaggtcgataaaacggcgggccaggtgggtgccggacaccttgtcgcaggcccgcatccgggcgaagaagtcgggcacccggaagccggggtactcgctgacggcggtggacagctcccagaacagaatggagggggccggattgcccttggtatagatggcattatagtactccacgtggcggggggtgagggaggcgccgtcccgctgccacacgcccagggcgcaggcccggagaaagacatccgcctcctgggtgaacttcacccgcagggtggcgtctgcgatctgccgccggaaggcggtcaccccttcactgtactgcttgtgcacctcggcggcgctgagagaacctttcacgctgcaacacctcgtttttcggttagtgttattatatccgaatcagaccgcccgcgcaaggaggcagttcagttgacataaatattaaaaaacctttacatttttccccacgccgttgacggatggccgtccgccgttgtaaaataactctaagaatgtcgactggagggatttccgatggcatccaagcggacccgcgccaataagcccgaaatgatccactgcccttactgtggggaggactactcctctacctataagcactgccccttttgtgacgaggtcgagcccgcggaggacgactaccaaaccgacgaatacgacgaggccccccgctccaggggcggcaagcgcctggtgaccaatacccggggcggcggctacggcgggggcacttcaccgctgaagatcatcggcacggtggtctccctggccctgatcgtggcggcggtcatcatcgtcatcaccatcatccggcccctggtggccaagggcgacgtggacggcccggcggacaacaccacgccggtggaaagcgtgacccccaccccggacgccagcccgtcggagaccgagcccgccggtgagagcacgcctccagtggcggagacccccggcgacaccatccccgaggggcagacggccaccggcttcactctgagcaagagtgagtttaccctcagcgacaagtggcccaatcccatcaccctgacggtcacctttatccccgacggctccgccgggaagatcacctggagcagcagcgaccctgaggtggtatcggtggacgagaacggcaaggtgagccacggcagcaagcagggcagcgccaccatcaccgccaccatggccggcggcgtcacccagacctgtctggttcacaactccgtcacctccggcgcatcctcctccagcgggagcggctccggcgcctccggcgccctgtccctcaaccggacggacttcaccctggaggccggacaggccttccaggtgaaggtgagcggcacctcctccacccctacctggagcatcggcaacaccgccgtggccaccgtctccggcgatggcactgtcaagcacgtgggcaagggccaaaccaccctcacctgcaccgtggacggcaagaccctaacctgcatcgtgcgctgcaactgaacctgaatagcggcatggctctggtgccatgccgctcagcctgtcgaaacagtcgtttcgacaggctgctggactttttgaaccctttaaacggttcaaaaagtcgtttgatccaacgcgaaagggaaccctgacggttcatctccgcgccaaacgccgccgcagagcggcggttgcgctccgaatcgccctgcggggcagcctttcacactatccctccctccgaaacctctggctgaagggtttatcagcagtcttgagcggcatggcaccagggccatgccgcttttttatatctcctatctccggccccggcgggccgcatccagtccaaaaaggggatatgaccttcgcggtcatatcccctttttgactcacacctccatgatgacaggcaggatcatggggttgcgcttggttttcttgtagaggaaaccggagatggcgttcttgatctccgacttgatggaggcccaatcgttcatggtgtccatccggcactcctctagggccttgacggccaccttccgcagctcctccataaggccctcggactccttgacatacacgaagccgcgggtgatgatgtcggggccggagaccacgctgccgtcctccccggacatggagaccaccacgacgatcatgccgtcctcggccagatgcttgcggtcgcggagcaccacgctccccacgtcgcccacgccgtagccgtccacaaacacccgcccggcgggcacggtgccgttgatcttggcggagttgggggtcagctcgatgaccttgccgatgtcgctgatgaggatgtgcttggggttcatgcccatctgctgggccagcttggcgtgggtcttgaggtgccgctgctcgccgtggacggggataaagaacttgggcttcaccagggcgtggatgatcttcagctcctcctggcaggcgtggcccgacacgtggagggcgcccagccgctcgttcaccacctccgcgtccttgcggtagagctcgttgatgacgctgccgatggcgttctcgttgccggggatggcggaggccgagaggatcacccggtcgccggcctggatctccacctggcggtgggtgttgaaggccatgcgggtcagggcggacatggtctcgccctggctgccggtggtaatgatgcagatcttgtgcttgggcaggctcttgatgtgggccagatccaccagcacgccgtcgggaatgttcatataccccagctcggtggacaccttcatggcgttctccatggagcggccggtgaccgccaccttgcggccgtaccgggccgccacgtcgatgatctgctggatgcggtccacattcgaggcgaaggtggtgacgatgatgcgctgctggcaaccgcggaacagggcgtcaaaggagtcgcccacgctgcgctcgctcttggtaaagccggggcgctccacgttggtggagtcggccagcagggccagcacgccctccttgcccagttgccccaggcggcccagatccatcatgccgccctggatgggggtggggtcgatcttgaagtcgccggtgtgcaccaccgtacccaccccgcacttgatggcaaagcacaccgcgtcggcgatggagtggttggcgtggatgaactccacggagaacttgcccgccttgaccacctcacccgcctcgcaggtgatgagcttggtcttgttcagcaggcggtgctcctccagcttcagcttcaccagccccgcggtcatgcgggtggcgtagatgggcacattgatatcccgcagcagataggggatggagccgatgtgatcctcgtgtccgtgggtgaggaagatgccccggatgcggtccttgttcttgatgagataggagaagtcggggatcaccacgtcgatgccgtacatgtcgtcgtcgggaaagcccatgcccacgtcgatcacgatgatgtccccgccgtactcgtagacggtcatgttcttgccgatctcattgagtccgcccagggagatgattttcagtttttcagccatagtaagtcttggaacactccttttattctgaatccatacaaatggtatgtaaggaccagcggagcaggggcgcacgaaaccaaggcggtcccggtcccccgcccgttccggccctgcctcgccggaaagagggggcggccgctccgccgcctggcgctcttctatgcccgctgtgtcctgcttattcaagcgcaaaatgcgcataaagccatgataggttattttagtataccatacctttgcggaaaagtatacctctatttttccggcaggccccggtcggcctcctccgcccggcgggcacagaaggcgcacagctcctcggccagctcggcgctgcgggcctctcccacgatccgcagaacggcgctgcgggccaggggcaccagagtgacccacccctcgccctggcggacccgcaggccgcccccagccggctgtgccccgggcagggtgcgcagcagcacagagagcacctccccctgcccgcttcgaagggaaacctcccggcggcggaggacgaagcggggaatcttccccgccaggccatggagccgctcaccggtcatgcccaggtgggcgcagatgcggcaggcggcaaagagggcgtcccgcagccagggcagctctccgtaccgcgcctccgcctccggcccgtcccgacccagccggagggcgccgccgtggtagccggcggccagggtgtcgatagctgctggggcggcgtcgggcaccgctacccgccccgccccatcctcatattcgatgagggccacaatggtgagcagctgctccggcgggaggggttctccctcctcatcctcggccagcagccggaagccgccccgcccagtgcggaaggcgggcacgccggggcatgcctccctccggacggtgcagcccaggcgctccagggcttccgccagggctccgtccgccggttccctgccgggcaccgccacctccaggcgccggagcggagcctgggtcacctgggaccgcttggccgcatcggcggcataggccgggcggacgccggtgacggactcccactggcccacccgcccggcgggcatccgccgcagctcactgcgcagcagggccccctccagccggcgctcccgcgcccggcccaggggcatgccccggcggtcaaagaagtagagccgggcccgctccccttcctgctggacaaaaagggacaccggcaggccccagctctccgccagccacgcggcggcggagggacagggcgcgtcgtgggatagcacccggcctcctgcggcggccgcgccgctcccggcggcctgggccagcatccgcgcccccgcgccgcccgcccagcccaggcccacggtgccctcccggcccagcaggccgcccaggacgagcagggtctcggcggtcagctcggccccgatggccccctccagggtgccgccgcccccgaaggccaggggcggcttcaggccgcccgcggtgagggaggcggtgagcctcgccccggcgggtacccggcggccgggccacaccgccacccgctccaacaggatcgcgtcctccccggcctcggcccggtcggccaggagggccccctcattgagcaccgcccccgcccgggccgccgcgccggggcagagcaccgcgccgtacagggtggtgcgctcctccgccgccgcgcccagcagggcggagcgctggaccagagcccggcggcccaccgtggagcccccctccagcaccgtgtggggccccagcagagagccctcccccacctggacgccgggaccgatatagcaggggggcaccacctgcaccgagggcggcagggggctggcgctccacacaccgggggcggtgcggggggcgtcccaccgcagccgcagcttgcccgacaaagcgtcggccagcgcgtccagataggcttcgccgccggtgagctcccgccactgtccctccggggctaccccgtacagggcctccccccggtccagcagggcggagaggcgcccggccagcgtcccctccccggccgccccggcccgggccgccgccgtgaggatgcacacgccggtttccacctgactggccagcagacggcctgccggggcgtccagcagccgctccacccgcccctccccgtcggagaacaccagcgcccggcctgccgccggagggcggtgggccagcgccagggtggcggcggagcggtgcacctggtggaaggccagcagggcgctgagatccaggtcgcccagcccgccgccggggagtatcagggcgtcctcctcccccagaaacccggcgcaggccgccagcagctccagctcccccgccccccggcagggcagccacgtgaagcgcacccccagctcctccccgtcccccatcgcatcctccaccatgcgggacaggcgggggagggccacaccgatctcccgcacgccgtggcggcggagcagcccggcctggtgggccagcaggggcttgtcgaacagggacagcaggggcagggggcgctccagcgtcaggggggcgagcccctcctccccttccccgcacagaatgatcgctttcaaggtgggaaaccatcctttcacacacagtttcccgtattattgccggaaccgcccccgtatgatacaatattgtgaccagagagcaaaggagaacggccatgaacattcagatttttggaaaaagcaagtgttttgacaccaaaaaggcggagcgctggttcaaggaacggcgtatccggttccagtccatcgacctggggaagtacggcatcagcccgggggagctgaaaagcgtgctgaacgccgtggggctggaggccctcgtcgaccccaagcaccccgacgccgccctgctggcctatctggcctacgacgccgacaaggtggaaaagctgctggacaaccccaggctgctgaaaacccccattgtccgcaatggcaggcaggccaccgtgggctactgccccgaggtgtggcagggctgggcataagcaaacgtgccggggcgcaggccgccccggcacgtcagcctgccgaaatgtcatttcggcaggctgttggactttttgaacctataaaaaggttcaaaaagtcgattgatcccacgcgaacggcccaggccggcctctcttggcctgcggccaattcacctccagtgaaccctggcggttccctttcacactatctctccctccgaagacttcggcaggagatactgtcgaaagcctcaaatgtgccggggcgcaggccgccccggcacgtctccttattggtagagggccgccaccgcggccagttggcgcttcagctcctccgccgcccagtcggggcggagaatctgcactccatcccccaggccgaacacccagcccagaaactggggactcaccaccgccggaacggtgacggtgaagtgctcctccccgtcgggcaccagaatggcgtcccggccaaagcggtccaacaccacccctaccaggctgttgcggcagcgcagggtgacctgcccctcccggccggagaacataccgaagtgcttctgcgcataggatgcgatatcaaaacccccgtccgccccctccaggggcaggcaggtcaccgccagctcggccatcttgtccacccggtagtggcgcatctcgcaggagcggtggtcatagcccgccagatagtagttctcgttgtcccagatgagccccagggggaagacggtgtaccgttttccctcccgccggaagaccttttcctttttgacattatactcaaagtatttaaaggtgaccgctttccggtttgcaatcgcggtgtgtagcttgtcgatggtgtagtacacgctctcgttcatgcttttcacccggcggtccacatacacctgccgctggagctggcgggcctgatgggccgatgcctgggactccagcttgcggatgagctcgctgctcttgcgctgggtgatgaacttggaggactgcaccgcgtccaccagcagcttcagctcggccagttgaaacgtccgctcccccaggaaccagcccggggactttcccttgcggctctgtacgtccatgcccagggtgcgcagggcctccatatcgtcataaatgctcttgcgctcggccttgatgtcccacgcctccagggcctgaatcagctcgggcaccgtcagcggatggtcctcgtcggtgcgctcccacagaatcctgcacaggcagagcagcttgagcttttgatttgcacttcgcggcatgcctctctcccccttcctctctctcagaatagcggttttttagtccaataaaccgtacttttttagcatagcacaaaattgcacggattgcgaggttttttcatggaagttgtagtctctgcccccctgtgccccctctatgccgccgccagcgccggcgcggagcgctccgacgagctgctgtgcggctggaccgccgagcttctggaggaattctccaccggctggtgccgcgtccgcaccaaataccgctacgagggctgggcccgccgggagcatctgcgccccgccggggactggaccgggcgaaacaagcggctcgtccgcgccccgtttgccgacgtgctggcccggccggaggtggagagccccgtgctggacaccctgccccggggggcgctggccgcccccgtcggggaggccggggagggctggcagaaaatagccctcccggacggccgggagggctatacaaagtgtagtctctgggaggatgattacaaaacgccccccgccgtgtccgaggaggccctgcgggcccgggcggtggaggtggccctgtcctaccagggcacccagtaccgctggggcggtaagtcccctctgggcgtggactgctcggggctgaccttcatggcctggttcttctgcggggtgtccctctaccgggacgcccggctggtggacggctttcccgcgcggcccatcccctttgaggcgcggaagccgggggatctgctctatttccccggccatatcgccctctatctgggggacgaccggtacatccactccaccgcccgggcgggcagcgacggggtgatgatcaacagcctggaccccgccgccccggactaccgggcggatctgcgggaaaagctgtacgccgtgggcagtgtgttcccgctggcgtaggggcgggcgggtgtgggcacccgcccctaccgctggtgcgtctctccgtgggggcggcccttggggccgcctcctctttcgtgatctccggtggtgggacgtgagacggcgggcggggacaagccccgcccctaccgccggtgcacctttccgtgggggcggcccttggggccgcccccctcttctgtgatctcaggcggcggggcgtgaaacggcgggcggggacaagccccgcccctgctgccggtgcgccttccagtaggggcggccctcgtggccgccctcttcttctgtgatctctgtcggcagagcgtaaaacggcgggtggggacaagccccgcccctaccgcaggggcggccccggcggccgcccggccgtcaccactccggctcgggcaggcgggtcagagaggtaatatatcctccgcgcacggtggcttgcagggtaaggcggttgataaaggggtagataccgcctccccagcgccggtgcagctcgtccgaatcggcgcagaactcatttaggaaggagagaacgcccccctcatagggggttccatcctcccggcagagatccgcctcgtccacgcggaaggtggaagtcccgatcaaatttgtcacccgccaggtatcctcctccacttcatacatccgcgccttgaagcagattggaaatccactggcgttctccgccctgaaatcgtacaggtttccgatgatatagtccccgtccggggcaagctcctccacgctgaaccgcgcctcccaggcggtcagggcggtgattttgcctcccgtcacctccagctccagcaccgcccctgtgccccaatccggccggttcaagaaatcgctcagctctgtttccccgccgcccagaatcacatcctccgccacagggagggaaataccggagaatccatccgtggtggtgacggtcatcgtattggtgtccatcgtcacactcctcagagagagctccctgccgcgctttccggcctcctcccagtctgtggcgctcgtaggaatgccccagtaggtgccgtcgggcaggtctgtatagtgggaggcggggtggtccgccttctgctcccactggctcaggggatccggatccagcggcaggttggcgccatgccaggtcagcgccgtgatctcgccgccggtcacctccgcctccagtaccatgggccagtaggaggagagtgccgcccactgcaaaaagccgtccaggccgctgtcgccgtgattgcccagtgtcacgtcgtccgccacagggaggctcgtcttctcaggcgccacgctcagaatcgtcatggtgtctgtgtccacctctgccagggagaggagcagctctgtcccctcctcccccgccgtccaccagtccggcagggacagggtggcccagtaggtgccgtcaggcaagctctcctccggcgcgcgggactggcaggccaccagggggccgcccagcagggcggcgcacagcaccaggagcagggcggcccggccgggccgcttggcggaggcgtccatcagggcgcggaaccgctctttcagcccccgggcgcctccggcgaactggctggtcaggggggcgggccgccccacgggcacaaaggagagcagggccgcgccgtaccgccgccgccactccccgtcccggccggccagcaccgcggtgtcgcaggcgatctccatatcccgctccgccgcccggcggagcagccagaccagggggttgaaccagtggagggcgcacacccacagcagcagggccttgcgccacagatcccggcggcgggcgtgcatggcctcatgggccagggcaaaggcccgccgctcctcctccaccccctcgggcaggaggatgcggggccgcagcaggcccgtcagcgccggggaggacagcagagcgcaggcgtataccggcaccccctcatacgtccccgccggggtgcaccaccgggccgttctccggcggaaggcggcgtaccggagcagccgcgccgccagcactccggccgctacggcggcccagacggcgaaggccagctccgccgtggtgagggacaacccccgccccacggcctccggggcggcctctcccggcgggagcgtccgggcagtcagctccaccccctggaatcccccctcctccacccaggcagccgacaccgccgccggggcgggggcctccagaaccaccggggcccggggcaggctcacgttgaagggcaccgccagccgcagggccaccaacagccacgcccagcaccgccactggggccggaagcggcgcttccacaccggggacaggatcagcagcagggcggtcaccgcccccatggtgaggctcacctcaaacaggccggacaggaactcacgcaccgccgtccccccctctcagaatctcctccagctcctccagatccctccgggagatggcccggctgtccatgagggcggccaccaggctgggcagggagccgccgtggagccgctggagaaaggcccggctctcggcggacaggtagtcctcccgccggacgaggggggtatacaggttattccgcccctccttctcccgcttcacaaagccccgctcctccaggcgggagaggagcttgagcagggtggccgtctgccaccgcctccccgccagctcctccatcagcgcggcggaggagacggggtacttctcctgccgccacagggcctgcatgacctccagttccgcatccggcagccgttccattccgttcaccctttcataagacaattgtcttttcgcttttattttacaattgtctcatcactttgtcaagaaaaaagagcgcgccgccggcgcgctcttttgttatttccgctccttgtcccggacaaagaagtgcttcatgttggactggccgccctggcggacgtccacctcgaaccggggcagggccttgaccagcttgctcagcttggagaagccaaagttgcgggggtcgaagtcccgcttcttgcgcaccagcaggttggccacctcgcccaggggggcgtagccgtcctcgtcggccagcatctccaccgagtcggccagcagggtgatgatctccttgggcaccctggaggggggctcggcctccggcgcggggggtggggcggcctcagcccccttctttctggccgcgcgccgggccggtttgggcggctccttcggctcctcccgggcggcctcctccgcccgctcctgctgggccgcggagcggatgacctcaatatacacaaacttgtcgcaggccacaatgaaggggtttggggtcttcttctcccccatgccgtacaccttcttgcccgcctcccgcaggcggatggccaggcgggtgaagtcgctgtcgctggacaccagtacgaagccgtccacctggccggtgtagaggatgtccatggcgtcgatgatcatggccgagtcggtggaatttttccccgtggtgtagccgtactgctgcacgggggtgatggcgttctccagcagcagaggcttccacgaggccaggttgggggtggtccagtccccgtaaatgcgcttgatggtgggggtgccgtacaccgccacctcggccatcacgtcccccagggcggagcggggcgcgttgtccgcgtcgatgagcaccgccaggcggagatccctctcttccgacatatctccccctccttacagcacgaaatggcagaaccggagcacctcgtaccagtcctccgcgtcaaaggagatggtcttgctgtcctccagccgggcgccggggtaaaagctgcggcggtaggcgtccttgtgctccttgtagcgcacggtggcggcgaaccgccggggcaggggtacggacatgcccgcccctccggcgcgcaggcggcgcaccgcctcctccgccccggcccggatggcctccacggcggcctgggggtgcatggacagcaccccgccgccccggccctcgttcaccggcacggccaccaggccgggcagccagtcctgggcaaacgcgcacagctcccggtcgccggacaggaaggccaccggcacgccgaagtacagggcggtataggcgttgatgaggaattcgctggccgggacgccgttgagcgtcacctggtcgcaggcggtggtcatggtgtgggacagggggttgccgccgcagcagccccaggcgtggtagcccgtgaagagcaccccgccgaaggccccccgctccagccccgccatcatgcacaggggatcgcccgtccacccccggagcacccgggcctgccggggcagccgggccgcgtccaggttgcgggcggagtcgtgggcgtccttcaccagaatgtcctccgccccggcggcgacggccccctcgcaggcggcggccacctcggcggtcatctgggcggcaaagggcctgtagtcgtccatagtggcccgctcggtctccgcccagtcggcaatgccgcaggtgccctcgatgtcggcgctcagatagagtctcatttcaacccctcccggcggcgcacaagctcctccacctgggccaactgctccacggtgttgacccccagcatctcctcggcggtacaggtggggcaggcccccaccctgccacccctggagaggatgtaggccggggcgtcggtgaggtagtactccccctgggcgttgttgggcctgagctggtcgatggcctcccacagggggccgctctcaaagacgtagacccccacgttcagctcccggatggacttctcctcgggggtacagtccttgtcctccacgatgtgggagaaggagccgtcgcttttccgcacgatgcggccgtagggcagctcctcgtcggacacggcggagagcagcgtgcagtcgttgccctcccgtttgtgggtctcaatgagggactcgtaggtggcccggcgcatgaggggcatgtcgccgtagcacaccagcacgctgccgtcaaagcccgccagggcctcccgggcgcactgcaccgcgtggccggtgccctgctggggctcctgcacggcgtgggggtactccgggtaggccgccagcaccttctcccgctcgtagcccaccaccagcaccacgtcctccttctccaggaaggacagctcctccagcacatagcccagcagggggcggcccgccgcctgccgcagcaccttgggcagatccaccccctcggtgcgcaggcgggtgcccttgcccgccgccagaaccaccgccttgattccattcttcacggtattcaacctcgtttctctcaagcatttctcagcttcatttgatcgctagtataacacatggaccctctgttttgcaattatcccaccgtatttcatacaattttgccattgacttttcccatcggggaactataataaaagcgctttagcagaggcgcgccgtttcccacgcgcgccgctttgggggaattggagcagcagcgcatcagggggcccgggccccctgtgcatgccggccggcatgctgccgcagctcccgccggttccgtgcaggactgagcggcggcacggagccaaacagtctgaggaggaatcactgatggttacattttttgtctgcctggtgctcctcatcgtcggcttcttcacctacagcaagctcgtcgagaagatcttccgcatcgacgaccgccccacccctgctgtggctcaccccgacggtgtggactacgtacccatgaaaacctggcgcatcttcctggtacagcttctgaacatcgccggcctgggccccatctacggcgccctgtccggcgcctgctggggcccggtggtgtatttgtggatcgtcttcggcaccatcctgggcggcggcgtccacgacttcctgtctggcatgatgagcgagcgcaacgacggcaagtccatctccgaggtcgtgggcctctacatgggcaaggtcatcacctttatcatgcgggtgttctccgtggtactgctggtgatggtgggcgtcaacttctccgtgggccccgccggcctgctggccaagctgacccccgacatgctgggcaccatgttctggctggtggtcatcatggtctactacctgatcgccaccttcctgcccatcgataaaatcatcggcaagctctaccccgtgttcggcatctgcctcatcatcatggccctgggcatcggcggggccatcgtgttcacccgcggctccgacatgccggagctgaccgccgcggccttcaccgtggtgcaccccgacagcctgcccaagtggtccatgatgttcgtcaccgtagcctgcggcgcaatctccggcttccacgccacccagtcccccatgatggcccgctgcatcaccagcgagaagcagggccgcaccatcttctacggcgccatggtggccgagggcgtcatcgccctgatctgggccgccgcaggcgtcaccttctacaccaaccacggctccctgctggacggcatgaccggcctgaccaacgccatcgccgccggcggcgcgggcgacgtggtgtaccagatctccaccaccctgctcggccccgtgggcggcgtgctggccatgatcggcgtcatcgcctgccccatcacctccggcgacaccgcctaccgctccgcccgcctgaccatcgccgactggttccacatcgaccaggccaaggtgggcccccgcgccgccctgtcagtgcccctgctggccgtgggcgcggtaatcgccctggccctcccctgggacgtgctgtggcgctacttctcttgggccaaccagaccctggccatgatcgtgctgtggaccggcgccgtgttcctgcacaagttcggctatccgcccaaggcgtgcttcatcgcggccctgcccgccaccttcatgtccgcggtgtccgtgacctacttcttccaggcccccgagtgcctgggcctgtccaccgccatcgcctatccggtgggcatcgtggccgccgccctgttcctgggcatcttcatctggcggaccctcatcgtcggcaaggacgacgtggccccgctgcacgcggccaagaactgaattttacccgccggacgcgggacggaagtatccgtcccgcgtcttttttgctccgcccttgccgggcaaaaaaggccctgtgcgcatgaagttttacacccccctgcaacaatttgcggttccaaagcgtatatagggtgaaagggggaaccgagatggacggccccaaccggttggaggaacttgtcaatacctacgaaaccacgctgtaccgcgcggccctggccattctgggcgacgcccacgaggcggaggacgcggtgcaggacgcctttctgcgctgtctggaaaaggccccggactttgagagcccggcccacgcccgggcctggctgctgcgggtgacggtaaacggctgcaagagccgcctgcgcgccccctggcggaggcgcaccgcccctctgctggacgcctatcccgccgccgcgccggaggaggggacgctgctggaggctatgcaggccctgcccgcccgggaccgggcggtgctccacctctattactatgagggctaccagaccgcggagatcgccgccctcaccggcctgcgggagggctcggtgcgctcccgcctcacccgcgcccggaccagactgcgccaagtgctgaaaggagaagacgaatgaagcactatcgctcttatatggaccgtatcaccgcgcccgccggactccggcaaagggtgctggaggcggcggagcaaggggcgcgcccccgcaggcccgcccggcggctgaccctccggctggcggcgctgtccgcctgctgtgtgctggctgtggcgggcgggcggctgctctggctgggcggctccgcccccatccccaaccccaccgccggcatggccgccacccccgccccggctgcatcttctcccgcttgggagcacaccctcactgtgggccccgggccctttgccgaaggggaggcccacaacttcttcgacatacccgccctaaatttccccgactgcactgatttctctccccggttgacggaccgggattggggggtgagttcctttgaggagaagctgaccgcccaggagatcatcaccgctctggggggcacgggggaggttccctggtccctgctgtgggagggctatggactggacggccaagttttttacaacgagaagggagatgtattgcaggtggtgatcaccggtgtgcgcggggacgaccgcctgcggctcgccctctcccccggccggctccccccccgcagtgtggtgtatcaggaggccgctacccaggcggtcaacggcattcccgtcaccacggcctccttccgcggccagtctgacggccggacgctgactacctgcgccgccgacttcctggcgggcggcaccggcgtctcctttgaatacctctcccccgatgccggacagtccacctggctgaccgaggtgctggcgtggtacggcaccggcgccgacagcggcttcaccacagagcatctgaacgccagaattcatcccataacagggcacgagcctccggcggaaggggaggtcggcggcggggtggtggttcccgttcccatcccctcccccacaccttggcaggtctatcccctggagtaaattcaaaatgtttgtcgctttttccaatcttttttgatttcacaggacgagatgcggtgatcttttcccttgacgccgagcggcgggcacgcctataataaaccgcaagaaccagttgttgcggattacccccgctgcaatgatagaggcgcggaatcgcaagagtatccggcataccctgcaatggggcagagcaccccgccggagaaagggcccttccgccgaagggccggtcccctgcctggaggaccggttgcctgggccgttgggataacatctcacggactgccacatatcatctgtgtggagcgctatcattgaggccaagggctttcgtcgctgtgcttccctctgcccgcatgccctggagccggtatagccgctccccggtaccgccgcgcccgagggaggccggttttcgacgctctttgtcgccatgaacgcttccaccaggaaggttcatggcgctttttttgttaaaaaagcgccgaaaaactagactggaggaaacaaacatgaatcgaaacaccctcgccgccctgtccctcaccgcttctctctccctcactctggccgcctgcggctccggcggcggaaccgctcagagcccctccccggccgcatccacgccccccgccgcatccggcgcaccgtccggcggtgtggaggacggcgtgctcacggtgggcatggagtgcgcctatgccccctacaactggacccagatggacgactccaacggcgcggtgcccgtctccaacgtgccgggggcctatgccaacggctatgatgtgatgatcgcccagcgcatctgtgacgccaacggctgggagctggaggtggtttccaccgcctgggattccctcatccccgccctccagagcggcaccatcgacgtggccatcgcgggccagtccatgaccgccgaccgtatggcccaggtggacatggcgggcccctactactacgccgacatcgtctgtctcaccaccgccggcagtgcctacgccgccgcccagggcatcgccgacctggcgggcggacgctgcaccgcccagtcgggcaccatctggtacgacacctgtctgccccagatccccgatgcccagatccagaccgccgcggagaccgcccccgccatggtcatgcagctccagaccggcgcggtggacttcgtctgcaccgacctgcccactgccaccgccgccgcagcaaacgactctgacctcatcgtgctcaacttcgccggcaccgaaggcgacttccagtttgcctctgaggcggagcgggccgaaaacgtgaacatcggcatgtccgtggccaagggcagcaccgaactgctggacgccataaacgccgtactggacgggatgaccgccgacgacttcaacaccctgatggaccaggccatagccgtccagcccgaggtgtaagccatggaacgcgttctcgcactcggacaggacatggcgctcctgtgggccaggtacgcccccctctacctgagcggcgtggtgaacaccctgcttctggccgtggcggccaccgtcctcggctgcctgatcggcctggcctgcggcctgctcaacaccatccccatccacccacaggaccgcctgccccggcgagtcctgctatggctgctccgggccgtgatccgtatctatgtggaggtctttcggggcacccccatggtgctccaggctgtgttcctctactacggcctgccctacttcaccaacaacgccatgcgctttgacaacgtatgggccgccgcccttctggtggtctccatcaataccggcgcctacatggccgagtcggttcgcggcggcatcctctccgttgaccccggccagaccgagggggccaaggctatcggcatgagccacgtacagaccatggtgaatgtcatcctcccccaggccctgcgcaatatcatgccccagatcggcaacaacttcatcatcaacgtcaaggacacctcggtgatgtttatcatcggcttcaccgagttcttcgccgcccaccgctacatcaccggcgtcaaccccatgtacttcccctccgcggccatcgagatgctgggctacctttgcatgacgctggcggcctccgccctgctgcggctggcggagcggcggatggacggggagagcagctacgagctggtccaggccgacgccctgaccatgaccgccggcacctaccgccgccggacccgcccccaggacgaagggggggcgctgacatgaccctggaacccattctggaggtgtgccacctctccaagtcctttgggacgcaccaggtcctccgggatgtgaacttcactgttcaccccggcgatgtcaccagtattctgggctcctccggctccggcaagtccaccctgctgcggtgcatcaatctgctggagcgccccaatcagggggaggtccgcttccacggccggtccatcaccggccgggggacggacgcctccgcttaccggacccgggtggggatggtctttcagtctttcaacctcttttccaatatgaacgtgctggagaactgcatggcgggaccggtaaaggtgctccgccggagccgtgaggaggcgcgggccagggccctgcgctacctggagcaggtgggcatggcgccctacatcaatgccaggcccaggcagctctccggcggccagaagcagcgggtggccattgcccgcgccctggccatggagccggaggtgctcctcttcgacgagcccacctccgccctggaccccgagatggtaggagaggtgctggccgtcatgcgggcgctggccgccagcggcatgaccatgctggtggtcacccacgagatggcctttgcccgcgacgtgagcagccaggtggttttcatggctgacggccggatctgtgagtcaggcgcccccgacgccttcttctcgtcccccagccagcccagaacccgggaatttctggcccggtttatggcccagtaaccgccccgcacagggcctcccggcgctggcggcgctccaggtagaggaacatcgccagacacaggacaatctgcaccgtgctggaggcgggggtgcccagcccaatctggaacagggtggccccggggattcggctgaccagataggcgatggggatgcgcacgccgaaggcgccgatgatcccctgaatcatgacaaagagggtcttctcacagccgttgtagtagcccatgaagcagaacaggaagggggttagcatgcagtcgatggcgtaggccttgagatagctgtgggacgcggcagccaccgccgcgtccttggcaaacagcagggacagggtgtcgccgtggaaaaaggccagccaggccatcaccagtccggcggcgaaagcggtcaggataccgtagcccagcgcccgcttggcccggcggggctggccggcccccatgttctgggctacaaaggcggacatggagtgcatataggccgagggcaccagcatgaggaacacgcacaccttttccgccacgcccacgccggcggaggccgtgacgccgaaggtgttcacgatggtctggatcaccaggaaggaggtgcccaccagcagctcctgcagggccaccggcaggcccagcctcagctccagcgcgatgatgcgcccgtcaaagcggacgctccggcgggagaagtggaagggcagccggtccttccggcggcggataaccgccagggagaccaccacgctgaccgcctgggcggccaccgtggccagggcggcgccggccgcgcccaggtgaaagccctccaccagcagcaggtcgcccccgatgttgatcacacaggccagcatcaccgtgaacagcggcgtccgggcgtcaccgatgccccggaacaccgcccccagcacgttgtaggccacgatgaacaggctgccgccgccgcagatgcggatgtactccaccgtttcggcaaaggcctcctctggcgcgtgcaaaaggcgggcaaggggctcggctccggccagtagaaccaccgtcagcagcacaccgaacgccgcgaacaggcagataccgccgccgatggcccttccggcctcgtccggctcaccccgcccgatgcgctcgcccaccagaatggtgatgcccatggataggccggtgatcaccatggtcacggtggacatgagcatgcttccggtggcgacgccggagacatcggcggtggcagcgaactgccccaccaccagcaggtccacgccgccgtacagtgcctgaagaaacagcgtgaaaaagaccggaacggcaaagcggatgagggtgtgcaggatgttcccctccgtcagtcggttcgttcgtttcatgtgattctatcctccgttttccctcaatgagcttcgctcctccggcatagagcttcatgcgcacagaacacaccacaaaacgacgcaagggcctgggcgcataaagtttttgcgcatgtgggccgtcccagcccacacgctttcatcccatggccgtgacgctgtaagcgggcacatggccaggtctgctatgcgtttgcacagcaaaaaagccggacaaggtgcggacttctcagtccgtgccttatccggctcctcatttccgctgaatgagttgccctccgagcaagcatccctattatagcaaatcatcccccattgtcaaggggatgttaaaaacggcggccccgcgctgcggggccgccgttttactcggtcaggtatcgtcctcgatcaggccgtagccgccgtcgttgcgcttgtagaccacggcaaatgctccgccgtcatccgcgttcttgaaggcaaagaaggtgtggtccaccaggttcatctggagcaccgcctcctccaccgtcatgtgcttgatggggaagcgcttggtgcggacaatccggaattcctcctcttcctcctcaggggcaaaggaggaaacctcttcggcatccacggttcggacgaatgcatcctggcgcagtcgcttctccaagcgggccttatttttgcgaagctggcgctctagcgaggagaccgccgcgtcgatggtagcaaacatatcggaggtactctcagacacgcggatgatcgtgctgccggagcgcacggtgagctccacgttgttccggtccttctccacgctgaagacgatggcggcctccgcgtccgccttaaaataacggtctaatttacccacctttttctccgcataggcgtggaccttgttgggcaggttgacctttttgtctgtgaacacgaacttcatagttttcagctccttccaccctccggagagggttatggtccggagaccgggaggcccggcctccttgctttgattataccacgaagtttcccaattgtcacagcttattttatgaattttttggttctatgcccaatcagccgtgatgtccgcagccgtggtcatggccgccgcaggtgtgaccgccctcgtgatggtgtccgcaggtatgcccctcaccgtggtcgtggtggctgcatacggtgtcgggatcgtaggccaggctgccagccagcagggcctccacctgggcgtccgcactgccggacgcaccggggtagagctgaatccccgcctcagccagggcgctgcgggcgccgccgccgatgccgccgcagatcagggtgtccactccaagtccccgcaggaaacccgccagggcgccatggccggagccgcctgtctccaccacccgggcggagaccaccttgccctccgccgcctcgtagattttgaactgctccgtatggccgaagtgctgaaaaacctgtccgttttcataggtaaccgcgattttcattttcataacctcctaattttccttggaccgcaggcacgcgccgcagccacagcgtcccataccgcaatcccgccgggcgcagtcccggccgggacactcctctccccgggggcagagcacatagtctccgccagagatgtgcaggcgcctcccctccaccagggcctgggccagcctgcgccgggcggtgtcgtacacctgctgcaccgtggagcgggccacccccatctgggcggcgcactcctcctgggtgcagcccagcaggtcgatgaggcggatggcctcgtactcctccaccgccatctccacccggccgtccgctgccccctccagggggccgaagctgctgcatcggggcagggcacagatgcgtctgcattttttgggtctgggcatagcgtctcctccgtttccggcttatgccatttattataacacgtttttggcatatgtcaataatctatttttgagtttaactgcgtgttaatttcctttccctccacttaagatgccttttcttgttatttttttacgaaaactcacacggtttttacccttaatcagttgacacatcgtttttgtacgcattttcttgtccacccacctctgatttcggtgagtctgccaattgttttattcccatgcccatactatactttaaacagcccataaaggaggtatgatttatggtactggaattgaagtttgattccatctctgagcttgcagagctgcagcggctggccgttcaggcggataagcccgtatatattgccaatgaagacgactccatccgggtggatgcccgctcgtttttggggcttttcgcgctggactactccaagcctctgaaggtgatcaccgactccctctacgccatgcggatgctggagatccagcagcgcaaccgtgcggcccacatggcccgcgcctgagggggatacaagcaaaaaagagcggaagggcgcggcccttccgctcttttttactctttacaggtgtccatgaatttcctataataaggaatgttgtgtcacaagttgttctattgtgaggtgttggtgtgaaatctgtacttgccgaccggctctttcatctgaaggagaacggcaccacggtccgccgggagtgcttcgccggcctgaccacctttgtcaccatggcgtatattctggcggtcaacccggccattctgggcgccgccggcatggaccggggcgcggtctttaccgcctccgctctggccgcctgcgccgctaccctgctcatggccctgctctccaactatcccttcgccctggccccgggcatggggctgaacgcctacttcgcctacaccgtggtcatcaagcagggctactcctggcagatggccctggctgcggtcttcctggagggcctgctcttcattgtcctctccgtcacttcggtgcgggaggccatcttcaactccatcccccggcctctaaagctgggcgtcacctggggcatcggcctgttcatcctcttcatcggccttcagaactccaagctgatcgtggccgacccctccaccatgctgtcggtctaccccttccgggaggccatcgcctccggggagatacgttccgtgggcctgggggcggtgctggccttcgccggaatcctcctcaccgccatcctcactatccgcagggtgaagggcgccctgctgctgggcatcctggccgtgtggggggcggccatcctctgtcagctcaccggcctctatgtccccaacgccgagctgggcatggccagcgtcctgcccgacttctccgctggtctggccgtccccagcctggctcccacctttatgcagatggacttcaccgggctgttcaccctcaattttctgacagtggtgctctccttcctctttgtagatgtattcgacaccttgggcggcattatcggcatggcctcccaggggcacatgctggatgagaacggacgcctgccccgcatccggggcgcgctgctctccgacgcggtgggcacctccgtgggcgcggtgctgggcacctccaccaccacgacctttgccgagagcgcggcgggcatcgccgccggcggccgcaccggcctcaccagcgtggtcacggccctgatgtttctcctgtccctcttcctctctcccctgtttctggcggtgcccggctttgccaccgctccggcgctggtcatcgtgggactgagcatgctcggcagcctccgggcgctggacccggcggactggcgggagagccttcccgcctatctgaccatggtggccatgcccttctgctactccatctccgagggcattgccgtgggcaccatctcctatgtggccgtccacctctttaccggcgcggagagccggaagaaggtcagccccgtgctggcggtactggccctggtctttctgctcaagtacattttcctgtaaggtacagcctgggccctgtccatacggacagggcccaggctgattatttgacccgccggccgttgagaaagacggcccggatgctgccgttccagtcaaaggggtggccgctggtcaccaccacgtcggcgtccttgccgggggtgagggtgcccacccgcttggagaggcccgcaatctcggcggcgctgctggtgatggccgccagggcctcctccgggtccaggcccccccgcacggccatggccgcgcagagggggaggtactggatgggcgtttccgggtggtcggtgcagatggcgatcttcacccccgcccggtggagcagggccgagttgtccagggtctggcccaccagctccggcttggagcggtcggtgaggcagggcccggtgatgaccggcacccccgcctccgccagcagctcgggcaccagatagccctccgtgccgtgaaccaccaccagcttcagcccgaactcccggctgaggcgcatggcggtagcgatgtcgtcggcccggtgggcgtggaagtgggcgggcagctctcccgccaccaccggcaccagcgcctccagcttggcgtcgtaatcgggcatgtcctggtcgggatctccgtccgccttggcctgcttgtcctggtactcctgggctttggccaggtgctcccggatgagggccgcggtggccatacgggtcaccggcgtctccttccggtcgttgtagaccgacttaggattttcccccagggcgaacttcatggcggcgggggccttgagcaccatctcgtccacccagcgcccgtcggtcttgagggccaggaactgcccggcgatggggttggccgagccggggccggtgagcaccgtggtcacgcccccctcccgtgcctcccggaagccccggtccaggggattcaccccgtcgacggcccggagctggggggtacaggggtcggtggactcgtttccgtcgtccgcctcaaagcccagggcatccccgaacaggcccaggtggcagtgggcgtcgatgaagccgggcaggatatgccctccctccgcatccagcacggggccctccgccccggcgggcagggcctccatgggccctacggcggtgagcttctccccctcaaaagccacgaagccgcggggaatcaccggcccgtccatggggtgaactaccccgttgagaatcagcattagccattcgccgcctttcgacaaaagttctatttgacattttatggaaatcatggtatgataagagcacagcttatccaataggcgagtgtaattccaacccgcgattcttccattctcccgcacacatctctcttgggcgccccaggacggggcgctctttttttatcgactcctccagagtgtactggtccaccagggccacgtcccgctccaggtagtggccgccgcgccagaggcggaaggtgagcacgtcccccaccgccagcccctccttgatcgcctggagctggtccatgtcggtgatcgtctcgccgttgaccgccacgatcacgtcgttgggcaggacgccctgccgttgggcgtcggagcccccccggacgctctgtaccgccaccccccgggggcacccgtactcctccgccagctcctccgtcacggtatagccggtgatgccgatggtgggccggccctccacccgcccgtgggcgatgagggcatccaccaccgtcttgaccgtggtggtgggaatggcgaagcccaggccctctaccgtgttgtcataggcccgcattttcaggttggtaatgccaaccacctgtccccggtcgttgatgagcgccccgccggagttgcccgagttgagggcggcggtggtctggagcagcaccatggtgtacccgtccacgttcacatcccggttgatggcggagatgatgccgtcggtcatggtgccccgcagctcctcccccagcggattgccgatggccgccaccgcgtcccccacctccagaagggtggagtcgccgaactgggcgggcgtcaggccggcgcagtcgatcttcagcaccgccagatcgctctgtgcatcctgtcccaccagcagggcctggaacacccgctcatcctggagcaccacatccacggcgccgcatccctcaatgacgtggctgttggtgatgatatacccgtcctccgacatcaccacgccggtgcccaggctcatgccgtcccccttgctcccccggatgctgacgatggaggcgatgttctcccggtagatctcctggaggctgtgggccccgccgctgggcaggggggagatggtgagggtggtgccgtccccggtgggggcccgctctaccgtggtttcctccggcagctcctcccggacgggaaggggctgccaggtgctgtcggccagggccggcagctcctccaggcggctgtggctccacagccccgccgccgcagtcaggccgcccagcagggccatggtcaggagaaagaggagcaccgccgctgcgccgctccaccgccggcggcgccctgcgaaaatcggcgccggggtgctccggggggcctcccccgtttgatcgtaatagtagccgcgcatgggccctccttcttgccccgtccgccggggcgtcatgcaagcgtcagggtaaatacgaactccgtcacgccgtcctggctggtgacggaaatgttctccttgtggttgttgaggatagtcttgacgatatacagccccaggcccacgccctcccggtccacggagcgggatttgtcgctcttgtggaagcggtcgaagatcatggccagctcgtcgggggggatggtgtcgccgtggttgcgtaccgccacgtgggccttgccccccttggcggtgatggacaggcccatggtgctcccctcggccgagaacttgatggcgttgtccagcaggttatagcacacctgggtgatggcatccggatccccccacaccagcacgggcccgtcggggagctgggtgtccacgtccagatggcgggcattgatcttgttctccaggctcaccagcacccgcagcatgacctcggacacgtcgaactgctcctgggcggtgacattctccgccgactggaggcgggacagatccagcatccgccgcaccaggcgggagagccgccgggtttccgaggagatggtctgtagggcggcgcgctccttgtccggcgggatggtgccatccagaatgccgtcggaaaagccggcgatggtggtcatgggggtcttgagctcgtgggagatgttggccacaaactcgctgcggcgggcctcgctcttggcaatggagtcggccatggcgttgaaggcctcggccagctcgcccacctcgtccttccgcttctcatagccctgcacccgcacctcgtactcgccgtggccgaatttgcgggcggtctcggcgatctccttcagggggttggtcagccgcagggaggtgatggagctggtgatgaaagccacgcacagtaccaccacggcggtaaagaaaaagatggagatgaacgcctgccacagctcggtgatgtccgaggtctccgccgccacataggccacgccgatcatggtctgctcggtctgcccggtggccaggttcaccgttttgaccgtgatgggggtgcccgccacaaagcgtttctccggaaacaggccgcccagagtggtcataccgctgtagctgccctccttttggagctggctgacgatggactggggcagatagttcccccccagcccgctctggatcgtcgctccatcggaacagagtaccagctccccatccgcctcggtgaccaggacaaaggcgttggcgatgtgggccacattggcaacatagagctggtaggccatgtcccgcacgtcgatcccttcggcccgcaccttggcggtgaagtcggccacataatcggcgttgcgctccatggagtcccgggtttcccggattgtatactggtaggacaggccgataaaggcggtccccagcagggcgaaggagatgagaatcatccccgccgtcagcaggaactgccgtccgtacaggctcttcatgcgccgctcacaacctcaaacttgtaaccgacaccccacacagttttgaggctccactgcccgctggccccccacgaagcgttccgctccgcggggcccccatttcctttccatttttcgcgggccggaagtgaattccgtcccgctccgccgcagaggcggcggcacgcctcgcgtgccggcgtcagcacatatgccctcatccgttcaccacctcgaacttgtaaccgacaccccacacggttttgaggctccactgctcgctgacgccctccagcttctcccgaaggcgcttgatatgcacgtccacggtacgggagtcgccgaagtagtcgaagccccacacctcgtccagcagttggtttcgggtgaatacccggttgggggaggccgccaggtggtagagcagctccagctccttgggcggcgtatccacccgcttgccgtccaccagcagctcataggagtccaggttgatgaccagcttgtcgaaggagagcttcttctcgccgctcccctcctcctcgccgccgaagcggcggagcaccgcgtggatgcgggccagcacctccttcatctcaaagggcttgacgatatagtcgtcggcgcccccctccagcccggccaccttgtcctgggtctcccccttggcggtgagcatgatgactggggtcttgtcgttctcccggatcttcttaagcaccgaccagccgtccattacaggcagcatgatgtccagcagcaccagctccgggtggaaggagcggaacagctccacccccttgccgccgtccccggccaccgctgtctcaaagccctccttctccagatagaggtggagaagctcggcaatattggagtcgtcttccacaatcaggaccttcctggccatagcgcaccgtccttttctatgttgttctctccggtattataccggctttttcccccacaagggtgaattttttgtaaaagggggttaccgggtctccacataggcccgatccacctgaatgaccgcaaaataccgctcgtccagggcgcgcaccgccccggacaggcgttcgcagagctcctcgtcccgcaggcggcagcgatggggcaccaccacgtcaaaaatcaggttggtgtgctggggccccttggtcacccggaagtcatggatggtcatctccggctccacggcccttgccagggccgccacctgttcccgcaggcggttcaccgactcgtcgtcggtggcgatggggtccatgtgcgccgtggtctcaatgccgaacttctgctggatctcccgctcgatgtggtcgatggcgtcgtgggcctccaggatgtcggcgtcctggggtacctcggcgtggaaagagcacagccgccgccccgggccatagtcgtggatgatgaggtcgtgcattcccaccacctggtgatgcgacagcaccacctcccggatcgcgtggaccagctccgggtcggggctggcccccagcagggggttaatggtgtccttggcggctccccaacccgccttcagaataaagacggccaccaccgcccccgcccagccgtcgatgctcaggtgggcgaagtgtccggccagggtgcccgccaacacggcggaggtcgccaccacgtcggagagggagtccgcggcggtggccgccatggccgccgagccgagcttcttccccaatacccggttgaaatggctcatccacagcttcaccaggatggaagccgccagaatggccaccgacaccagcgaaaagtccaccgcctccgggcggaggatcttcccgatggaggtcttgcccagctccagccccaccaggaggatcatcaggctcaccagcagccccgccaggtactccgcccggccgtggccgaaggggtgtccatcgtcggccttctgtcccgccagcttaaatcccaccagagtcaccaccgacgagcccgcgtcggacaggttgttgaaggcatccgccgtgatggcgatggagccggtcacaacgccggcgaagaacttgcccgcagacagcagcagattgagcacaatccccaccgccccggacaggacgccgtacttctcccgcaccgctgggtccgtcacattgtcgcagtcctggatgaaaagccgcaccagccgattgatcatgctgtctcccccaaagattggtttccttttattatcccacgcccgcccgccatcgtcaaggagaggttttccccccaaacagacggtcttcctccctctccttgtatccacaggtacaaagtgatagaatagggaaaacaagctccccatacccaagccgccgtggcgaggaggtatcctatgaaaatccgttttctcgagccgggcaaccgcccctacaagcccacgcccctcaactacttcgtctacgaccgctacatccgtaccccctccgtgggactcaacaccctggctaccattgtcaaggagctggtcgatgacacctatatgtacagcgagtccatctcccgtatcgacatggacgacgtggaggacgcggacatcgtgttcatcggtattttcaccttcgccgccgtccggggctacgagctggccgaccacctccgggcccacgggcggggcctggtggtgctgggcggtctccacgcctccatgaactgcgccgaggcggcgcgccactgtgactatgtgctgctgggcgagggggacgagaccatccgcgccttcgtggaggcggtgggccgcggggagcggccggacttccccggcttggcctggatggagggggaggagctgcgctccaccggctatccgcccccgccggagcgcttcgagacgattgcagaccgtaatttagtccacaattattccaaaatggtggggcacagcaccctctggccccaggtgcacgcctcccggggctgcccccataactgcgactactgcgccctggtacgccacttcggccgccgcgtccgcacccgttcgccggaaaatgtggtggccgacatccgggagtccatccgcttcttccaccggggccacgtccggctggccaaagatctctggctcaccgacgacaacttcttcgccgaccgggactgggccatgtccgtcctccgggccatcgtggacagcggcatccgctaccgcttcaacgtacaggcccggtacgaggtaggcttcgacgacgagatgctcgaccttctcaggcaggccggcttcttcgagctggatctgggcatcgagtttctggacgacgcctccttcgccacctaccacaagaagagcacccggcaggagatcatcgacgccatccgcaacatccgcgcccacggcctcagcgtccgggggctgttcatcctgggctccgacgaccaggaggcgggcgtgggcgaccagctggccgacttcgtcatccagaaccacatccagggcaccctgatccagtgtatgtacttcgtccccggcacgccggtatacgaggccaaccgggaccggctgctccaccaggactggtcgaaatacaacggcaacgccgtccacttcccccgccgcatgaccccctaccagctccaactggagcacatccgggccagccggaaaatctactcctggcggcggctcttctccgccctggtgcgggaggaccccatccacaagctgctctttttgggggaatttttctggcacatgagcgtgcgcagcgatctgaaaaaggagctgccctacctcaagcggatctccgaacaggccgcgtgcgcgcctcactagaggcgcgcacgctcagcctgtcgaaaaagtcttttcgacaggctgccgaactttttgaaactttagaaacgtttcaaaaagttgtttgatccaacgcgaaagggaaccctgacggttccctttcacactatccttccctccgaatccttttcgctggagggtttatcgacagtctccgcgtgcgcgcctcactagaggcgcgcacgctttttcgtaccatatcatgttgtgactatggggtgcggaactcgtccacccgagtgaggagcagcttgcatctgggacagtaatagctctggttgggcgcgggcggggtgcggtaccagtactcccgccctttggccaggagaaagcccccgctcttctcgatgtcccgcctggagaaaaaaggactcagcaggctccggtacctgggaagccagtaggtcacccacgggcggcagccgtacagggagccgagcacggtctcgcccccgcagcaggggcagcgtttcagtctggaatccagttcttccaccattgtccgcacctcctgtttttcattccttcccacagccgcaccgaacctgccccgtcctcagtccgaaccgctgctcctgagaagcaggccctcccgctcccgcttcaggccgtcctgctcctccgccagctcctgatccatccgctccagattccgcagcgcgttgagcacccggacatgaacctcggacacgccttcctgggcgtcctggattttggactgtaccatccagtccatgaaaaaaccgtcgaagaagtagtcggcaaaggtggcgaactccccgatctgtacctggggaatctccatgtcccgcacgtctgccagctcggtgcggaagcgggataggcactgctgggcccagccgatgcccgcccgggcgtcgtccaggtgctcgtgcttggccatggtggccatcaggccgccgcccagcatatcccaggtgccccagtcctcggcgctgtccaggctgtccagcacggcggacagggcgctttccgccgtgcggccggcagagatggcctcccccacctcccggcgctggtgctccagctcgtccaactgctggtccagccgggcgagccgggcgccggtctccccgcccagggctttgagcagctctcccttctcctccagcagggcgtcccgccggatgcggtcgatgcgcaggccgtccttctcccgcagcaggaccccgatgcgcccgtcgagatcctccagatcccgctgggcctgatcgtactggagcttggcggccagggcctcccgccgctctttggacaggcgcacctccctgtccccggtgagggagagcagcagggcccgcaggccccccttctccagccggtccacgtcgtcctgctccttgcggaacacccggccggtctccatcacccgccggtcccgctcggcccgctggtcctggagatccttccactgggcctccatccgtccctgccgggccagggcctcgttcagctccttgagctccctgttgatctcgttcagccgctcgtccatgccgttcccctccttttcctttattctacggcttccgaagggaaagcgcaaggaaatccgctggacttccccgtcaaattcgcgtaaaatagccttatcccaatcttgtaaggagtaccactatggataccatcattcagatactggcccgggagctgggccggagcgaggcccacgtggagaacgtggtgcgcctcattgacgagggcaacaccatccccttcatcgcccgctaccgcaaggagctccacggggccatggacgataccgccctgcgcaccctggccgaccggctgcaatacctgcgcaatctggacaagcggcgggaggaggtcaagtccgccatcgagggccagggcaagctgacggaggagctctccgccgccatcgacgccgccgccaccctggcggaggtggaggatctctaccgcccctataagcagaagcgccgcacccgcgccaccgtggcccgcgaaaaggggctggagcctctggccgagctgctcttcgcccaggccgcggacggccccgcgccggaggaggccgccggggcctttatcgacccggagaagggggtggagacggcggaggacgccctccagggggccagcgacatcatcgccgagcgcatctccgacgacgcggacatccgcaagcgcctgcgggagctggtgtggaaaaagggatctctggtctccgccgccgcggccaaggagccggaggacaccgtctaccggctctactatgccttccgctccccgctgaaccgggtgcagggccaccaggtgctggccatcaaccgtggagagcgggagggcgtgctcaaggtgagcgtggagatggaccgggaggcggccctgatccccatccgccgggcggtgctgaaccccggcgcccccgccatggccttcgtccgcgccgccgccgaggacgcctacgaccggctgatcttcccctcggtggagcgggagatgcgcagcctgctcaccgagcaggccgacgagggggccatcaaaatgttcggcctcaacctcaagcccctgctgatgcagccgccggtgaagggctttgtcaccatgggcctcgaccccggctaccgcaacggctgcaaggtggcggtggtggacgccaccggcaaggtgctggacacggcggtggtctaccccacgttcagccagcggaagaaggaggaggccatcgacacgctggcaaagctcatccgccgccacggcgtggcccacatcgccatcggcaacggcaccgccagccgggagaccgagcagatgacggtggagctcatcaagcagctgggcggcggcgtcagctacatgatcgtcaacgaggcgggggcctcggtctactccgcctccaagctggccgcggaggagttccccgactacgacgtgaacctgcgaagcgctgtgtccatcgcccggcggctccaggatcccctggccgagctggtgaagatcgaccccaagagcatcggcgtgggccagtaccagcacgacatgccccaggcccggctggacgagaccctctccggcgtggtggaggactgcgtcaacgcggtgggggtggatctcaacaccgcctccgcccccctgctgtcctatgtggcggggctgaacaacaccaccgccaggaacatcgtcaagtaccgggaggagaacggggccttcaccacccggaagggggtgctcaaggtgcccaagctggggcccaaggcctttgagcagtgcgccggcttcctgcgggtaccggagagccgcaatgtgctggatcacaccggcgtccacccggagagctacggcgcggcggaggcgttgctcgccctgtgcggctacggcctgtccgacgtgaaggccggcggcctggacggtctgcgggagcgggtggccgcatacggcgaggagaaggccgcggaggcgtgcggcgtgggtgtacccaccctgcgggacatcgtgggcgagctgatgaagcccggccgggacccccgggacgagctgcctcgccccattctgcgcaccgacgtgctggagatgaaggatttgaagcccggcatggagctcaccggcacggtgcgcaacgtcatcgacttcggcgtgttcgtggacatcggcgtccaccaggacgggctggtgcacatctcccagctccgggagggccgccgggtgcagcacccctccgaggtgtgcgccgtgggcgacatcgtcaccgtctgggtactggaggtggacgagaagaaaaagcggatttccctcaccatgaagaagccaaagggctgaaccggccttgacgggccccgccgcaggcgggacgcggcgcatgccgcgccaagcgttccggccggcaggccggaaccctgaactcgcccgaatttacttcgggcgagttcagggaaatgaggggcccccgcgcggccatggccgcggggggcggcgataggaaaaagcggatttccatcaccatgaagtagccaaaagggggagcggtatgattctcagctttgacgaggcgggcgcgctgctggacgagatggcggaggagttcccgccggagttctacgacgagctcaacggcggtatctccctgctgcccgaggccagggaggatcccgagggggagcccggcgagctctacatcatgggcgagtactgcaacgacatgatgggcaaatatatcaacctctactatggctccttcgccgccctggccgagcaggaggactggacggcggaggactgggaggacgagctttacaccaccctggcccacgagttcacccaccacatcgagggccgcgccggggagcggggcctggagcgcaaggacgagcagttcatggaggaattccgcgccgggcgcggggaatagccgcccggcggcagacgaagcaaggcccggcggacgcgtttgcgtccgccgggccttttcctatattccgttcacccgtgctggggcaccaccgcgaagaactccagcgtctgtgtcccgtcgttgatcagggagtgggcgtgcccctccgggcagtagtgacagtctcccggggccagacgctcctcgccgccgccgtacagggccttacccgtgccggagagaacgtacacaatttcgctgctcccctcgtgggtgtgcaggccgatggagcaccccggctccagccgccctcgcatgatgcggttgcacccgtccgcaaacatcctggcgtgggtcactccctcgccgcccttgaacccggggatggcggtctcctccatggctccgaattccaccttcattccaactcctcctctgactacagcagcgatacgccgaaccggcccgccatatcccgcaggccctcctccagctcgtcccggccgaagcccgccgcctccagctgggcgtcggtcaggtcgttgagccgggcatagaagtccaccgccagctccagataacgccggtcgtcgggatcgctctccgcaaagagcagatcctccgccccgccgatgtccccggcgttgaccttctccagcaggcggcggtggagctcgtccagcgcggcgtcctccgccgtcccgccgggcacatagtcggtggaatccttctgaaacaccagataggcaatggagcgggccagggcgtccacctggcgcatcatccaatcctcggtcagcattccgcatctctcctttttatagttcccgcaccaggcgcaccgccacgcccacgatgcgggccgcgccggtctcaaaatccgacagggggaccagcttgggctcatagacggggttctccggctggagaagcaccatgtcccgctggcggcggaagcgcttgagggtggcgtcctccccgtccaccaggcaggccacaatctggccgttctctgccgtgtcctgccgccgcaggagcaccagatccccgtcccggatgcccgcgttcaccatgctgtcgccggtgacccgcaagtaaaaatagccctccggatcgggcacgtcggcgtgggcccatccctccctccgctgctcggccgccatgggcagccctgcccggatggtgcccaggatggggacggactgccgctgtccggtacggcggggcacatcgtagcccaacagccacagggggtccacacccagggcggcggccatggccgaggccgtgccgattttcggctcccgctggcccagcacatagcggttcagcgtctgtgggttcatccccaggcgctcccccatctgctcatagctgagtccctcttcctccatcaggcggcgcaggcggccgccaaggctgctctcccgctccatctgtccgtccctcctgtcccattattggggctatcctatcatattttatcaccatttgcaacagaaaccagaaaaaagcccttgactgttatctccatttggtgttattatagcctcgtaatcgaacataatttctatttcattcgttcagtatcaccatttggagatcccagatgcgaaaaaatgccccgccgactggcgagacattttttggtggaggagggtggattcgaaccaccgaagcgaatcgcaacagatttacagtctgccccctttggccactcgggaactcctccgtatgaacttgttggagctggtggacggactcgaacccccgaccggttgattacaaatcaactgctctaccaactgagctacaccagcataccagctcgtccacagcgaaggttagtttaacagacacggagggatttgtcaagggaaagtggtatatttttttacaaatttttttcgggaggaatgcgccatccagccagaggtatgggcggatccgctgcgggatgtgcagcgggttccgccgcggggctggtgcccccggtgccgctcagagctctacagcggggagcggggactctgtcccgcctgcctggccgagctggagcgcggccgcacacaacaagaggaggagaacagacacacaaatgaccttactggaattatcgggcgaataccgcgccagtgccgccgccctgcgggagcgggtgctgctcctggagcaccggctgagaggggcggacggggacggacgccgtctgctggaggggcgtatccggctgctgcgcgccatgtgccgggaggcccgggagctggccgtcctgtgtgagcgctactacgagagggggtactgccgcaatggcaaatacacgctataggcggggcggggcctacgccgccgacatggcggtatacgcccgcgccatggccgccgataactccgcccagctcagccgggtgaaacgcaacctggtgcgggcgctgcgggaggacgtgactccccgccagcgggaggtgctgctgctctactacgccgagcagctcaacacccgccagatcggggaaaagctgggggtggacaagtccaccgtagcccgcaccatcaagcggggggaggcccggctgcgccgctgcctgcggtacggcgcggaggcctttctgaacgcggcggcggagggaccgccctgatttttctacacccacggagtgggtgaaaggttgaatggccggccgttccgtggtatactgtctcccgaatgaaaatcgccgtttttcgcaaagggaggccgaggcattggaacttaatctcacacagaagcaggtgcagaccctgtccccccaaatgatgcagtccatggagattctacagatgggctcccaggagcttctggaatacatcgaggaggcggtgcaggaaaacccggtgctggagccggaggagacctatgacaagcaggacgagttctccgtcctccgccgcaagctggagtggctggagtccaccgacccgcagaaccgctactaccaccagcaggacaccgaggaggaggacagcccccttaacaacttcggcaccgtacaggacgacgacgagaacctctactattatgtcctctcccagctccgggtactggagctggagccagaggtgatggacgccggggtgttcctggtggagagtctcaatcagaacggctggctggacgagcctctggaggccctggctgccggccacggctgcgggccggaggtgatggcccaggccctggaggtggtacagtccctggagcccgccggcgtgggggcccgggatctggccgagtgcctcaagctccagctcgtgcgccgcacgccggtgaacgagctggcggtacgtattgtggagcgccacctggacgccctgtccaagagccgctacggcctcattgcccgggaattgaaagccagtcccgaggaggtgcgtgccgcctgcgacgtgatccgctccctcaacccccgccccggaaccggcttcgccgcccgggagaatctaacctacatcaaccccgacatcatcgtggtcagcttccccgaccacttcgagctgctgaccaatgactattacttccccaccctcaacatcagcggatactacacccgcctaatgaaggagagtgacgacagccaggtgaaggactatctgaccggcaaggtgcgccaggccaagtggatggtcaaggccatcgagcagcgccgctccaccctcatggcgtgcgctgagtgtattctggaattccaggagtcctttttccgcaaggggcccggccacctggttcccctgtccctggccgacgtggccgagcgcatcggcgtccacgagtccacagtgagccgggcggtgaaggagaagtatatccagtgctccatgggcgtctatcccctgagctactttttctcccgcagcctgggccccgccgccggcgacgaggccgcctcccccgacgcggccaaggcgctgctgaagaagcttatcgccggggaggacaagaaaaagcccctgtccgaccaaaagctctgtgagctcatgtccgcccagggctgctccctctcccgccgcaccgtggccaagtaccgggacgagctgcacatccccagcaccgccggccgcaagcaatatgaaacgtcaggagccttctgagcgatgaactttaaagctgtcttttttgatttcgactacaccctggccgacggcaccgaggccattgtggccgggttccggtacgcctttgggcggatgggcctgcccgagcccacggaggaagccatccgccccaccatcggcatggttctggaggacgagttcacctttctctccggcgaggccgaccccgcccgccgggcagagttccggcagctttacaccgagaaggccggccccatgcatatgtccgtcacccggctgtttcccggtgcgctggagctgctcaccgccctgaagcgccgtggtattcccactggcattgtcagcaccaagaagaccgccaccatccgcgacgtagcggaggccaggggcattactcccctgctgtcctccattctgggcggcgaccaggtttccgcccccaagccggacccggagggactcctggcctccctcaccgccctggggctggaaccccacgaggttctgttctgcggcgacaccgtcatcgacggggaggccgcccggcgggctggcactcacttctgcgcggtgctcaacggcaccaccacctttgaggaattccagaccagacgcatcccctgcgaccacgtggccggggatctctgggatctcaagcagtggctgggcctcaactgaatcaaatgtccccgccgcaaagcggccgcccgacgggcggccgcttttttggtatccatttttgtaaagccgggaatcctatgagggagagcggctttacacactctttacaattcgttgaaggacaactttacaatccgtctgtatactgataaccgttcccgaaggcaaccaaaacgatgcatgattggagaatgagtgtaatgaaaaagagaacccttgctctgatgctctccgccgccctgtgcgtcggcctgctggccggctgcggcagcggcaataacgatcccgtcaatactcccgccgccggcggcagcgagaccccctcgcaggaatccaccgcaaccctgagcggcaccgtcaacaccaacggctccacctccatggagagcgtgatgggctacctgaccgagggctttaaggaggtgcagcccggcatcacggtgaactacaccggctccggttccagtgccggcgtcaccggcgcccaggacggcacctgcgacatcggcctggcctcccgcgacctgaaggatgacgaaaccggcgtcaaggccatcaccgtggccaaggacggcatcgccatcatcgtcaaccccaacaaccccgtggccgacctcagcgtggagcagatcgcccagctcgccaccggcgagatcaccaactgggccgacgtgggcggcacggacggccaggtggtcttcatgggccgtgaggccggctccggcacccgcgacggcttcgagtccatcaccggcaccaaggacgcctgcaagtaccagaatgagctgacctccaccggcgaggtgatcgccgccgtggcctccaaccccaacgccatcggctacgcctccctgtccgccgtggacgagaccgtgaaggccatcaccgtgggcggcgtggaacccacggaggagaccgttctggacggcagctacgccatccagcgcaacttcaacttcatcgtcagtgacagcaccccgctctccgaggctgcccaggcgttcgtggacttcgccacctccgccgatgcctccgacctgatcgccggcgccggcgctgtgccggtagccgagtaatccgtccctctcttccggatcgccccctcgagcccgagggggcattcggcatgattacaccattacgaaaggccggttatttgccatgaaacagaagctccgaccgctggaagtctttatgaacctcctgttttttgtctgcggtctgatcgcggtcgtctttgtcctcttcatcagtatctacctgatcgtgtccggcctgcccgccatccgcgagatcgggctggtggacttcctcttcggcactgagtgggcctccaccgccgccgagcccaaattcggcatactgcccttcatccttacctccatctacggcaccgctggggccattgtcctgggcgtaccggtgggcttcatgaccgcagtgttcctggccaaggtagcgcctccccgtctggccagcctggtgcgcccggcagtggatctgctggcgggcatcccttcagtggtgtacggtctcatcggcatgatggttctggtgcctgcggtgcgggtggccttccacctgcccgacggcgccagcctgttctgcgccattctggtgctggccgtcatgattctgccctccatcatctccgtatccgagactgccctcaaggcggtgcccaaggagtacgaggaggcctcgctggccctgggcgccacccatatcgagaccgtgttccgggtgagcgtcccggccgcctccagcggcatcgccgcctctatcgtgctgggcatcggccgggccatcggcgaagccatggcggtcatcatggtggcgggcaatgtggccaacatgcccggtctcttccagtccgtccgcttcctcaccaccgccgtgtccagcgagatggcctacgcctccggcctgcaacggcaggccctgttctccatcgccctggttctctttctcttcatcatgctcatcaatattgttctcaatacgcttctcaagcggaagaaggggtgatatactgatatggaaatgaagcctctttccggccggcgcagagcctatgaccggattctccgctttctcctctacttctgcgccgccctgacctgcgccctgctgctcttcatcatcggctatatcttcttcaagggcctgccccatgtcacctggcagttcctcagcacccagcccagcttcatcaaggacaccatcggcatcctgcccaatatcctcaacacagtctatctcgtgggggtcaccctgatcatcaccctgcccctgggggtcggcgcggccatctacctcaccgagtacgcccgcaaccgccgcctggtggccgccatcgagtttgccaccgagaccctcaccggcatcccctccatcatcttcggcctggtgggcatgctctttttctgccagcttctggggcttcaggcttccctgctggccggctcgctgactctggtgatcgtcaccatcccaaccatcatccgcaccacccaggagtccctcaagaccgtccctcagtccttccgggaggcggccctgggcttgggcgcgggcaagtggcatatgattcgcaccgtggtgctcccctcctcagtggacggcatcgtgacgggctgtattctggccatcggccgcattgtgggcgagtcggccgccctgctctttaccgcgggcatgggcatgagcctgaacaactttttcggctcggtgggcaacttcatccactcctccggcgcctccctcaccgtggccctgtatgtgtacgcccgtgagcgggctgagttcgacgttgcctttgccatcgcggccattctgatgctgctcaccctggtcatcaacctcagcgccaagctggtgggcagaacattaaagaaaaaataaggagcccttaccatggacgaaaacatcatcctctccgccaagggccttgacctctggtacggccccacccaggccctgaagggcgtgagcatggatatccccgaaaagcaggtgaccgccctcatcggcccctccggctgcggcaagtctacctttctcaagacactggaccgcatgaacgacctggtgcccggcatcaagatcaccggctcggtgcagtaccgggggcaggagatctatgcccccaatgtggacgtaacctggctgcgcaagcagatcggcatggtgttccagaagcccaaccccttccccatgtccatctatgacaacgtggcctacggtccccgcacccacggcatcaagagcaagagcaggctggacgacatcgtggagaagtcccttcagggcgcggccatctgggacgaggtaaaggaccgcctcaagaagtcggccctgggcctgtccggcggccagcagcagcggctgtgcatcgcccgcgccctggccgtggagcccgacatcctgctgatggatgaggctacctccgccctggaccccatctccacctccaagatcgaggatctgattgccgatctgaagcagaactataccattgttatcgtcacccacaatatgcagcaggccacccgcgtgtccgacaagtgcgcctttttcctgctgggccagctcattgagtttggggacactacccagctcttctccatgcccagggacaagcgcaccgaggattacatcaccgggcggtttggttaaaaaggaggccccatgagaaagacctttgacgcggagctccaggagctcaactatgaaatgatcgacatggcggcggcggcagaggacgccatcgacgtggtcaccgagtctctggcctccggcgacgacgcggcggccaagtccgccgtggagatgacccgcagcatggaccagatggagcgggacattgagaaccgctgcctgcgcctgctcctccagcagcagcccgtggcccgggatctgcgcaccatctcggcggccatgaaaatggtcaccgatctacagcgcatcggcgaccagtgcgccaacatcgccgagatctccctgctgctcaaggagcagaagcagacccgcaccctggccgacatccgcaccatgagccagaaggccggcgtgatggtcaagcgctccatcttcgcctacgtcaaccgggacaccgaggccgcccaggctgtcattgccctggacgacgaggtggacgccctcttccgcaccatcaagggggagctggtggagctcattgcgggcaaccgggacgaggccgaccaggccatcgacctcatcattatcgccaagtacctggagcgcatcgcggatcacgcggtgaacatcgcccagtgggccatcttctgtgtgaccggcgaaattctcgggtaaggaggtgtccccatgtccaaggccattgcggtcgtggaggacgacgagagtatccgtgagatgctccgctattattttcaatcggtgggctacgccgtccgggcctacgagtccggcgaggccctctttgccggcgaggagggcctcggcctgcccgccctttacatcctggacatcatgctccccggcatggacgggctggagattctccgccgcctgcgggaggggcgggacaccgccgacgtacccgtgatcatgctcaccgcccgctccgccgagatggaccgggtggccggcctggaaaacggtgccgacgactatgtggtgaagcccttcggcatcatggagctccaggcccgggtcaaggcggtgctccgccgcaccgagcgccggggcgaccgggtactcacctggggggacgtggaactggaccccgccgcccgggaggtacacaaggccggaaagccggtggagctgacctacaaggagtttgagctgctcaagctcctgttttcccgccggggcgtggccctcacccgggacgagattctccaggccgtctgggactacgactacaccggcgagacccgcaccgtggatatgcacgtcaaggccctgcgccaaaagctgggcgaggacatcatcaccacagtccggggcgtgggatataaaatggtctgacggcctccagggggattgcatcccccctgaatacgcggccgccgcgccggccgggcggcggcggagtgggcaactgtgtcctccggcgaagtacccgcaaggggcacgccatatccgtaaggcagcaaagccgccaacggctatgcagtaaattcgccttcggacgttctgatttcttttcacccgcggggcaggggaaacactgcgaggcggccccgcaggaaacacccgattgggaggtctgaccagtgaaaaaacgcatcatcggcgccacactcatcaccgtggtgtgcgccctgctcatatccaacctagtgggtgtgctcctgttccgcagccgggagatggacgccgcccgcaacacccttcaggagctgctggtgctgatggacgctcagagcgccatcaccgatcccgacggcctggcccaacagttccacgccgccgcgccggacaagcggctgaccatcatcgataccgacggcaccgttctggccgacaccgaggccaacccccagacgctggaggaccacaacagccgccccgaggtggagcaggccgccgccaccggctggggcgaggcggtgcgccactccgaaaccctgggcacctccatgttctacgtgtccaagcgctttgccgacggcatggtgggccgggcctccatgcccctgtcctccatcgacagcctggtgtggaacggcgtatggggcttcctcatcgcctcggcggccggactgctgctggccctgattctggcccgccgcaccgccaaccgggtgatggccccactcagcgccgtgggcagcgccctccagagcgtgctggacggcacccgcgcctccgggctggaggactaccaggccgacgacgagctgcgccccatcctgcgctacattgacaagctgatggagcgtctgggcggctatatccagtccatcaccgcagagcgggacaaggtgggcctgattctggactgcatggacgaggggctgatcctgctggacgaggcggggaacgtgctggccatcaaccgggcggcccgcaccctgttcggcttccccgagggggaggaggacgacggcgccctgctcctcacccgcagccgccgcctgcgggaggccattcaggagtcccgcgtccgccactcctccgtggtgctggacgtggatgccctcaccgaggacgcccagagcctgcgcctgtttgtctcccccgtctccggccgccagtatgaggggcaggccgtgggcacgtccatcctcatctccgatgtcaccgaactcaaaaaggccgagggcatccgcagcgagttcaccgccaacgtctcccacgagctcaagacccccctcacctccatcaagggcttcaccgacatgctggcctccggcatggtggcctctcccgaggatcagaagcgcttcatcaccatgatcggcgtggaggtggaccggctcatcgacctcatcaacgacattctcaagctctctgagctggagtcggtcaccatcccccagagcgaggagcgctccgacgtgctcaccatcgcccgggacaccgccgctttcctcacccccaccgccaaggccgcggaggtcaccctctccgtagacggcggtcccgccaccgtggccgtcccccagggtcggctcaaggagctgctgctcaacctggtgggcaacggcatcaagtacaatgagcccggcggcaccgtgcgcaccgccgtctccgtccgggacgggcaggccgtcatcgccgtgtccgacaccggcatcggcatcccccccgaggcccagagccgcgtctttgagcggttctaccgggtggacaagggccgcgcccgcaagaacggcggcaccggcctggggctggccatcgtcaaacacatcgtccagctctacggcggcaccctgacgctggagagcgcggtgggcaggggctccaccttcaccgtgaccctccccctggccaaggacaacgcctgaaaaaagggcggctgaacattcagccgccctttttctgcgcctcggagtagcggtggcaggcgggcgtatccgtctgcttgtaccggatgcggggttctccgcagtggcccagcttgatgggtatgtaccaattccgccccctttttacatagtgccggcgaaaatgtcggcaggtttcacaggtcttttccccgtccattgcaatcacctccttacataatatataccattaggtcaccatatgcaacccacttgtttaaaaaaagtggtaatgttatagtacctatataggaggtatttaaatggctgaatctgttttggtaaatcgtaagaagtttatatcttctcttgacaacaaattggttgagccattgaatgcgctctccaaaaagacccgtgttccaaaatctcggcttctggatgaggcaattgaagatcttttaaagaaatatgaaaaaaaggacggctgacagttcagccgtcctttttcgattcccggcgttttgcgtaggggccgacgccccggggcggcctctcttgcacctattggcctgtgcattcgcggctcagtaggggcggcctttatggccgcccggcctgctccgtaggggccgatgcccacatcggcccgccttattccgggctgaaacgccttccatgggaacctttttcgtatctgttttcttgtcatgcctccggcgggcccctttctgagtggccagaaaggggcgaaagagccagccgggaaggggggatttcgatttccccccttcccggcacccatcccccttaaaacgaccaaagagggggccttcgggcccccatctttggaatctcccccaagttgttctaccgatagcgcaccggcggcgggggcttactccgtaacgcccccgccgcaccggcctgtatgggaggaaaccggaagacggtgcctggacataggggcgggcttgtcccccgcccgcagatggttcccccgtgtaggggccgatgcctacatcggcccctacgagaggacggcggcggcaagcccccgtaggggccggacactggccggtctttctctgccataccttccattccacacacttgtaggggcggcctttatggccgcccgcgggcgaccacaagggtcgcccctacccctggcaaacaatcaggccccggcgtccgcaccgttcggtgcagacgccggggccaatttgacatcgattagaactccgcgttgcccacggtgcgggggtggggcagcacgtcacggatgttggagattccggtcaggtacatgaccatgcgctcaaagcccaggccgaagccggcgtgcttgcagccgccgtagcgccgcagatccaagtaccaccaatagtcctcggggcgcatgcccagctcctggatgcggccctccagccgctccagccgctcctcgcgctgggagccgccgatgatctcgccgatgccgggcaccaggcagtcgcaggcggccacggtcttgccgtcgtcgttgaggcgcatatagaaggccttgatgtccttggggtagtcggtgacgaacacgggctttttgaagatctgctcggtgagatagcgctcgtgctcggtctggaggtcggtgccccactccaccttgtattcgaacttgtcgttgttctgttggagcagctccaccgcctcggtgtagctcacacggccgaagtcggaggaggccacatgctccagccgctccttgaggcccttgtccacgaaggagttgaagaagttgatctcgtcggggcacttctccatgacggtgcggatgatgtgcttgatcatggcctcggccacgtccatgtcgcccttgaggtcgcagaaggccatctccggctcgatcatccagaactcggcggcgtggcgctgggtgttggaattctccgcccggaaggtggggccgaaggtgtacacgtcgccgaaggccatggcgaagttctcggcgttgagctggccggagacggtcaggttggcgggcttgccgaagaagtcctggctgtagtccaccttgccgtcctcggtgcggggcgggttctccaggtccagggtggtcacccggaacatctcgccggcgccctcgcagtcagaggcggtgatgatgggggtgtggacatagacgaagccccggtcctggaagaagcagtggatggcgtgggccgccacgctccgcacccggaaggcggcggagaacaggttggtgcggggccgcaggtgggcgatggtgcgcaggtactccacgctgtggcgctttttctggagggggtactcgggggcggaggggccctccaccgccacggaggcggccttcacctccaggggctgcttggcctccggggtgagtaccacggtgccggtgacggacagggccgcgcccacgttctgtccggcgatctccctgtagttgtccagggcgttggcgtccaggacgatctgcaggttcttgaagcaggagccgtcgttgagctccacgaagccgaaggtcttcatatcccggatggtgcgggcccagccggacaccagcacctctttcccgccgaactgctcctggtcggcaaagatctgtgcgatttttgtgcgttccattggtcgctccctctattcttaaaaataaagtatcaatgggtagtagtataccatttttcaaccattttgcaagggctgagggaaaaaaggcaggactacctccgttcgggtccgccgaagataagcgcctcccgcgcctcgtcagacagggtacggtcgcggaacccgtagaggaggacccccagggcggccagggcggcggccagggcgtactccaggccgtccagcgcgccggggctgaacgggagaaggatgttgcccgccaggaaaaccgaggcggccacccccagcacagccgtcacccgcccgccgggcatgcgcaccgggcggcggaggtccggccgggcacgccgcaggcggagcaccgcggccagggacatgatccacatgacgatggtggccagggaagcgatattgatgaagggcagaaagaagagcctgcccgtgaagggggtgagcaccacgaaggcggcggtgaaccagatgcagcgggcgggggtgccgtatttcgggtggagggcggaaaacgccctcgacaccagtgcaaagcgggacaggccgtagagcatctgggcggaggagtagagggtggagttcatcacccccaccgcgcccacaaaggcggtggccaggaagagcacccgcacggcgggcacgccggtgatggacaccagcacgtcggcgaagggggcggtgcggcccaccgcctcccgccagggcatacacccggccacagcggtggacaccaagcagaggatgcccgtcaccaggaacaggcaggtgatgagggcggctcccgccttgcgggcggcggggccggaggcgtcggcggcagccttggacaccgtctcccacccggccacggagaacaccagcagggacaaaagggaggccgagccggcaaagtcgaagtccagccccccatcggaggcgtacaccgccgggtcgaagtgggtaaagcacaccgccagccccacggcacacatgatcagcagcaccaccgtggccagcttggccagggaggcgcacacgttggccccccggagctgcacccacaggatggcccccgccagggccagttggatggccacattgggcagggtgacggggaaatcccccagctcatagagcaccgccgtccgccccagggcggggaacagctcgtccagcagggagacggcggccagatccacccagcagaacacgatggtgttcatcaggatgcccgcccaccccacggcgaagcccccccggctgccgaaagcggcgtaggagtacaccacctcgccgccgggcagggggagcatggggatggcctccatgtaggcgaaggcaaacggcagttcaatgatgatgcacagggcgaaggccaccaccagattgagcggtccccccgccgtctccagccacgtgcccgtcagcagcagccagctcgtgcccagcatacacccgatccccatggccaccaggccgaaatagctgatgcccttcccgccggactttcccattcagatccctcatttttcctcagatgaacctattatagcaccttccggccggttttcccagccccccggcccgactttcgcagagagactgcccacaccagccacgccagtgcgctccccagcagcggcgcggcacaccaccacaggagcaggaaccatcccatgaccatccagtccgccgcgctcaggaagagcacccctggcaccgccagaagcgccagaggcaccagaagccgccacaccgccctggcccgtcggcacagcagcaactggagaaaaaacatagggaacgcatggaagtacaggagcaggagctggtgccagggcggtatgttcagaggcagatcggaaaaggccgcggcaaaggccgcagtatagaccgccatggtgaccgcgaagcaccccagaagccattgatccgttcgtctcataagcacacatcctctctcttcaccgggagctgccggtgacggctccgcaggcccatagggcgggggcttgcccccgccgcttttcaaagggcgcccggcgcagctccaccccaggtgcgtccggaaaaggcatccggcccgttaacccgttccgcccctctcccggggatacgcccccgccgcgttgcccagcagggcggagatggatggcacgaggcagagcgcgggagtccgctttcctacgacgatcagcaggcacagggcgcataccactggaaaaagggggcacaggccgtgccgctttcccagggacatccctatggcgaggcagccaaagggcaggagatagacccccgccagcaccgtggctaattccccggcgaggccgcccagcagggcgggcagaagggtgcaggccagcagataccaggggagccagaggactgtagccctcagattgaggcgaaccgggccgggcgcaaagcgccagaccagggcggggatggccagaatcgccagccagcacgccagcgcaaccatcactcccccgcgcctcccctccgccgccgcagtgccgcgccggtcaggccgcccgccagggcggcgagaaaggcgatggggagcatgtcggcgtcggccacattggacaccagccttgccagcagggcgaagcaaaacaggaaccccgcgcacgccacgggatagagggggcagaagccctgccgcttccccagggacagggcggaacagaaggcgccgacgggcagcaggaggtaggggtagagcaggccggagagcaccggcacgtcgccggcgtcgcacagccgcagcacaaagggcagaagcagacacagcagggcggcgaaggggacatagggcagggtctcccgccagtggaacagggagggcccgggggccaggcccagccgctcccggatggcggacacctccgcgtaccagcccacccagcggcccagccacaccagcagatacaccagcgccaggggcaccaggaaggccgccgtctcacgcacaccgaagttgagccccacccacagccccacggtggccgccgtcagggcgaagtgggccagcgtccgccccaccagggcggagccgtccccggcgaagggtagggtggccacccccacctccgccccgaacagggcgtagagagcgaaggacagggcaatccccaccccctccagcccgcgggggaaaccgcagttcaggaacgccagcgcgagggcgctgggcgagccgatgaagagggcgccgatcccccaggccgccagcccgcaggcggccatccccagcagagcccctgccagcgcccggtggagggccctcctcttgtcgtcgaacagcatgtcgttccctcctttttacagtcccaaagcctctttgatcttcctcacgtaccgccgggacacatagctcaccgcgccgccctccagcgtcacccggatggtgccggtaagggagagatccagggcggtgatcttccgcaggctgatgatctccgagtgggagatgcgcacgaaggtgtgccggtccagccggccctccagctcgtacagccgctccttcagatcgtacaccccgccgggggtctggcacttcacgcccttctcctcgccgtagcagcggagaatgtcctccgcggccaggggaacggcccggcccccctgccagccgacgaggacgccgcccccttccagccgggcggccagagccttcacctcgtcggtgagggcgggggcgttgatcacaaccgacatcccgtcgcagcccgggtcgatgcgcagctctaccttcatgcccttcccccctttcaaccccactatagcgaaaaaagggccgtctgtccaccgatttcggacagacggccccaatgggccgatattcggtttgctccccgccggggcgcgccacagagaccggatgctccgggttcagcggaacagggcgctcgccctgtcccctgcaggggcggccccttgtaaccgcccctacgcgatggcctcgacccccacctcataggtccaggtgccgtcggcattctgccgggcggtgcagtcggtaaagaaatacgcccccaggccggaggcccacttctgcgcctcaaagccctcctcggcggagccggacagggagaacaggcagccgttttcccagcggtagagggccacgctgtcctcgtacccctccgccggctcggtcatgggggtgaggtagcccgcctcccagatctcctccagagtaccggtgatgggcatcaggccgtgggcgttcccaaacacccaggccagggcggatttctcactctcagccaggtcggtgaggccggagagatccacccccagctcctccagccctgtgttgagggcagtatctacctcccacaggtcggacagcacctggagatacagcccgcagcggtcatccgccggctcctccagcacggtcacgccggtcacatggccgaacttggcgggataggtctccagaatcattccgtcaaacccgacctccaccatcgccccgtcagccaggggcccatccaccgccagcccctctgtatccagggtatacacgtcccccgcgccccccgggccagccagcaccagctccccttcctccgccccatccacaatgcggcaagtcattttttcgggagcccccgcagtcaggccgggctcctccgagggggagcccgccggggttccccccgcgggggcggcctggtttccggtggatgcacacccggccagcaggagcacaagggcgaacagcagcaggctttttttcatggaacattcctcctttcccctcttggacggcgggacgtggaaaaagttcctgaaccggggagattcctcttgacagaggccctctataagcatatgattatatcaacagcttatgtttaggaggagaggccatgactcagcgggaacggcagattctcaagtggattgaggagaaccccctgatctcccagcaggagctggcggacaaagcgggcatcgcccgctcgtcggtggcggtacacatctccaatctgatgaagcagggccatatcgccggcaagggctacatcgtccgcaccgctccttatgtggtagtcgtggggggcgtcaacctggacatcggcgggcggccccacggggagctggtggcggcggactccaaccctggccaggtgcgcatgagcctggggggcgtggggcgcaacatcgcccacaacatggctctgatggggctggacgtgcggatgctcaccgccttcggcgacgatatgaacgcccagcgtatcgccgcctcctgcggcgagctgggcatcgacatcagccagtgcctcaccgtgcccggcggggccacctccacctatctgttcatcaccgacgggcacggggacatggccctggcggtcagcgacatggagatctatgagcatgtcacccccgcctttctggccgggcgggcccggctgctccaaaatgcccagctcctggtggtggacaccaacatcccggcccagtccatcgcctggctggcggagaatatccgcctgcccatcttcgccgacccggtgtccaccgccaaggcggagaagctgcgccccgtactggggaagctccacaccctcaagcccaaccggctggaggcggagctgctctcgggcgtgtccatcaccgacgcggcgagcctcaacgccgcggccgacgccctgctggccaccggcctgcggcgggtattcatcagtctggggggcgacggggtgttcgccgccgaccacagcgggcgggtacacgtgccctgctgtcccggagagatggtgaacaccaccggctgcggcgacgcgggcatggccgccatcgcctgggcctatctggagggcaccgggctggaggacaccgcccgggccgccatggccgccggggccatcgccatggagagcgccgagacgatcaaccccgacatgagcgcccggctgctccgccggagggcgggcttcggggagggagtggagacgccttgaccttctggaccgcgcaaatcctggggctgatcggctccctgctcgccttcaccgccgtccagaccggcagccgccggaagatcatcggccttcagcttgtgtgctgcgtgctctgggtcgtccagtacgtgctgctgggggcgtggacgggggtgctcatcaacctgctgggcctggcccgcggcgtggtgtgcgcctacaacgaccggccctgggcccgcagccgcctttggctggccctctttctggcctgttatggggcggcccccctcctcacctgggacggcccctactgccttctgctgggcgcggccatgatgctcaccaccgccgccctctggacgcggaacatgcgcctgacccggctgctgtttctcctcaactcccctccggtgttcgcctacaacctgatcgccggctcctataccggcgccgccatcgaggtggccgccttctgctccttcgcgctggccgtgtggcgctttgatctccgccgcccggccgccggcccttcctctccggcctgatcactccgcaatccgtattttataaatatattttacaggaggtaatcaccatgaatctcaatccgtatctggacgtcgcccctgaagtagccgccgctgtggccgcgggcaagcccgtggtcgccctggagtccaccatcatctcccacggcatgccctacccccagaacgtggagaccgccctcaaggtggagcagatcatccgcgacaacggcgcggtgcccgccaccatcgccattctgggcggccgcctgaaggccggcctcaccgccgaggagatcgagtatctgggcaagaagggccaggacgtgaccaaggccagccgccgggatctggcggtgctggtctcccgcaaggccgacggcgccaccaccgtcaccaccaccatgatgatcgcccacatggcaggcatccaggtgttcgccaccggcggcatcggcggcgtgcaccgcggcgccgagaccaccatggacatctccgccgatctggaggagctggcctccacccccgtgatggtggtgtgcgccggggccaagtccatcctggatttgggcctcaccctggagtacctggagacccacggcgtgcccgtcctcggctacggcaccaaggagctgcccgccttctacacccgcaagagcggcttcgaggtggactaccgggtggacacccccgcggagctcgccgcggccttccgggcctccctggatctgggcctcaggggcggcatgctggtgaccaaccccatccccgaggagttcgccatggaccacgaggtgatcaacagggccatcgacgaggccgtcgcccaggccaacgcccagggcatccacggcaaggccaccacccccttcctgctggccaaggtgaaggagctcaccggcggtgacagcctggactccaacatccaactggtgttcaacaatgcccggctggccgcccagaccgccgccgagctgtgcaggctgggctaagtccccaattccccaggtcccctgtgcgtcccaaacgcacgggggaccttttttcggttttggcggcggaatatttctttttcttaacattcgcccccaatccgttgcatcccgtccggccgggacgtataatggctgggaacggaacaaagtttctccttgtatggagcgaaaagaggcgattttgaatggcgcggatgcggcattttctcaaacggtgcccggcggttctgctgagcgcggccctgctggccgctgctgtcggcactgccgcggcggcggacactcccgcccccaccctgggcatctacaccaccggggacatgggggggcggctctaccgtgaggaccccgtgaccggggaggcagtggagtacagctatcagaatgtggcctccgccatggaggcggagcgggcctcggtggacgccgccctgctgctggacagcggtgacgcggtggacaacgggctggtccaggacggcggcgcggcggaggccctggccctgcgggccatcggctatgacgccctggtgcccgctgtgggtgaattccgcttgggcccggaggcccgggacgatttcttcgccgccctgggtgaagcgtcggaggacggcgccccggtgcgcgtcctctcgggcaactacctggacgaggacacccaaagcccggaggaggatgcctacgaggtctttactgtggagctgggccggcgcgcggtgcgcatcggcgtgctgggcctgggcgccatggaggcgccggaggagctccccgagtcctttgtctccggcgtgcgctttgcccaccgggacaacacctccggcagctatagttgggagtggaccggctactggcaggagcggctggaaaaggagaactgcgacctggtggtggtggtctgccacgccggacaggacgaactggcccgctttgctgcggagaccaccggcatcgacctgctggtgggcggccatggcgaggcggcggcggagaccctccagaacgccgacggggagccggtctccctggtcagcggcggcggcacgtccctgacccgcaccacaattaccctctcccccaagggggaggtcgtggtgggcgagagcaccctgctccccctgtccgactatgagccggacgaccgcctgaacaaggccctatccgccgcccaaagcgcagcgtctgaccgcatgcaggctgccgttggcaccctgtccggcgactggtcagaggagggctctcccctgtatgtgcagagcgccacggtggatctggtggccgaggccatgctgtgggccgccgatgccgacgcggcccttctctctcccgccgccctgggcggcgcttccgccgcttcccggttctccggggaggatgacactgcggtgctctccctgcgggactgcgccgcgctggcccccggggacagccccgtcgtcctggtggagctcaccggcgccgagctgcgccagtggctggaccgcagcgcggaggcctatcaggcggagccggacggctccatctccggcggagagggtgccgacgtgctctatggtatggactacaccctctatctgggggcttctgagggacagcgggtggacggcctcgcctttaagggcgccctggtggacgacggacagaccttccgcgtagccgtgtccgccgaccgcctgtccgcccccgacttcccggactgcacccccctctggtccgccgcccgtgacagccgctttgccgcccagagcggcatccccgccgcagtcctggccgggtatctctccgagcagacccacctgctgggcatgctctccccccagcggagcagcacatggagcctctacaccggctccgtcaacggcccgctgaaccgcctggagtttgtcaccatgctctatgagatggccggaaagcccaagcccggagccagcgccgcctttatcgacgtgtccaacagcgacgcggcggtgtgggccgccgagaccggcgtggtcagcggcaacgggacaggcaaatttctccccacccagactgtcacccgggagcagactgccgtcatgctctacaattacgccaaattcctggggctgaaacccccgtcgtccggcccctccgccaccgcgctgctggactgcggcgaaatcgcggtctgggcccgcccagcggtggagttctgtatccgaacgggggccctctccgccgccggactgcggggggacctcttcctccccaggggcaccctcacccgcggagaggctaaccgctgtctggccgccttcgcggactacatcgaagccaactgaatccaataacagcagccccggcggacaaatccgccggggctgctcagcctgtcaaaaaagtcttttcgacaggctgctggacattttgaaactccgaaaaagtttcaaaatgtcgtttgatccaacatgaaagggaaccctgacggttccctttcacactatccctccctctgaattctttagcaggaggggttatgagcaacctgagcagccccggcgggcgaatctgccggggctgctttctatcctctcctactgcgatgtatctgcctctatagagcgttcgagggccgcaatccggtcattcaatgcctctatgtccggcgcctccaccggcgcgttgatcagtccataggcccccttgagggccaggatgcgtcggacgctctcgtccagccgctcctccgggatgcggccgctgtccaccgcctccaccagggcggcgtgggcctcggccaggttgtccgcgccgtggcacaccagcagcaggtcacagccggcctccacggccagtacggcggcctcccccataccgtaggtgttggaaatggcccccatggtcaggtcgtcggtgcataccacgccctcatagcccatctcctcccggagcagccccgtcaccacctcgggagacagggaggccgggttgtccgggtcgatctgactcaggaggatgtgggccaccatgatggcaggaatggaggtgtcccccccataggtaccgtagacgcaggtagtgtcgatggcctgtcggaagggccgcagctccagctcctccagttcctccaggctcttgtccacaacaggcaggccgtagtgggagtccaccgccgtgtccccatggccagggaagtgcttggccaccgggatgacgcccccagacaggatgcccagggcggtctcattggctgctccggtgacggttgcggcatctgtcccaaaggcccggtcgccgatcaccgtattctccgggttggaccagatgtccaggctgggggcgaagtccatgttgaagccgaaggcagcgcactgggccgccagggtctggcccagcgtaaagcaggcatccatccgagcctcggggtcggcaatggaaccaaagtccagggcggagggcagatcggtcacctccggcggcatccggtccacccggcccccctcctgatccacgcagaggaacaggggagtgtagtccccgttgagctccttcagcccgttggtgagcgccgccagctgctccgcgctctccacgttgcggccaaagagaatcacgccgcccacctgatagccctggatggcctgcaccgcgtcctcccccggctctgtgccctcgatccccgccaccaggagctgggccgccttctgctccaccgtcatccccgccagggcctcccccaccggatcgggggtgggggtgggggacggctctggcgtgtgggtgggcaaaatggtgggcgcgggggcggtgggctgagtcggttctcccccctgtttttgacatccggcaggcagagcgaatacaattagtaataaaatagccaatagcatccgttttgtcatcgttttttcctccctttccgccccttgggcacatgcatggcccgcctgtctttcccccggcgcgggggcatctcctcccggcgctccgccggacgggtgggacgcggggcaagctggccgccaggcagtacaaaatcgatctgcccggtggcgggatcggcggcggcgcacaccacctccaggggcataccgaaggtgtaggccgtcccgcccccctcctccgtcagcgtgaggcgggtctcgtcgtagtggtagccccggccgggcaaggcctccacccccagcaggccctccaccccgccgggcagcaggacaaacaggccgaagcgggtgacgccggacacggtgccggcaaaggtctcccctacatggcccgccatgaattcggccatgtagcgcttctcaatctcccgctcggcgctctgggcggccagctcccgctgggaggactgcaccgccgccttctggaccgcggcggccagtcttctctccaccccgccggacagcctcccgtccagcagggcggtgaggatgcggtggaccatcagatcgggatagcggcggatgggggaggtgaagtggcagtagtatttggccgccaggccgaagtgccccaggttttccccgtcgtaccgggccttcatcagggagcggagcaccatcatggacaccgccgcctcctctggcttccccttcgccgtgtccagcagcttctggagggaggggccgtcggcctccttcaaatcgtagcccaggggggccagcatggcccgcagcgtctccgccttgtccgtggagggcttctcgtgaacccggtagacgcagggcttgtccagccggttcagatgctcggccacgcactcgttggccgccagcatgaaggactcgatgagcccctcgctgatccccggcgtgcggagcaccacgtccaccggcgtgccgctctcgtcgcacaccacatagctctcccgggtgtccagctccagggcgccccgccgcctgcggcggccctccagcacccgggacagcgcggccatgtcctccagcatggggagtatccgggcgtaccgctctgccagggcggggtcgctgtgggccagcagcgcgttgcagtcctcataggtcatccgctccgtggtgcggatgacgctcttggcgatggtgtggtccaccacctccccctccggcgtcagggtcatgacgcaggacagggccagccggtccacccgggggttgagggaacagatgccgttggacagctcccggggcagcatgggcaccacctggtcggcaaagtacaccgaggtcccccgctcccacgcctccagatccagggcggagccggggcgcacgtagtggctcacgtcggcgatgtgcacccccagcacccagcggcccaggccgtcccgctccaggctcaccgcgtcgtccagatccttggaggaggccccatcaatggtgatcatcaccttgtcccgcaggtccagccgcccggcgacggcgctctcctccaccgcctggggggctgccttggcctcgagcatcacggcatcggggaattcccggtcgatctcgtactggtacagcagggcggccacggcgctcgcccggtccccggcggggccgaacacctcccgcagggtgcccatgggcgggtgcttggcgcttccgaagctggtcatggccacggcggcccggtccccggcccgcactcccttacgcttggtgagcacctggatggggctgggcagccggtcactgtccggccggagccacagcccccggttgtgccggaccagcacgccggtgaccgtcttgttggcccgctccaccacggcggtaatccgggcggtgcgccgccggccctcctcccctccctcgtcctccggccgggccagcacccggtcgccgtgccacgcgccgccctccgcccggggcggaatgaaccagtcatcctcccgccccccgccgtcctccggtaccagaaagccgaagccccggctggtggcctgatagattccggcgagcccgccggcctgcttatcctgtttcatatcatcgttccctttcttccgcactccggtcctccggccgggatgctccgggtgccgccgcccacaggcgcggcgtctgctgctattgtaccataattttgtctcatccggcatcgaaagatacaaaaaccgccctcccgaacgggagggcggtttttgtgcttcttagagcaggcacatgacaaaggtaattaccacaaagccgatggccacccatttggtcagcttggccagcttggcgtcccaggtcttggcccggttcttggccataaaggtatccgccacgccggcgatggcaccggacaggcccgcgctctttccggactggagcagtaccacggcgatcaggaaaatcgcggccgccacgtccacaatgctcagaatcaactgggggatattcacgctgcatcgtcctttcggccccggatggggcatcattcgtccatacgctatggtctatgggcgcagttatcccgcgccgatttcaaacgtggattctatcgtagcacatttccccgccgatttcaagcattttttcgcatttctcagccgccccgcacgatccggcggctgccccagcaggtggccaggaaatagccgccgtagatgaccagcagcagaaccgccgccacggcgctggaggccgccgcgtccaccttcccgacctcggcgatcaccgcgttggccgccgtcatgcccacggcggcgtggaccagcgccagggccaggggcaggaaaaaggagaggaatacttggatatccaccgaccgggcccgcatccgctccggcgcgcccagccgggccaggagttggtagcggggggcgttgtccgccgcctgggtgagctgctgaagggccagcaccgccgccgaggccagcaggaacaccacccccaggtacaggccgatgaagagcaccagcaccttggtacccataacctccatccaggtcccgatacgggtggtgcagccgtagacgcccagggtgtccagggtagacagcgcatcctgaaaccgcgcctccgccgcatatttgtccccggcatagtcggccaggaaataccagccgtcgatgtgagctccctgggccgcgtcatccggccgaacggccaggccgtggtgcgcccggaaggcgtatgccgcgtcctggccccagcggcccgcgatggcgtcgtgcatggattgggtgatggcccgttcttccccggtgcgatacaccggaactgccagcgagaaggcgcactctgcctccggatcaaagcccccctccgccagcagggcggggaggtccacctctccctcctgctccgggtagtagagcagctccacgtcctggggggcctgctcggccgtcatctgctccaccgtgttgttgagccctaccgagctggcggtgatgccaatggccagcaggagcatgaggcagatcaccgtcatggagcggtaggtggtgttgatgcgggcgttgaactgccgcaggacaaacatattgaggttcctgtagtagagccgcttgctgctctggcatacccgcagaaggaacccggacagggagcgaaagaagagcagggtgcccagactgcccaggccgatcatcacccaaaacagcgcgtccacccgcagcaggccccgggtgaggagcatggcgtaggcgacggccagcagtcccgcccccgccagaaagagaaccaccgacacccccaggctctgggccttgagctcctggttcacccgccgggcctgcatcagatccaggagcctgcaccgggagacggcaaaggcgtggcagagcattaccagcaggaagataagggagaaggccagggccgttttccccatggccgccagggagacagagaaagtgaactccgtcatgggcacggcgaagagcccggcggtgaaggcggacaggccccaggccgccagcacccccagccccaggcctgccagcagggccagcacccccatgcacagggtttccagcaggagcaggcgggccacctgcccccgctccatgcccagcagcaggtaggtgcccagctctcccttccggcggcgaatcaggaagccggaggcatagaggatcagaaaggccagcaccacccacacaaagacggagagcatgccgatgagctcccggatggcctgggccgtgggagcctggggaccgctgcccaggtattggaacaccgcctgggtttccagggagttgaacacatagaacaggcacacgccgaaggcgatggtgagaaaccacactccgtagtccttcatgctgcgccccacatttttgaaggccagcttagagaacatcgctctgatcacctcccaggcgggtcaccacgccgatgatctgctggaaaaacgcccggcggctctgcccgccccgctcaagctgggtgagcaccgcaccgtcctgcaaaaagagaatgcggcggcagtagcttgcggtgaaggcgtcgtgggtcaccattaggatggtggcccggccttcccggttgagggcctcaaaccggtccagcagcagcttggcggagcgggagtccagggcgccggtgggctcgtcggccagcaccagggcggggtctgtgatgatggcccgggccgccgccgtccgctggcgctgtccgccggacatctggtaggggtatttgttcaggcagtcggtgatgccgagcagctccgccgtctccttgacccgcccctcgatctcccccgccggagtcccccggatggtaagggccagagcaatgttctcgaaggcggtgagggtgtccagcaggttgcagtcctgaaacacgaagcccagccgctcccgccggaaccgggagagggagcggcccttcagcgccgtcacatcctgcccctccacccggatatgccctgctgtgggggtatcaattgtggcgatgcagttgagcagggtgctctttccgcttcccgaggcacccatgatccccacaaactccccccgctccacggaaaagcttacgtcgtccaccgcgtgggtgacgcttccccgtccgccgtagtcccggcgcagatgctccacactcagaattggctccatgttcagacctcctttgattctgagaaaagcttatcaaagggatcttaaaaaaaactaaatcccgccttacacttttgtgaagcgactctgacggttttctttccaaaattttgttcagtggcccttgatttattttttcccgcctctataataggaagaggatcattttaaactgataggaggactctttcatgcttattgtcgacaccaagaacgcccccggcgccatcggcccctactcccaggcctacgagaccaacggccttgtcatcacctccggccagcttccggtaaatcctgccgacggcaccatgcccgagggcatcgccgcccaggccgagtggagctgtaggaacgtgggcgccattctggaggccgccggctccggcttcgacaaggtggtcaagaccacctgcttcctggccgatatcgccgacttcgccgccttcaacgaggtgtacgccaagtacttcacctccaagcccgcccgctcctgcgtggcggtgaaggatctgcccaagggcgccctgtgcgagattgaggccattgctgtcaagtaagccccgccctgcatcaaagacggatttcccattcgcttttgcgcctgggaaatccgttcttttttacctgtccgcagcggctgctttaagcatctttcacaaaaaacagtctggtttttttccattccgccaaagaaattccacttgcatccagccagcaaatgggatatagtttgactgtactaaaaatgcatttgtacttcaaaaaatttttgtgaggcgattggtatgagtcaccccgacaccaccagcaaggatgccgttttccaatggcgcggcatcccgcagcccggacagcttctcccgttgggactccaacacgtggtcgccgccgtagtcggcgtcattaccccggccatcctgattgcggacacctgcggcctgagcagcgcggacaagaccctgatgatccaggtctccctgatcctgaccgccctggccaccctgctccagctctttcccatcttccaccgcatcggctccggcctgcccgtcatcatgggcatcagcttcgcctacatccccacgctccaggccatcggcggcgaattcggcctgcccaccatactgggcgcggagatcgtgggaggcatcgttgccatcgtcttcggggtgctggtcaagtggatccgccccctgttccctcccctggtcaccggcacggtgatcttcaccatcggcctgtccctctatcccaccgctgtaaagtacatggccggcggtgcaggctcagagtggttcggcagcgccaagagctgggcggtggcccttatcaccctggctgtggtggtcttcctcaaccacttcaccaagggcatcaccaagctggcctccatcctcattggcatactggcaggctatgtcattgcctatttcctgggcatcgtggatctgtccggggtgggcagcgcggcctgggtcgccctgcccaggcccatgccctttgacatccagttcgtccctgccgcctgtgtgtccctgggcatcgtctacgtggtcaatgcggtacagaccatcggcgacctctcctccaccaccatgggcggcatggaccgcatgcccaccgacaaggagctctccggcggcattgtgggccagggcgtcatgagcattctgggcgccttcttcggcggcctgcccgccgccacctacagccagaacgtgggcatcgtcaccgtcaaccgggtcatcaaccgggcggtcttcgccctggcggccctcattctgctggtggccgggctggtacccaagttcgcctccctgctgaccaccatcccccagtgcgtcattggcggcgccaccatctcggtgttcgccaccatcaccatgaccggcatccgtatgatcaccgaggggggcttcaccccccgcaagagctccgtggtgggcctgtcggtggccctgggcgtggggatcacccaggtgtccggctgcctggccggcgagggcttccccgcctgggtcaacaccgtgttcggctcctcctccgtggtggtggccgccctcatggccatcctgctcaacctgatcctgcccaaggagccctccgcgaacggctgattgacaaacgcgcccggcttccagaggaagccgggcacggaatttattccttcgactcgtcgatgtagctgtagagggtgtacttggagatgccgaagtacttgcacaccttgtcgccgctcttggtgatgagaaaggcccctgtctcgttgagaaactggatcgccttcaccttgtcctccttgtgcatcagcgccaccggcttgcccaccagcttgacgctctgctcgatgagctcgtccagcaggtcggacacgttgcgggagatggcctccggctcccgggactccttctccgtagcggtaaactggcggagcatgttctccatggccagcatgagggtgatgtcgtagttgatgccgaagatgccgatgggggtcccgtcgtcgttgcggatgtagatggtggtggacttgagaatctttccgtccttcgtcttggtcaggtagcacaggtggtcctgaagcttctcccggtcgccccgcagggtctccagcaccacgtgtgaagggccgtcccccaccttgcggccggtgacctggccgttctcaatggccacgatggagctctccgggtcgttggaatccaggtcgtgcaccaccacctcgcagttggggccgaactggctggcaatccctttggcaagctgaaataaaaattgcagcgtggacgcttctggcatactgttttctctcctttgccggcgcttttgttgatattataccacttccaggtattttttcaacaaaaattataaagcctaaaaattttttagtttttccaacaaaccctcttgcatcttgggcgcttttgtgctaaaattcaaatgtaaggccaattaaactgtatatactatacaaacaatttgaagatcggttgtggctgcaacggagtgctctcgcgcacgggctgaatggacatgggattcggtttcggtgctggcgcaccgccgtcacagagtcgagtgtccattcatagggaatgggcacttttttgttggttgaaatccaaaggaggaatgacgcatgctgctggttggaaacggaagactgattacccgggacgaggccttcccctatgcggaggacggcgcggtggcgctggacggcgaagtcatcaaggaggtgggggccctgtctgagctgagggccaaataccccgacgccgagtttgtggacgcccgggggggtgtcatcatgcccggcctcatcaacgtccacacccacatctactcgggcctggcccggggcctggccatcgacgggttcaaccccaccaactttctggaggtgctggacggccagtggtggtacatcgaccggcatctgaccctggacggcacccgggcctgcgcctacgccacggtgctggactgcatccgggacggcgtgaccaccatcttcgaccatcacgcctccttctgcgaaatccccggctcccttttcgccatcaaggacgtgtgtcaggagctgggcatccgggccaacctctgctatgaggtcagcgagcgggacggcgcggagaagtgcggccaggccatccgtgagaacgccgacttcgcccggtgggcgaaggagcaggacgacgacatgatcaaggccatgttcggcggccacgccctgttcaccatctccgacaagaccttcgagcagatggtgaaggccaacgacggtatgaccggcttccacatccatgtggccgagggcatgaacgacgtgtacgactccctccggaactacggctgccgcccggtgaaccgcctgctctacaacggcgtgctggggaaaaagaccatgctgggccactgcatccacatctcccccgccgagatggacattctcaaggagacgggcaccatggtgtgccacaacccggagtccaacatgggcaacgcggtgggctgctcgccggtgctccagctgttccagaggggcatcctcatcggcctgggcaccgacgcctacacccacgacatgctggagagcctgaaggtgctcctgcccatgcagcggcacaacgcctgcctgcccaacgtgggctggcgggaggccaccgggatgctctttgaaaacaacgccaaaatctgcgcccggtacttcaaaaagcccctgggcgtgctcaagcccggcgcggccgccgacgtgatcatcatggattacaagcccttcacccccttctcccacgagaacgtggacgggcacatgctcttcggcatggagggcaagaactgccgcaccaccatcatcaacggcaaggtgctctataaggatcgggagttcgtgggcattgacgaggacaaaatcaatgctttttgcatggagcagtccaagaagctgtggggcgaactcaaccac

SEQ ID NO: 4228 - DNA, 73092 bp, Unknown
  gut microbiota DNA sequence
ggcggcctttatggccgcccgcgggcgaccaccagggtcgcccctacgccgtgatacgttgaggcgggcgtccccctagcgtaggggccgccgccccagggcggcctctcttgcccctctagggcaattcaccttctgcccacatcggcccgtcttgtgccgggctgacgcacctttcatgttgcagtttttgacaactgctttcttgtcatgcctccggcggggcctacgctgtcgcgccatactggagtgtcatccactacggctccgtatcccagaagcggccaaggccgcccagctccaggcccaactggaggcccagacaaaaggcggcgtcgcgctcccaggccgcagccagattgcagcggtcaagcaaatccagcacctcctcgttcaaagcctccgggtgggaggctttgaacgccgcccactgtgcacggctgtcccgctctgcctcctgataaggcgtgcagtgggacagcttttcctttagcagaagaagcccggcccagttcaggataggaaagaaagaattcatatcagcaccttctaaatagcttatagctatattatagcaaagtaagaaaaaagtcaatagctaaaagctatagatgaaaaagatattgctattagctataataggagcaaggagtgattggaatggattaccgaactctgataagggaaaagagaaaagaaaagggactgagtcaggaaaggcttgcaaagctggtacaggtgtcccagcccttcattgccgaaattgagagtggccggaaaaagccctcagtggatgtgctgatgcgcatttgtgcggtgctggatatttccctgtttggcaacggggaaccataaggtggcttttctcgtccaaagagggtataatggcagataccaaaaccaaagacaaggaagtggagaccggatggcagatattctgtatatcgtcgtcccctgctataacgaggaagaggtgcttcccgagacctcccggcggctgcgggccaagctggaagggctgatggcggcgggcaaaatctcggagcggagccgggtgctgtttgtcaacgacggctccagggaccggacgtgggagctcatcacccggctgcatggcgggtgccccctgttctgcggggcggatctctcccgcaaccgggggcaccagaatgccctgctggcggggctgatgacggcgaaggagcggtgcgacatggccatctccatggacgccgacctccaggacgacattgacgcggtggacgccatggtggagcagtactacgccgggtgcgatgtggtctacggcgtgcgctcctcccggaaaaaggacaccttcttcaagcgcttcaccgccgagggcttctaccgggtgatgaatttcatgggggcggagacggtgttcaaccacgccgactaccgcctcatgtcccggcgggcgctggaggggctggcccagttcagggaggtcaacctgttcctgcggggcatcgtgcccatgatcggctaccgcaccggcaccgtggagtacgagcggggggagcggttcgccggcgagagcaaataccccctgaaaaagatgctctccttcgccatggagggcatcacatccctgtccgtcaagcccatccgctacattaccggcctgggcttcctcatctttgccgtcagcatcctcatgctgatctactccatcgtccgctgggccacgggagccaccatcatcggctgggccagcgtgatctgctcggtgtgggccatcggcggactgatcctcctctccctgggggtcatcggggagtacatcgggaagatctatctggagaccaagggacgcccccgtttcctgctccgcgaggtactggaggatgcgcatggcgaaaaagctgattgacaagagcatccccaggttcctgatggtgggagtgcttaacaccctggtgggggcgggcgttatgttcctgctgttcaacctggcgggctgggcctactggacagcctcggcggcgaattacgtggtgggcggtgtgctgagctacttcctcaacaagcactttacctttcagaataaggagcgcggctgggcccaggtgggcagattcgccctgacggtagcggtgtgctggctcattgcctacggcgtggccaagcctctggcgctgtgggccctctccgggcagagcgggaagatccaggagaatgtggccctgctggtgggcatggtgctttacaccggtctgaattacttcggacagcggttttttgcattccgtaagaagaattcgtaaggcgggaatgccacgccgccggaaaaggaggttttcatgaaacggtttctgtcgatcctgctggccctggcgctggccctcaccctgggcattcccgccctggcggcggagcaccgggccggggacacctacatccgcatcctgggcagcagcggcgcgcggacggtgggcgtccgcaccacctacggagcgtaccggcagacggcagacggcccggtgtaccgggacgaccggtatgagtttgtctacaccgacgacggggtgagctgggtctccgccggggcggcggagagcagcctgggcagcggcatgtacgacgggacgcagttcctggccggccccttcgggagcgagcggcccacctggtgctccgccgacggggggcactggacggccctcacgccggaggagcaagataccgcgccggccatccagcggggccggtcgtcgctgaacggcctcaccttcaccctgcggggcggccgggagctgtgggtgacggacggacaggggcgggccgtggagttgacggcggactttacctccttcctggccagctacgacatggcggatgtgcaggcctatccggtgccccagggcatccgggtggaggtctacagccggtatggctacgagaccggcgcgtcccacacctatccggcggcggagttgaagcagcgcctggccgctgcccagcccgagctgctgcgggtcacggtagacggcaagccggtgactttccccatctccctctatcaggtgagcggctgcacgatggcccctctgcggcagatggcccaggctcttggctatacctttgactatgacggctcttccgggacggcggtatgcgcccgggggacggacaccatttctgtgcgcgcggccagcacccaggctaccgtcaacggcaagaccaccaactggctggcggtgcccgccgagctgcgcggtggcatattctgtgtacccgtccgattctttgccgaggcggcgggggcggatgtgacctgggatgcggcggggcagaccttctacctcaccacagcaattcaggaggggtaaacatgagacggcgtgcaatttcggcgctggctgccgccctggcgttggttctcaccctagtcactcccgcgctggcggcggggcggcccaattgggacggccccctgggggccatggcgggcccggtggtgtgcgagaccggaagggactatgtgctgtactacaccatcataggcggcgtgtaccgctccgcagatggggtgacgtggacggagttggatcgccagtgggcgagtgctggctgggcctacggcaccggtgtaaacggactggctcacaaggagttccagtttctgtggacgggcagtgagtacatgatgcgccagagtctgctggacgatccccgggaggacacccaccagcaatatggggacagtccccgcaacaactgggtcacccttttggacgagggcttccgcatcatcggcgccaaggcgtttgacggcccggtcaccgatatccggtacgcggggggcacctactacgccaccgtggacggggtggagcacgccttcacccggaccgactgggagccgggccgggagggcggcgtctactacagcggcacggcctggtacaagcaggagaatcagcgtaagcccgtggaggtgaccagctatcttatccgggagcagcccggaaacaacggtccctttgggctggcggtctccacagacggctactcctggctgccgctggagaccaagctgacccctgacatgatgcgcctgtccgagaccgggggaggagccgtggtctactacagcccgtatgacggttcgctgtactactatgactacaggggcagccgttttgcaggggcctgtaccgccggatgggtggaggccgacctgggctttgaccccgccgagggcgttggaacggcctgggtggactataccttccgctggacaggggacggctatcttatgtgtcagtctgtcaccggccgggggatgatgggtaccggcgcagaccggttcagcccgaacaacaacaaggtcattttcttggatcgcagcttccaccggacgggggagcacgacttcggcgcaccggtggagaacgtggcctgtgtggacggggtgtgctatgcgctggtggacggaaccgtctggcaaagcgctgaccgggagcactggacggccaccagcctgaccgtcctgccggaggcggccccccagatagatctgggatggcgcatcaaggattgcccggtggacggccagaccgacggttcgctggtctaccgggtggcggatgggaagctgctggcctccggcgacggggtgtatttcacggccctgtgtccctggagctccacgggggtggaactccattcagggggcggcacggtggtaactggtgtggggatggatgacgttctggcagtggactcggaggaggtccgggggctctgcgccgcatgcttcggcgagtttcccacctatgtggctctggacggggaatatttctccctgaccgatatgcccctgcgcagcacagcggggtgcaccatggccccaatgcgggagctggcggcttggctgggatattatgacttctcctacgatgcggccaccgggacggcggtgtgcaaaaatgggacgcaggccatcaccgtccgggtgggcagcacccagggccaggtgtccgggcgcggcccggtctccatggcggtgccgcctgagctggtggggtggaagctctatgtcccggtgcgctttatggtggacgccgcggggctggaggacgtgtgggacgcggaggaaaacaccctctggattaccacccccgaacagacgtaaaaaggggcctccctcaggcgggaggccccttttcaaccgggggttcggcggcggacactacaacggcgcaggcgaggtcgcccgctacgttgacggcggtgcgcgccatgtccagcacccggtcgatgcccaggaccaatgccaccccctccaccggcaggcccacggactggagcaccatgcccagcatgacggcccctgcgccgggtactccggcggttccgacggaggccagggtgcaggtgaggatgatggtgagctgctgggggagcgccagggggataccgtaggcattggcgatgaacagggcgcacaccccctggtagatggcggtgccgtccatgttgagggtggcacccagggggaggacgaaggagcgcaccccggcggggacgcccaggcgctcggcggcctccagcgagaagggaagggccccggcggagctggccgacgagaaggcgaagaccacggcgggcagggcctcccggaagaaacgccgggggctgcgccttgccagggcgcccacggctcctccgtagaccaacagaagctgcaccagacaggccccgtagaccaggacggccacccccaggagggaggagagcactctgggcccctccgcggccaccaccggggcgatcagggcgaacacagccaccggcgccagtaccatggtccgctctgtgagggcgtacatggcctccgccagactgccgaaggcccgcagcaggggcgcgcccttctctccgatggtcagggacgcccacccgagggccagggcaaaaaagaggatctgcagcatattgccctcggccagagcctggatgggattggtggggacaatccccagcagggtgtccgccagagagaaagagggggcctcctcccgggcggcggggagcggatagcccagctcccgccccaccggaaacaggttggccgccagcaggcccagggccaccgccagcgcggtggtgcacaagtagaacaggagggtgcggccgccgacccggcccatgtgccgggcgtcccccagaccgcccacccccgccgtcagggagcagaacaccaggggaaccaccagcatctttaccagattgagaaacagggtgccgaagggctgaatccaggccgcggcaaactccgaggcatcctggagcgccagcccggccagcacgcccagccccaggcccagcaggatccggagcgaaaggggcagcttgcgtctcatgctccacctccattccccactaggatatggaggcggggggaaaaccatacggaggaacggccatggagtacattcccgccaagcagatcttaagccgcaacaggagcaccgcctggttcggcaccgactacaccatgaacctgtaccggggctgctgccacggctgcatctactgcgacagccgaagcgcctgctacggtatcgaggatttcggccgggtgcgggccaaggagaacgccctggcgctcctgcgggacgagctgcggcggaaggtgcgccccggcattgtgggcatgggctccatgagcgacccttacaaccccttcgagggggagctccagctcacccgccacgccctggagctgctggacgcctacggcttcggggcggccatcgccaccaagggggacgggattacccgggacatagacgtgctgcgctgcatgagggagcacgtgccggtgctgtgcaaggtgaccgtcaccaccaccgatgccgccctggccgcccgggtggagccgaacgctcccagccccgcccggcggctggaggcggtggcccggctggcggaggcggggttgtttgccggcgtgctgctcatgccggttctcccctttttggaggacaatgtggaaaacctgcgggccgtggtggaggccgcggcggaggcgggggcccggtttgtctaccccgcgttcggtatgacgctccgtgatcaacagcgggaatattactatcaggcattggaaaaaggctttcccggcctggcagagcgctaccggcggcagtacggaccccgctacgagtgccccagcccacgggcaaaggccctgtgggccgccctggaggagcggtgccgcgccctgggcctgctgtgccgcatgcgggacatcaccgccgcctatcagcgcggttacggggagcggcagctcacctttttctaaggctgcggctcaatgtccatggacgccatctgttccggcgtacagccgttggcggcgcccatctgcgtccagtagcgtgtggaggcccgcacaaaggcgcggggggacaggggcatggtgaccgccagctcggcgggccgtccggcggcgatggccctggccagcgccctgatgttccgcctgaccaggaaggcgaaaggggtgcccaggatggcctccccgccgccgattttgaggcatgcgccgaagggatagccgttctccaggcagaagaggcgcaccatgtccaccgcgacatcgttctggtgtggctccagaaagccgcagttgatcagtacgctgatgcgcggcctgtgctccggcccggccccctccaggaactccaaaaagcgcaggagaggggcgggaaggccgtcggcatagagggggaagaccagcagcaggtcggtgcactccgccgcggccgccgccagctcggcgtgattctttgcggtcagggccgcatagcgggcctcccctttccagcgggcctgaaacagctcggcatagcgcctggaattggagcggggggcgcgggggctgccgtttacgatcagaagcttcaccaccgggccacctcctctcccacggcggcctccagctccccctcggccacaaagcggacgcggtggctgcggaaggacatgttgtgggcgttgcgctccaccagccgggtaaacagggcgcgctcctccgcccggtccgccccgtaggccaggatcaccgcgtccttggggaccacggcgcgctgaacgtggtgagtctcgccgttgtggatgcggagaaaggcctgctgcaccggaatggcccgctccagcatggtcttcatcaccggcgcgtaggagccgtatttgacccggctgacatagagtacctgctcgctccgggcgatgaggggatatacccgtgccgcgtcgtcccggatgacgcagcggccgggcgttttggtccagcagccgaagcagcccacgcagtttgcgatgcggagggcggagagatccacggcggcggcatcctgggggagagcggcggacacgggacggtccgtcatcaacagtttcatgggtgctcctttccgggggagaattcccccagtgaaatgatatgattttatcacagtgcgggccaaagggcaagaaaaggccgcaaaatttaagctccgctataggatcggttaaaattggctaaaatcccggcgcgtccccttgcgcaccggggcaaaacggggtagaataaggccagtaacccaacaagccgcaccgtaaggaggtttttaatatggcttttttggatgaactgaaggatcgtgcaatggatctgggccgggccggcgtggccaagtccaagcagcttgcggagatcaccaagctgtccctgaacaacgccagcgaggaggacgccatcaagaaggcgtatgtggagatcggcaagctgtactatgccgagcggggcatggcccctgaggcggcctacgtggccctgtgtgagcgtatcaccgccgccaaggtcaacattgaggagaacaagaaccgcatcgccgagctgaaggctgagggcaatgtgtccgacgcggacatcccccacgtggagaccgacgtgccccctgaggagccggtggacggcggctgcggctgctgcgatcacgaggtggctcccgaggaggtattctccgacgacgacaagccccaggaataggcatctgacccgacagggcccgccatccggcgggccctgttcctgtgagtggaccgcgttgactctgatgcggtgtacggcgattgacggcgctgatgcggcacagggcggggagcgtggggcagggcgatgggaaggccggcgagggcttccggcagctccggcgcgccgggagacagaacttggtttcctccagaaaggccagatccatttgaaaatccctcccaaaactgcatcgtatacgaaaacataaaacgagcgtgcacggcagagccgtgtacgctcgttttcaactcagaccggattcgcctgccaggcaaaatcacaggatgcggcgggcgcccacgtagacgttggcgtagtggccgcgggtaagatcgtcaatcttgacggtgtatgtattggtagaggcgtggatgaactgcccgccgccaatatagatgcccacatgagaggcggccttgctggtgttgtacttgaagaacaccaggtcgccgggctgcagctcgctcttggagacggaggtgccgttggagagctgagtggaggcggtgcggttcagggtgtagccgaaatggcggtacacatagctggtatatccggagcagtcaaagctgctggggccgttgccgccgtacacataggggcagccgaggtactgcttggcgtagtccaccacctgctggcccaggctgctgctggaggcggtggccacagcggtggcgccgtcgccgcgggagccggcggagtccttgcaggtgaccatgtaatcgctgctgacatagccggtgacgccgttggtagaaatcttgtaccagccgttgtcgatgcccacgatgttgaccaccgcaccgttgttgagggaggtgaccttaccgtagctggtgccggggccgctgcgcacattcaggggagaaccctgggactggaccaggccgtaaccgatggtgacatccgccttggcggacacgttcaggtactcgccggacatatagccctccacggacttgtagtccaccttataccagccgttgcctgcgtcctccagaaccaccacggtgtcgcccttggaggcggtacccagtacggtggcggaggtgctggcctcgtcgcggaggcggagagcgtcggtgttgacggtgcccacgccgacactggcggcggaggcgctcaccacgcagacggtggagagtacggcggttacaagcgcggtgcgcaggagcttggcaggctgtatcatgggtcgattcctccagtttcaaagtaatacccgcccggagggcggggctttggcttctcgggtgtaaggcggggttacgggttggcgagcgcgcgctccagccagacagacgccacgtccatggcggcgtagaggctgtctttctcagttttcttaaccacccggtcccggctcttcagatccgggtcggtgagctgaagctgaacggaaaccttggtcgccacgtccaggtcctgatccttcttctgggagagaatctggagcatgatgatatatttctgggccatgctgccgtagtagatcaggctgtccttccggcggagggggtggcctttgtaggtcaggggaatattctgagctgccattttgacctcctttgaggattgtaactattcttaaaaactgtaaccaaattgtaacacattgtttccagctcgtcaactgctttcctgctgatttcacaggaaatttgtaccggcatgccagatggtaggggacaggctgttactctctggatttttgagggaaggcgagccggcgggcgagggagaggaccgcaaaggccaggccggccagcatgagcagggcctcgcacagcatggggaacaggcggccatccagggagaccgccagggtaaatttcccccgcaggaccaccacataggcgcccagggaggccagctccaccagcagggcgcagggggcggagcgggggaacgcgcaggcccaggccagagccagcacgtcagccaggaagaagtagcgctcatgcatgtggggcagcaggaagggtacgccgatggccaggacaaccgcggcggccagaagagcccggtcgtccgcctggcggcggaaaaccagcagggcggccagcacggccgcagcgagggcgaaggcggccaggatgcccaggcgggcggcgagggcagtgttcacctccgcgccgtggggaatcagggcgtacatattgggggcgttcaggttcagatagccggagtactcggcggcctgcccgaaatagacccccaggatgtcccccaggggcttgcccagcagcagcgcgggcacacaggtggcggcataggccgccggaaaccacaacagctcccggaagcgcacccgccggagcagccacagcccgccccacagggggagcacaaagacggtctgtagtttaaaggagaaggcgatccccagcaggagcaaagagcttcggtttcttccctccagtgcgcaggccagggcgtggagggtgagggcgccgtacagggcgtcgcactgcccccagaacgcgccgttgagtatcaccgtaggcagcagaagaagcaggcagaagcagagcagggggcggttcgggcgctccggcgcgaaatgccgcaccagccggaagccgccccaggccagcaccacgtcaaacagaatggagaagagcttgatcaggtacaggtcgggtatgggcagataggagatggcggcaagaaaatagaggtagggcgcgttatagttgccgatcggcagcttcacggccgcgaagccgcccccatcccggaaggccgcggcccattgggagaggaacatctggtaatcggcggactggtagtccagcagcagggcccggaggaagaaggccagcccaatgggcagcagggcgtccagcagccggggacggtccaggccctcccggcggagcagccgcagcgccagggcggccagggccagcaggagcagaaagacggccagatgagcgggcgctccgcccagggcaagggagccggcgggaaacaggctcaggcccagcagggccagtcccgctgcggcccacgagagggaaaagacgttcataggcacctcctgtcgaaaaaaggcccggggcaatggggtgccccgggcctttcacagtgggatcagacttcagcggactcggagaggaccgccgcctcggcgggggcctcctcctcgggaaccgcctcctcgccgctctgggcggtgccctcgtcgtccaccttgtcgtacttgcggtagacggacaggccggagccggcggggatcagcttgccgatgatgacgttctccttcaggcccagcaggtggtccaccttgccctgaatagcggcctcggtgagcaccttggtggtctcctggaaggaggcggcggacaggaaggagtcggtggccagagaggccttggtgatgcccatcagcaggcgggtgcaggtgggcagcttgagctcgaggccgtcgttggtctcgccggcgtcgatgcgcttctgcacggcctccttggcatcctcaaagcggatgagatcgacggtggaaccgctgagcagatcggaatcgcccgcgtcctccacccgcaccttgcgcatcatctggcggcagatgacctcgatgtgcttgtcgttgatgtcaacgccctgctgacggtagggcttctgaacctcctggatgaggtagtcgtacacggcgtggacgccgcgcacccgcaggacgtcctgggggtagagggcaccctcggtgagggcgaagcccttctccacggtgtcgccgtccttcacccgcaggcccgcgtagggcagggcgtaggagaccacctcgccgtcgttggcggtgatggtgacgttgcagatggcgttgcgcttggcctcctccagagtgacccggccgctgatctcggccaactgggccatcttcttgggcttgcgggactcgaacagctcctcaacacggggaagaccctgggtgatgtcgccgccggcgacgccgccggtgtggaaggtacgcatggtgagctgggtgcccggctcgccgatggactgggcggcgatgatgcccacggcctcgccctcgcccacgggctcgccaatggccaggttgatgccatagcacttggaacaaacgccactgcgggcgcggcaggtgagcacgctgcggatcttcacggagtggatgccgtggtcctccagcagcttggcgtggtcggcggtcatcatggtgtggtggtcgatgagcacctcgccggtctggggatcgcagatatcctccaccggataacggcccttgagccgctcgccgaaggtctcgatcacctggccgttctccacgatctcgctgacggtgatgccgtcgtcggtgccgcagtcgtgctcgcggatgatgacctcctgggacacatccaccagtcggcgggtcaggtaacccgagtcggcggtacgcagggccgtatcggccatgccctttcgggcgcctctggaggagatgaagtactccagcacggacaggccctcacggaagttggacttgatggggatctcgatggtgcggccggaggtgtcggccatcaggccgcgcatgccggccaactggcggatctgggcggaggaaccacgggcgccggagtccgccatcatccagatggggttgtagcggtccaggccggccatcagggcgtcggtcacgtccttggtggtcttttcccaggcctcgaccaccaggcggtaacgctcctcattggtgaggaagccgcgcttgtactgccgctcgatcttgacgatctccttctcggtatcggcgatcaggccatacttcttctcggggatggtcatgtcgtagatggagacggtgagggagccgcgggtggagaacttgtagccccggttcttgatggtgtccagcacatgggcagacacggtgaagccgtgcttgacgatgcacttgtcgatgatcttgccaagctgcttcttgcccacgatgaagttgacctcggggtcgaacatctgctcggggtcgctgcggtccacgaagcccagatcctgggggatgccctcgttgaagagcaggcgtcccacggtggtgcgcaccagcttgtggcggacaacgccgtccacctccgcctcccggcggaccaggatgggcacgtggagctccagctcgccctcgtcgtaggccaggcgggcctcgatgtcgttggagaagacgtggagcacctcgcggggcagcgcgccgtcctcggtctcggcgcagatgccggcgtaggtgggaatatcatccagggagccggggttcttcacccagacataggaatcgggggtgatggcgcccgcggccagggcggccttcaccgccgccacgtcgtcgtaggtctcctcggcggtgtgctcgggatacttctcataggtcaggtagtaggagccgagcaccatgtcctgggtgggcacggtgacggggccgccgtcctggggccgcagcaggttgttggccgagagcatgagcacccgggcctcggtctgggcctcggcggacaggggcacgtggacggccatctggtcgccgtcgaagtcggcgttgaaggcggtacacaccagggggtgcagcttgatggcgcggccctccacgagcacgggctcgaaggcctggatgcccaagcggtgcagggtgggggcgcggttgagcatgacggggtggtccttgatcacgaactccagggcgtcccacacctcggccttgcccttgtccaccatcttcttggcggacttgatgttgttggccaggccgtcctccacaagctttttcatcacgaaggggcggaagagctcgatggccatctccttgggcaggccgcactgatagatcttcagctcggggccgaccacgatgacggaacggccggagtagtctacgcgcttgcccagcaggttctggcggaagcggccctgcttgcccttgagcatgtcggacaggctcttgagggcgcggttgttggcgccggtgacggcgcggccccggcggccattgtcgatgagggcgtccaccgcctcctggagcatccgcttctcattgcgcacgatgatgtcgggggcgttgagctggatcaaacgcttcaggcggttgttgcggttgatcacccggcggtacaggtcgttcagatcggaggtggcaaagcggccgccgtccagctgtaccatggggcgcagctcgggggggatcaccggcagcacgtcgatgatcatccactcgggcttgttgccggagatgcggaaggcgtccaccacctccaggcgcttgacaatgcgggccttcttctggccggaggcgtccttcagctcggcgcggagctggttggacagctcctccagatcaatgtcctggagcagcttcttcacggcctcggcacccatgccggcctcgaagtcgtcctcgtacttctcccgcatgtcgcggtactccttctcggagaggatctggttcttggccaggggggagaagccggggtcagtgacaatatagctggcgaagtagagcaccttctccagaatacgggggctgatgtccagcagcaggcccatgcgggaggggatgcccttgaaataccagatgtggctcaccggggcggccagctcgatgtggcccatgcgctcacggcgtaccttggcacgggtgacctccacgccgcagcggtcgcagatcttgcccttgtagcggatctttttgtacttgccgcagtggcactcccagtccttggtggggccaaagatccgctcgcagaacagaccgtcccgctccggcttgagggtgcggtagttgatggtctccggcttcttgacctcgccgtaggaccactcgcggatctgctccggggaggcgatgccgatctggatggcgtcgaattcagcgtaactcatatctttgctcgtcctcccttaattagtccatatcctcatcggaatagtcatccgagaagtcgtcgctgtcgtccagctcctctgcgtccgcggcggccaggtcgtcgtcgtcgctgccctccttgagggtgtagcccgcggcggcgaagtcggactccccgccggcgtcgtagccgtagtagtcgtcgtcctcgtcgcggaacttgccgggctggtagttgtcctcgtcgtcgtccttcagctcgatctccgcgccctggtcgtccagcaccttgatgtccaggcacagagactgcagctccttgaccaggaccttgaaggactcgggcacgccgggcttgggcacgttgtggcccttgacgatggactcgtaggtgcgcacgcggccggtgacatcgtcggacttgacggtgaggatctcctgcagggtgtaggccgcgccgtaggcctccagggcccacacctccatctcgccgaagcgctggccgccaaactgggccttgccgcccaggggctgctgggtgaccagggagtaggggccggtggagcgggcgtggatcttgtcgtccaccaggtggtggagcttgaggaagtagacgtagcccacggtgacggggttgtcgaaccgctcgccggtgcggccgtcatacagccagctcttgccgtcgggccgcaggccggccatcttcagggtctcggcgatgtccttctcgtcggcgccgttgaagacgggggtggccaccttccagcccagggtcttggccgcgtagcccaggtggacctccagcacctggccgatgttcatacgggagggcacgcccagggggttcagcacgatgtccaggggggtgccgtcgggcaggaagggcatatcctcctggggcaggatgcgggacacgacgcccttgttgccgtggcggccggccatcttgtcgcccacggagatcttgcgcttctgggcgatgtagacgcgcaccaccatgttgacgccgggggagagctcgtcgcccgcctcgcgggtgaagaccttcacgtccacgatgatgccgctctcgccgtggggcaccttcagggaggtgtcgcggacctcgcgggccttctcgccgaagatggcgcgcagcaggcgctcctcggcggtcaggtcggtctcgcccttgggggtgaccttgcccaccaggatgtctccggcacggacctcggcgcccacgcggatgatgccgcgctcgtccaggtccttcagggcgtcctcgcccacgttggggatgtcgcgggtgatctcctcggggcccagcttggtgtcgcggctctcggtctcgtactcctcgatgtggatggaggtgaacacatcctccttcaccatgcgctcgttgagcaggatggcgtcctcgtagttgtagccttcccaggtcatgaagcccatgaggatgttcttgcccagggcgatctcgccgttgttggtggaggggccgtccacgatgacctcgcccttctccacccgctggccggcgtccacgatggggcgctggttgatgcaggtgccgtggttggagcgcaggtacttggtgagccggtagtcctccacgcggccgtcgtcgtagcggacggagacggagtcggcggccaccttggtgaccacgccgtcgtcctcagccaggatggccacctcggagtcgatgcagttcttgtgctcctggccggtggccacgatgggagcctgggtggtcagcaggggcacggcctgacgctgcatgttggcgcccatcagggcgcggttggcgtcgtcgttctccaggaaggggatctgggcggtggcgatggagaacatcatcttgggggagatgtccatatagtccacctgatcccggtccacgtcgatgatctcgttgcggtggcggcaggtgatacggtcgtgcaccaggcagccgttctcgtccagcggctcggtggcctgggcgatggtgtactggtcctccacgtcggcggtcatatagtccacctggtcggtgacgtggccggtggctttatccaccttgcggtagggggcctcgatgaagccgtagcggttgatgcgggcataggaggccagataggagatcaggccgatgttgggaccttcgggagtctcgatggggcagaggcggccgtagtgggagtagtggacgtcgcgcacgtcgaaggaggcgcggtcacgggacaggccgccggggcccagggcggacatacggcgcttgtgggtcagctcggccagggggttggtctggtccatgaactggctcaggggggaggagccgaagaactccttgatggcggcggtgacggggcggatgttgatgaggctctggggagtgacgatgtccagatcctggatggtcatgcgctcccggatcacccgctccatgcgggagaagccgatgcggaactggttctggagcagctcgcccacgcagcgcaggcggcggttgcccaggtggtcgatgtcgtcggcggagcccaccccgtgggccaggcagttgaggtagttgatggacgccatgatgtcgtccacgatgatgtgcttgggaatgaggtcgtcgatgcgctccttcacggcctccttgagctcctcgccggtgtaattctggagcagctcctggagcacggtgaagcgtaccttctcactgacgccgcactcctccggatcaaagtccacgaacttggacatatccaccatgtgattggagaatactttgatctgcacgccgtcgagctccagtacaacctcgttgacgcccttgtcgtccagctcgtgggcccgctcacgggtgagcacctcgccgggctcggcgatgatctcgccggtcatggggtcggccacgggggcggccagggtctgattcaccaggcgggtccagatcgacagcttcttgttgaacttgtagcggcccacggcggacaggtcgtagcgccgggggtcgaagaacagggcgttgagcaggctctcggcggagtccaccgtggggggctcgccggggcgcagcttgcggtagatctccagcagcgcgtcctcataggttttgcaggcgtccttctccagggtggcaacgatgcggggatcctcgccgaacagctcgaggatctcggggtcggtcttggggcccaccgcacggatcaggcaggtgatgggcagcttgcggttcttgtcgatgcgcacgtagaaggcgtcgttcaggtcggtctcatactccagccaggcgccccggtaggggatgacggtggtggcgtaggtgatgccgccggccttgtcctcggtgtgggagtaatagatgccgggggagcggacgatctgggagacgatgacgcgctcggcgccgttgatgacgaaggtgccggccttggtcatcagggggaagtcgcccatgaagatctcctgctccttgatctcctcggtctccttgttgcgcaggcgcacccgcaccttgatgggcgcggcgtacgtggcgtcccgggccttgcactcctccacgctgtacttggggggctcatccatggagtagtcgatgaaggagagctccaggttgcccgcgtagtcggtgatcgaggccacatccttgaagacctcccgcagtcccgtgtccaggaaccactgataggagttcttctgcacctccaggaggttgggcatgtccaggatttcttcatggcgggcaaagctcttgcggagggtcttgccgtagtagacgtccttgaccatcgtagaaaaaacacctcgttttctttgtttggggagcgttgggcggcagcgctctccggtttccatcggctgtcttccgtcaaacccgacaaagcgcggcggggaagaaggaagtacacgctcggctgtgtggacaaaaaagaaacaaatcctcttgcgctttcccgccccgcatgctaaactgtatccaagctgggaaaaaatcgggaaaactggattggaagataagagcatttcagtataccatgaaaagggaacaaaagtcaattgttttatccgtcgaatctggagaaatccagatttttttatattctcatgaacagaaggggagagcaggcatgctggagcggtttctggatcagattggcgaggtactccgcctctgcgaggatacggacggaattctggtggtcaaccgggaggggatcatcgaataccaccggattccgctgaacagctactggtgctcccaggacacggtggggcggcacattctggagctctatccggagctggacggggagagcagcaccatccttaccgccctgcggacgggccgggccagctacaacgttctccaggacatcaacaaccaccggggggagcgggtgctgctggagtccaccaccatccccatcgtggtggacggccgggtggagtgcgtggtggactcgtccaagtaccacaccattgaccagcgggtgatccgtggcggggagggcggcggcctgtccaccctggaccggatgctcacggaagacccggccatgttggccctcaagagccgcatccgggacgtggccgggctggactcgtcggtgctcatctatggtgagacgggaacgggcaaggagctggtggccgagtcgctccacagcgagggcggccgggcgggaccttttgtctctcaaaactgtgcggccatcccggccaccctgctggagagcctgttttttggcacggaaaagggaagctacaccggcgccctcacccgcaaggggctgctggaggaggcggacggcggcaccctgttcctggacgagatcaactccatggacccggccctccaggccaagctgctcaaggtgctggaggagaagaaagtgcgccgtctggggggcagccgggacatccccttcgacgtgcggatcgtggcggcggtaaacgagaagcctcagaagctcatccgggaggggcgcctgcgggaggatctgtactaccgcctgggggtgattcgcctgactctcccgcccctgcgggagcggctgtgcgacatcggcccgcttgcggactactttatcgagcactataaccggaagctgcaccggagggtgcgggggctgagcgagcgggccctccggctgctccggggctatgcgtggccgggcaatgtgcgggagctgaaaaacgccatcgagggggcggtggccgtcgcccggggggagcgcctcaccgtggaggacatggaggagatcctggccgggcggctgggcggcctgaaccggccgccggagctgccggaggccctgcgcctggaggagagcttttccctcacccgggcgctggactcctacgagcgggagctgctcagccgggctatgcagcaggccggctccatctcccaggcagcccgcctgctgggcctgtcccggcagaatttgaagtacaagctgaaaaaatttgacctgtaaaaaattttgcgccgcaaaatattttccccctgaaaaagggcccgagagccggaggtatgtcctataataccggccctcgggtccttttttgggcattagggtgagctggcatcccgtttgcaaagttaagtgcacgaaacttgccgcaggcggaaaggaaggctgatatgcggagactttggtacaacggaacggttgcctcgatggacggcgccatgcgccgctatgaggcggtgggcgcggaggacggcagactgacctttttggggagcgttcaggaggctctggcgcaggcgtgggatgagacgagggatttacagggtgccatggtgctgcccggcttcaccgattcccacatgcacctgctccactacgccatgattcagaaaaacctctccctgtttggcgtggcgtccatcggggagattatagaacgggggcgggcccggattgagcgggaccacccatcctacctgatcggcatgggctggaatcaggagaccatggcggaggggcgcctggtgacgcgggaggatttggaccgcatctccaccgatatcccggtgtgtatgctgcggacctgcctgcacataggggcctgcaactccgtaatgctggagcgcatccgcgcgctggaggatgtggcgcccgaggtgctggccctggtggacttttccaacggcattctgcgggaggatgccgcccgcctgtatatgaaggtgctcccccaggcggatgacgcctatgtaaaggagctgatccggctgggccagcgggatctgaacgcggcgggcattacctgcgtcaactccgacgatctgaaggccattgccggagtggaccctatccgcctgatcggcatcttccgggagatggaggcggacggagaactgacggtgcgggtctacgagcagtgcctggtggagcccgaggactttgagcggctccaggcggtgcgcagcgatccggccgaccgggagagcctcttccgcaccggcccccgcaagctgctccaggacggctccctgggggccaagtcggcggagatgattgacggctacctggacgagccggacaaccacggcatccctatctacaccgaggaagagctgtgcagccggattcgcgcggcccataccgcccatatggacgtggcggtgcatgccatcggcgacctggctttccgtaaggtgtgcgacgccatcgagcgggtggagcgggaggagccctggccggatcaccgccacggcatcgtccatgcccagactaccacccccgccctgctggagcggatgaaggccctgggcctccaggcgtacatccagcccatcttcattgacgccgacatgaacatcatcgccgagcgggtgggggaggcccacgcgaaggagtgctacaactggaaggccatggaggatctgggcatccggatcagcggcggctccgactgcccggtggagcccttcaacgtgttggacaacctgcgcgccgccgtcacccggcagaaccgggcgggcaccagggtctatctgcccgagcaggccctcaccgtggagcaggcggtgcgcctgttcacctccgatgccgcctgggccagccgggatgaggccgtccgcggcaccctggagctgggcaagcaggccgaccttgtggtgctggaccgggatctgtttaaaatctctcaccaagactttaatcgggttaaggttttggagacggtgttaaatggtgtgacagtctatcgggcggaaacgctgtagtccgttcacagcttagatcataggcaacgaaacaacggggaggaagcactatgaagaagaaatccttctggaaggataccgtgattgtaggtttggcgctgttttccaccatgtttggtgccggaaacctgatattcccgccgcaaattggcctgttcagcggacaggagtggttcctcggtgctatgggcctgctgctgggtggcatcgttctgccggttatggctctctgggcggttaataacgtcggagagggctctgaggacctaatgggccacgtgtctccgtggtgttataacgcgttttatctggtgagctgtacactgatcgccatgggctctaccttacccaagagtgctgctaccacttatgaaatcggaattcagccgcttttcccgcaggtgcccaactgggcagttatcattgtgttctttgttttggtctacttttttgcctgtgaccgggagtcggtgatcgacaagctggggaaatatatgacgcctatcctactggtgcttctggcaattgtccttatcaagggtgtggtgacgccggtaggggagccagtggataccgggatcggaaacccctttggggatgccatgctgacggcctataatacaggcgatctgacggtcggcatcatgtttgcaagcgtcatcctgggtgatctccgccgccgaggctatgacggaaaggagagccgaagaggcggatttatggcgggtatcgtctgcattatcgccctgtttgctgtttatggtactctgacctacattggcgccacggctagcggtatctatgcccaggatactgcccagaccgcgctgctctctggtgtcattcggcaaatcatggggactgccgggctggcttgtatgggcggcgcggtagccatggcctgtctgacgactgcggttggcattggaaccacagttgtctcatttatttatgaatttctaaaaaagagagtgccctacaagctgctgatgctgatagcctgcatcatcggagttttcatggggatcaccggagtacagaatatcgtgaactatgttacaccaattttcctggtgatctatccggtctgcattgttatgaccatcttgggactgctggaccgctttctgccgaacgacggtttctacaagggtggcgttttgatggcggggattgtgagcctgggggacgcggtgcttagtgtggcgcctgacattggctggttgaaggacctgatgagtatgttcccgctctccgatttgggctttgcgtggctggctccagccgttataggcgcagtagtgggagcccttctgtgcaggggaaaggaaaaatatcaggccatgggcgacccaattgcagaggaaattgcaaaaaacgaatgattgaatagtgccaggggagcggcggaggggggaagcccctccgccgctctggcggttctgactggaaacgggccggaaagctttgcaaaatctagtgattttctgattgactttagaattcgcatatggtaaaattctaaatcgcgcaggtatgcctgccaaaaggggatacgcggcagaaaagccagacggccctgcaaatcaagcgatgggaggcagaccgcatgctgacggaactcaagcagggctccaaggtggtcggcgtcaagcagaccaagcgggccgtcaatgatgggaaagccgcccgggtttttctggcagaggatgccgatcccagggtgaccgccccggtggaggccctgtgcgcagaaaaacagattccggtggagcgggttccccagatgaaggaactgggctccgcatgcggtatcgccgtgcccagcgcggtggccgcgctgctgcactgattttagcgaaacggaataattttcatccgtttcgttaaaatatattctttagaaaccaagaaaggaggaaaaccatgcctacgtttaaccagctcgtccgcaagggacgcgaggccgcgacctacaagtccaccgctcccgccatgcagaagggcctgaacaccctgcagaaccgcatgaccgacctgccttctccccagaagagaggtgtgtgcactgcggttcgtaccgccacccccaagaagccgaactccgctctgcgtaagatcgcccgtgtgcgtctgaccaacgggatggaggtcaccgcctatatccccggtgtcggccacaacctgcaggagcactctgtggtcatgatccgcggcggccgtgtcaaggacctgcccggcgtgcgttaccacatcatccgcggcactctggatgcccagggcgttgccaaccgcatgcaggcccgttccaagtacggcgcgaagcggcccaaggccggcaagaagtaatttttctccgtaaaaattcttctgaaaacccaataagagactttatgcgcaaacgcgcaaggcagttgtccttgcggaagcgcttacctatatataatagggggcgttttctgtggggcactggacaagcaggcacttgtcttacacgggggcttttctgaaaagccttcgagtacctatgaaatcatactatgaaggagggaagcaaagtgcccagaagaggaaacgtacccaagcgggaggttctgcccgatccgatttacaactccgtcctggtgaccaagctggtcaacagcatcatgctggacggcaagaagggtgtggcccagaaggtcgtctacggtgctttcgacatcatcaaggagaagaccgagaaggaccccctggacgtgttcaccaccgctctggagaacatcatgccgtccctggaggtcaaggcccgccgcgtgggcggcgccacctaccaggtgcccatcgaggttcgccccgagcgccgtcagacccttggtctgcggtggctgaccaactactcccgcgcccgcagcgagaagaccatgaaggagcggctggccggcgagatcatggatgccgccaacaacctcggctccgcggtcaagaagcgcgaggacacccacaagatggccgagtccaacaaggccttcgcgcactatcgctggtaataaggagttagagtatgcctaggaaagttaccttagagaataccagaaacatcggtatcatggcccatatcgatgccggtaagaccaccaccaccgagcgtatcctctactacaccggcgtcaactacaagatcggtgagacccatgacggcaccgccaccatggactggatggctcaggagcaggagcgcggcatcaccatcacttccgcggctaccacctgctattggaaggggtccaaggaccagttcccccagacccgcatcaacatcatcgacactccgggccacgtggacttcaccgtggaggtggagcgctccctgcgcgtgctggacggctccgtgaccgtcatgtgcgccaagggcggcgtcgagccccagtctgagaccgtgtggcgccaggccgaccactacaaggtcccccgcatgatttacgtcaacaagatggacatcatgggcgcggacttctacaacgtgctcaacatgatccacgaccggctcaagtgcaacgcggtgcccatccagctccccatcggctccgaggataccttcaagggcatcatcgacctggtggagatggatgccgacatctactacgacgagctgggcaaggacatgcgcgtggaggagatccccgccgatatgctggagctggcccaggagtaccgcaccaagctcatcgacgcctgtgctgacatcgacgatgagatcatggagctggccctggaggagaagcccatccccgaggatatgatccgccgtgccctgcgcaagggcaccatcgagaacctgctggttcccgtgacctgcggtacctcttaccgcaacaagggcgtccagaagctgctggatgccatcgtcgacttcatgccctccccgctggacatcccggccatcaagggtgtgaaccccgacaccgacgaggaggacgagcgtcccgccgacgacaacgcgcccttctccgccctggcctttaagattatgaccgacccctacgttggccgcctgtccttcttccgtgtgtactccggcaagctcaccaccggttcctccgtgctcaacagcaccaagaaccagaaggagcgcatcggccgcatcctgcagatgcatgccaaccaccgggaggacatcgaagaggtcttctccggcgacatcgctgccgccgtgggcctgaagaacaccaccaccggcgataccctgtgcgatgataatcaccccatcatcctggagtccatggagttccctgaccctgtcatccgcgtggcaatcgagcccaagaccaaggctggtcaggagaagatgggcctggcgctggtaaagctggctgaagaggaccccaccttccgtacctggaccgacgaggagaccggccagaccattatcgccggcatgggcgagctccacctggagatcatcgtcgaccgtctgctccgcgagttcaaggtggaggccaacgtgggcgcaccccaggtcgcctacaaggagaccatcaagaagtcggtcgagcaggataccaagtatgcccgccagtctggcggtaagggccagtacggccacgtccgcatcaccgtggagcccaatgagcccggcaagggctatgagttcctcaacgagattaccggcggcgttatccccaaggagtatatccctgcggtggacgccggtatccagggcgccatgcaggcgggtgttctggccggttaccctgttgtggatgtgaaggtccacctgaccttcggctcctaccacgaggtcgactcctccgaaatggcgtttaagatcgccggctccatggcgttcaaggaggcctgccgcaaggcggacgccatcctgctggagcccgtgatgaaggtttccgtcatcgtacccgacgagtatctgggcaacgtcatcggcgacctgaccagccgccgcggcatgattcagggccaggagagccgtcccggcgccactcaggtggatgccctggtgcccctggccagcatgttcggctacgccactgacctacgctcctccacccagggccgcggccagtactccatggagccccacagctatgtggagatccccaagagcatcgccgagaagattatcgcggagcggggccgcaaggacgattaatttctgtcctttggcatttctcgcaacaagggtattgcattttattctgcaatgctatacaatattttcgcattattgtggaaataagaaccatcttactatcagaatttaaggaggaacatccaaatggctaaggctaaatttgagcgtaccaagccccatgtcaacatcggcaccatcggccacgttgaccacggcaagaccactctgaccgccgctatcaccaagtatctggctctgaagggccaggctcagtacgaggattactccagcatcgacaaggctcccgaggagcgtgagcgcggcatcaccatcaacacagcccacgtggagtacgagaccgatgcccgtcactatgcccacgttgactgcccgggccacgccgactatatcaagaacatgatcaccggtgctgctcagatggacggcgccatcctggttatcgccgccaccgatggccccatggctcagaccaaggagcacatcctgctggcccgtcaggtgggcgtgcccgccatcgtcgtgttcctgaacaagtgcgatcaggtggacgacgaggagctgctggagctggtcgagatggaggtccgcgagaccctgtccaagtacgagttccccggcgacgatatccccatcatcaagggctccgctctgaacgccctgacctgcgagggcggtgtggacgatcccgacttcgcctgcatcaaggagctgatggatgccgtcgacagctatatccccactcctgaccgtaaggcggatcagcccttcctgatgcccgtcgaggacgtgttcaccatcactggccgcggcaccgtcgctaccggccgtgtggagcgcggtaccatcaagatgaacgaggaagtcgagatcgttggcctgaccgacgagaagaagaagaccgtcgtcaccggcatcgagatgttccgcaagctgctggactttgctgaggccggcgacaacatcggcaccctgctgcgcggcgtcgccaagaccgacatcgagcgtggccaggttctgtgtaagcccggctccattcacccccacaccaagtttgtgggccaggtgtacgttctgagcaaggacgagggcggccgtcacacccccttctttaacaactaccgtcctcagttctacttccgtaccactgacgttaccggcgtcatcaccctgcccgagggcaccgagatgtgcatgcccggcgataacgttgacatgaaggtggagctgatcacccccatcgccatcgagaagggcctgcgttttgctatccgtgagggtggccgtaccgtgggttccggcgtcgttatcgacatcgaggagtaatctcactccagctttctcgcaggagggtgaccgcccgagggaaaagcgtcgttatcgacatcgaggagtcattgatgctcccttggaaaatccccgccataaggcggggattttcttttgccgcagtgcggccgcccggcccccatctgcggtggggcgcgccgggagacgcgtgcagggttttgcccaaaggacaaaaccttgacgcaggcggaattcatttccgccgagcaagcaaaatgaacagggttcccacagaatcggagcttctgtggaatggccgcaccgtggcaaacgcgtcgtcatcggcattgaggaggtaatatttcccgagcttttccacaggagggtgagcaccggcggaaaagccttgttatccaccttgtgaagttcttcttcatttcagcagaaagcctgccgatcggcaggctttctgctttttaaaaagctgctttatccagaaattttttaaggaaaagggacgagctgagtggacagtcccctttttttatggtacaacaggaagtggaaaggggcgtgccagacatgcagagcatattgaccaacctgggagccgtcaccccggacgaggcagaggagaccttacagacggtgaccgactttctgaaagggctgaatctggagaagctcatcaccctgctgctccttctggcaggctgccttgtggtcatgaagctggttctccggctgaccgaccgggctttcctccgtctggagctggagcggagcctgcataccttcatccatgcggccctgcgggtgattttgtggatgattaccctgtgtatcgttctggactacgtgggagtgcccatgaccagcctggtggcggtgctcagcgtcattggactggcggtgtctctggccatccagggcactctatccaacctggccggcggcatccaggtgctgctctccaagcccttcaaggcgggggactacgtggaggccggcggcatctccggtacggtgatggaggtcgggctggcctatactaagctgtgcacggtggacaacaaggtgatctccgtgcccaacggacagatttccggggaaaagatcatcaactacagtacggaagagcggaggagagtagatctcaccttcaacgcctcttatgacagcccgcttcagcaggtgaccggcgttctgcgggcagtcgtggccgcgcaccccatggccctggccgagccggagccctttgtgcgggtcaacgcctaccgggacagcagcattgagtatgtggtccgggtgtggtgcgccacgggggattactggacgctgtactacgacctgttggagcaggttaaagaggcttttgaccagaacggcattgagatgacctacaaccatctgaatgtccacttagtggaacggaaggaggaagaacagtgagtaacgataccattgcgggcagcggactggaaaagatgttctacgggcagatcctcagcatcctggtgatcatccctttggtggggtggattgccgccattgtgggtatcgtcctgttcctggttggccttcacgaggccgccggggccgacgagggctaccgcaccgccttctatgtggagatcggcattctggtgctgagcgtactcgcggtttttatcggggtgctgaatatagtcacttcgattctgagtctggtggtgatctacctggtttgtactaccactgccggcctgcttgaggtcaaaggcgacctgggcacggcagcccggggacggtttgcgtggaagttctatgggggctgcacggccctggtggtggtctgctctatcctgagtctcatcccgctggtcaacatactggcgatggtggtaatcgtccccgcgtccatcgcgtctgttgtgggcgggatcctcctgctgatattcctctaccgggcctgcaaaagtctgcggtattgaatacggaaaaacgcggcgcgaaagcgccgcgttttgcattcaggcgggcatctccagcccgtggatgaagcccccgagctgggcggagagcacatcgccgccgatgaccgtgctcttgtagacgagcaggccggcctggatgccgctctcaccggtggggtagttggtgatctcataggtgtaccgcttgacgcgcttgccgcagtagtcggtcagctcgaagccctggctggcctggagttccaggtactggctgtaggtctcgtcgaactgctcggggatgatcagctcctccacggcgatggggtcgctggagaccgaccagccgtagctctccagataggcgatccggtcctcgttggtgcggactcccttggggctgaccgcagcggaggccgccgcgccccgcccccccagcagcccggcggccgccaccagtacgccgcagaccacggcggcggccgccgcgacggctgcaattcggcccttgcggaccttggcggtgatgatgaacacagcgcaacgctcccttccgaaaagtggtcgtgatgattggtatgttcttttccaccgttgtatgctaaaatgttgaaaaaaggacgagccacaggaggagcctatggagcggttggataaaattttggccaatacaggccggtggtcccgaaaagaggcgcgggagctggtgcgggccggccgggtggccgtggacggcgtgacggcccaggcggcggacgggaaatacgaccccgcggcccgctttgaggtggacggcgaaacggtttccggggagcggctggtttacctgatgctccacaagccggcggggctggtgtccgcgacggaggacccccgccagcccaccgtgctggagctgctgccccagcatctgcgccgggtggggctcttcccggcgggacggctggacaaggacaccgagggcctgctcctgctcaccaatgacggccccctggcccaccgcctgctggccccccggcaccacgtggacaagatctacttcgtccgggtggatggggaactggatggggcggacgcggcggcctttgccgcagggatgatgctggaagacgggctggcctgcctgcctgcggggctggaggtgctggagcagccggacaccgccctcgttaccctgcacgagggcaagtaccaccagatcaagcgcatgctggcggcccgggggaagccggtggtgtacctcaaacggctgaccatggggcctctcatgctggacccggccctggaaaggggggagtggcggcccctgtctgcggaggaggtggccgctctgcggcaggcgtagaggcggcccgggcggggaacgttcacggccaacttgcccggcacagccgggcatgccagcgctttggcttagcgctgcggtttcgtctgcgccctgccttcgtctcccagcccacggcctctgtgcttcctgtcagctttcggcaatttcaacaaaaaattttgcaaaacctattgaaaagggcaaaaagacccggtataatagaaaggaaacggacgagagagcggtttgtccccctgcgggggaatcaaaataaggaggctatcaccatgtccagcaggatttttcagagcgttgtcttacagatgaaggacagcacggagagagccatcggcgtgatcgattctgagggaacggtggtggcctgcaatgagctgagctgcatcggggagcactggccgggcgccgtggaggcggtcaacaggggcgagggagacgcggtccgctttgacgggcgcaccttcaaggccctagccggctggggggcccagttcgactatgccgcctttgtcaagggtgaggactccgaggcgcagatgctctgcgccatggccacggtggcgctgaacggcgccaagacctactatgaggagaagcacgacaaggccacctttgtcaagaacatcatctccgacaacattctgctgggggacatctatgtccgcgccaaggagctgcactttgtctccgaggcgccccgggcggtgttcctgatccgccaggtggagaccagcgatcccgccctcattgacgtggtgcataccctgttccccgacaagcaggtggacttcgtcctctcgatcagcgagactgacgtggccctcatcaagcagctctctgagggggccgagccacgggagctctataagatcgccaagcagatcgaggagaagatcaccgaggagctccatgtgcgggtggtcatcggcatcggcaccatcgtgggccacatccgggagttggcccgggcctacaaggaggcggggatcgccatcgacgtgggccgggtgttcgacacggagaagagcatcatcaattacgagaatctgggtatcggccggctgatctaccagttgcccaccaccctgtgcgagatgttccttcaagaggtatttaagaagaaccccatcgacgcactggaccaggagaccctgttcaccatcaacaagttctttgagaacaacctgaacgtatccgagacggcccggaagctctttgtccaccggaacaccctggtgtaccgcctggagaagatcaagaagcttaccggactggatctgcgggagtttgacgacgccatcaccttcaaggtggcgctgatggtcaagaagtacctgatctcccggggcatcgacaactgagtgcactgccagcaggggcgccggagacggcgtccctgctggcagtgggcatttctttcgaatacgataaatgaggtaaccgagcgtgatacggcttattgacattcaaaagtcctacgacaacgggacaaaggccctgaagggggtcaacctgcgcatcgacgacggggaatttgtctttctggtgggcccttccggctccggaaagtctacgattctgaagctcatcaccgccgaaatcgcgcccaccggcgggcggctgatggtcaacggctacaatctgaacaacatccggccccggcaggtgccctacatgcggcgcaccctgggggtcatcttccaggatttccggctcattgagaaaaagacggtgcgggagaacctgacctttgccatgcgggcggtgggggcctccccccgggagatccgcaagcgtgtgccctacgtactggagctggtgggcctggaccagaagggggaccgcaagcccaaccagctctccggcggcgagcagcagcgggtggccatcgcccgcgccctggtgaacaacccccagatgatcatcgccgacgagccgacgggcaatctagatcccatgcgctccctggagatcatgatgctgctggagcgcatcaacgagctgggtaccaccgtgctggtggtcacccacgcgaaggaactggtcaaccgcttctccaagcgggtggtggccattgagaacggcaggatcatcagcgacgagacgggcgggtattacaacaatgagacaacgatatgatttcggctatttcctctccgagggcttccacagcatcttcacccacggctttatgtccttcgccgcggtttgtatgattatctgctgcctgctcatcatgggctcctttaccctggtggcggtgaatgcggagaacatgttcagcgatctggaggccgagaaccaattcacggcgtacatcgacgagagcctcacccaggaggaggccaaagccctccaggacgacatcgaggcggtgcccaacgtggcccgggcggaattcatgaccaaggagcaggcccaagaggagtttgaggccgattatgagggcaacgagctgtttgacggcctgccctccgatgtgtatcgggaccggttccacgtctatctggacgacatcagcaagctgactgagacagagaacgcggtaaaagaggtaaccggcgtggccaagactaaatcagcccccgagatcgccgagggcttcaccgtcatccgcaacatcgccggggcggtggccgtgatcctagtggtgatcctgttggcggtgagcctgtttattatcgccaacaccatcaagctggccaccttcaaccggcgggaggagatcgccatcatgaagatgtgcggcgccaccaacgcctttgtccgctggcccttcgtctttgagggcctgatcctggggctggtgggtgcggtggtggccttcttcctccagtggggcatctatgtgctggtgggcagcgccatcagcggctcggacaccatctccctgatcaccgtgctgcccttccagcccatggctttacgggtgctgggcgtgttcgtcctcaccggcttcgtcatcggcgcgggcggctcggtgctggccatccgcaagttcctgcaggtataacggcagcggcaaaaggaggcttccatggcgtttgacagatcccttcggcgggcggcatgcgccctgctgacggccgcgctgctggttcccgcctggggcgggctggcccggcaggtgcgggcggcggcccagagcgagatcgacgcgctgaaggccgagcaggcggagagccaggtccggcaggaggagctgaaagagcagctagctgacgtgaaagaggaccaggcggccgcccagcagaagcggcagctcctacagcagcagttagaggcaatcaatgccgagctggacagcatcaacgcgcagatctcctactatgacggggagatcgcccggaaagaggcggagcgcagggaggcggaggccaaagagcaggcccagtatgagcggttctgcgagcgggtgtgcgccatggaggaggaggggacggtgtcctactggtccatcctctttaacgccgaggacttctccgacctgctggaccgtctggccgatgtggacgcggtgatggactacgacaaccaggtcatggaggagctgaccgcggcccggcaggagctggagcggcttcaggcggagctggagagcgcccgtgcggaggagcaggcggccagggagcagcaggaggccaagagggcggagcagcaggccaaggtggcgcaggcccagaagctgctggaccagatcaacgccgatgtggcggaggtcaaccggcagttggacgcagagaacgcggagtgggccgccatcggggcggacatcgcccggaagcagaaggagctggaggagcagcggaagcagaacaacgtccagctcccgcctaccggcgacggctggctgtggcccctgcccgcgtccaatttgaagctgacctcggccttcggctaccggatgcacccggtggatcacgtgccaaacagccacaccggcattgacgtggccgcctccaccggcgtccccatctacgcggccaggggcggacaggtcatcatgtcggagtatggcgccggcgccaactggtcctacggcaacttcgtggtcatcgaccacggggacggcaccaccaccctctacgcccacatgtcctcgcgggcggtgagcgaggggcagatggtgtcccaggggcagaccatcggcgccgtgggcgacaccggcaatacgtcgggcccccacctccactatgaggtgcggcggaacggccagcggacagaccccgaggcatattatcccaatcttcccttcattcgggcctataattggtaatggaacggacataaaaggagcggcaacgtggcaaagaagcagagtcagaaaaagagaccccagaagcagaaaatcgagtggcgccgggtgtttgtggccgggctggccgtggtgatggccctcctcctgctgctgcccatgatcagcatgatcgccggcggcgtgggcgcggtgacgcagagcgagatcgacgcgctgaaggaggagcagcgggagagccaggtcaagcagcaggagttgaagaaccagctggccgacgtgaaggaggaccaggctgccgcccagcagaggcggcagctcctgcagcagcagttggaggccatcaatgccgagctggacagcatcaacgcgcagatctcctactacgaccaggaaatcgcccagaaagaggcggagcgcagggaggcagaggccaaagagcaggcccagtatgagctgttctgcgagcgggtgcgcgccatggaggaggaggggacggtatcctattggtccatcctcttcaacgccgagaacttctccgacatgctggatcgcctggcggacattgacgcggtgatggactacgacaaccaggtcatggaggagctgaccgcggcccggcaggagctggagcggcttcaggcggagctggagagcgcccgtgcggaggagcaggcggccaaggaccagcaggaggccaagaaggcggagcagcaggccaaggtggcggaggcccagaagctgctggaccagatcaatgccgacgcggcggagctcaaccgccagctggacgacgagatggagggcgcggcggagatccaggcggagatcgcccggaagcagaagcaactggaggaggagcgccggcaaaacaatgtcaccatcgactcggagaccaactacctgtggccgctgcccggctactaccggctgacctccctgttcggctaccgcattcaccccatcaccggcaaggcccacagccataccggcatcgacatccccgcccctggcggcacccccattcaggcctgcaagagcggacaggtggtcacctccgcctaccactactcctacggcaattacgtggtcatcgaccacggcaacggtaactccaccctctacgcccacatgagctcccgggcggtgagcgaggggcagatggtgtcccagggccagaccatcggctatgtgggcaccaccggcagctccacgggcaaccacctgcacctggaggtgcgggacaactacacccgtgtggacccggagagcaagttccccagcctgagcctgacccacccctggtaacgtccgggcgcggctgcgccgttttgctgcaacaagttcgcccgccgcgcgcgggcatggcccagaggcgggcggaggcatcggcctccgcccgcgctggtttttctggaaaggatctgatcccgtgcgaaagaaacgtttttccctggcccagcttctgctggccattgcactcaccgccgctgccgtgctgggctgcggactcctggccgtccgtgcctggatgggggagggtgggcgttccctggtggaggggctgcggctggtcaacaccctctttgtgggggaatatgacgagacagaggtggtggacgccgccctggagggcatggtgtccggcctgggcgaccgctggagctactacctgacggctgatgagctggaggcccagaaccagcgccgcaccaaccagtatgtggggattgggattaccgtcaactacacacgggaggagggactctatatcctcgcggtggagaccggaggccctgccgaggcggctgggttggaagccggggaggtcattaccgctgtggacggcgtctccctggcgggagaggcacgctatgagggcgcgaatcttatccagggggaggcgggcaccaccgtcaccctggaggtgctgggggaggacggggcggcccgcaccgtggaggtggagcgggccgagctgaagaacgacccggtggagagccggatgctggagggaaaggtgggctatgtgcgcctgctcaacttctacgaccacagcgcccagcggctggaggaggccgtcacccagctccgggagcagggggcggaggcgctggtctttgacatgcggaacaacggcggcggctacctgagccagctcaccgacatgctggacttcctgctgcccgagggccccatcttcatcagccgcgaccgggcgggccatgaggagatcaccaactccgacgcggactgtgtggaactgcccatggcggtgctggtcaacgccgacacctactccgccgccgagtttttcgccgccgagctccaggagcagggcgcggcggtgatcgtgggggagcccaccagcggcaagggctactctcagcagaccttcccactgccccacggcggcgccgtggccatctccaccggcgcctacttcaccggaagcggcgcctcccttatcggcacgggcctgaccctggatgcggaggtatacaacaccggagcggaggatgatcaactggccgccgcgctggaattgctggaaatccggtaaaaaaagtcttgactgtaaacccacttgataccctaccgtggagacaaggaggcgagcagaatgacgatcggtgagctggagaccagcttgggcatgacccgcgccaacattcgcttttagggaagggataaaaccccaccggcgaagccggtggggttcagtctttggcaaaagtcgttagatccaacgtgaaagggaacccggatggttcatctccggatcaggagccgcagcaagcggcggtcgtgctccgaatcgccctgcggggcggtttttcacacgatccctccctccgaatgtttaacaggagggtttatcgacagtatcttaatacgattgcggagcgctttgcccctctgccgcccggcggacaggcggcgtggggaggctgggctctctctgtccggccagcagaaagccgctggtcagggcggtgaggggagccacagtcaccagaccgaaggaacccacgatggtgtgtatgatttctgaggcgacatacttgtagttgagaatgttataaaggggagtgccctgggccataaagaccatgagcagggccacgtagccgccggagtaggccagcaggagggtggttgtcatagtgcccatggccgcccgccccacattcataccggagcgtaccgcctcccagcgggagatatcagggcgctttttcactacctcgttgaccgcagatgtgatatccaccgccagatccatcaccgcgccggaggagccgatgaagatcgccgccataaagatctgggtcaggttgagatcctgatatccggagtagagcagactctccgagtaggacataacggccccgtggatctgaaacaggtcggtaaacacaatgcccagcacacatgtgaccagtatacccaggaacgcacccgacacggcggcggcgcaccgccgctcgaagccgtagaccagggcgatgatcagcagggtgagggccagagtaaccgccaggccgaccaggatggggttccagcccttgaggtagaggggcaccagaaccttccacagcatcagcaccgtcagcacgaaggagacgatggcccgcaggccggtacgcccggcgaagaggatcaggaacacggcgaagacggcggccagcagagcctccttgccgatgcggtagtggtcggtcatggtgacggagagaatctcgtcctcctggcagctgaccaccaccatggccttgtcaccgggggcgaagagcttgtcctgctccagggagccgttgagcatgttgatgccggtggcggtccgtccctgaaaccggccgcccagcagctccagagtgcagcgctgctcaccggagcggacgagcccggtgtccacgatggtggagtcgtccaccgccagcacccgggccgcgcagcggtcggcctcctggtactggacggccccttcatacccggtggggaggagcagcagcagggcggtcagcgccaggcagagcacgacggggacgtaatagcggcgctgggcggggtcacgtagaaaacgcatagatggataagtcctttctgcgccgaggcggatgaggtcgggagaccccatccgcctcggctgtatggaagtgggaaagcaggggttaggctatgccgagcatgccggccagcttgtgatagatctgagtattgtcgtagtagccgttgaactgcccggcgttaacaccgtgggccagcacggccacgggcaggccggtgtggctgtaagaggtgaaggagatgccggacttgttgttgatgatgtgggtgagggtgacgctcagaggctcgtaggtgccgtagagcacatattcctcctgctcgtactggctggcagcagtgccgttgacgctcttctcgtaggcggcgcggagctgttccagctcgtagtcggtgagcaccagcttatcgccctcctcgccctggggcttgaggccgaagagcgcctccacatccttcaggacatcctcaaaggaggtcttgtcctccttgtacctggacacgtagtcgctgtcgaacttggcgtaggagatcttctggctctccagcagatccagataggtgtcgtagtcggtgccggcaaagccgatggtgaggccgccggtttcgtggtcgccggtgaccaggatcagggtctcatcggcgtgctccttggcgaagtcgatggccacctgtaccgcatcggccagggcctgcgtgtcgtggatggtggaggcggcgtcgttggcgtggcaggcccagtcgatcttgccgccctcgcacatcataaagaagccgtccttgtcctgggagagcacctcaattcccttttccacgtagtcggccagggcccacatgtcgtcggtgcggtcgatctcgtaggccatggcgtcgctgtcggccaggtgctcgtcgatgattaccaccgggccgccggtgacctgctcggcctcagcctgggtcttgaccacatgatagcccgccttttccgccagggcgtacagatcggcctgatctccctcggcgccggtgggcttgagcaggccgccgccggcgaagtactcaaagccggagtcgatgagctccaggccgatgtcgtagtagtcattacggctggcctggtgggcatagaaggcggcaggggtggcatggttgaggttgacggaggtaatgacgcccaccgaatagcccttctgggcgtggagctgttcggcaatggtttcgtaggaaatggtgccggtttcgtccacgttgatggagccggagtaggtcttgtagccggtggagatggaggtggcggtggaggcggagtcgggggcaaaggagttggagtcataagtcacggcggagccggcggcctcaaagttcatgaagttgaggtactcgggaccgtccagaatggctccgccgttgtcgtccaggctgggctgggcctgccgatagtcggcgtcgttcagcgcacccaggaaatcggatgtggactggatctggggatagctcatgccgtcgccaatgaagagaaacacgtatttgggggctttgacggtggagccggtggtggagagggactgaacctcggcggcaggcgtgggggtgggatcgggcgcggcggccgtgggattgccgcaggcagccagggccgtgcccagcgtcagggcggccgtggacagggccaggggacgcttccaattcattctgattcctccaaagttattttgatacgctcggtacgctgccatgatagcggatagattggggagtgcgctatcagcgtggtgtaaaacaagctaaactctttgtaagatatcgtaaaggaaaggtgaggcgcgggggttgacaagcggcggaaccggagtgataatcagagggcggaacgaaaaacacggcccggttggtagtccgggcgcggtccgggggagcgtcccgcccccggaccgtcagtaacctgcctccttggttgtccgcgctccgcgcaagacctatatttaaggaggacaacttcatatggaatgcggctatgcgaggctgacggtctggtttgccgaccccttctgggtgggcgtgtacgagcgggaggcggaggggcgcctggaggtgtgccgccataccttcggcgccgagccaaaggacggggaggtttggcagtggctcctgtcggcgtggcggggcctggactttagtccagcggtagaggcgccccggcgtccatccggtcgggagaatcccaagcgggtccggcggcaggcgcggaaccgtccagagaaaaccggcgtcggcacgaaggcccagcaggccctccagctccagcgggaggcgcgcagggcggaacgggcgcagcggcatcgccaaagggacgcggcggaggaggagcgcaggttccgcctccgccaggagaaaaagaaggagaagcgccgggggcactaacccccggcgcttcctatatcctccgccctcataaaccgggccccggcgcatatcctgttcccgaggtgatggggttggtgggaattgtggcgctggaggagcggcggggccgccgcccggtggtgacggaggagcgggtgctgggcctgcgctgtctgcgggtgtcggtgccggtccgccccggtctgcgggatgacaggcggaagagacgggcggagcagggggcggcggccctgtaccgcgcaggagtacggcgggcgctgacggcggaggattttcccgactggcccgcgctggagggacaggggctgcggagtgtggacctggagcccttctgccaggctatcgccgtccccctggccctggccgcgctccggcgggcgggcatactgcgggtgcgggccactgtggccctgtccggcccccgggtgagccggccgctgtttgctgcggcggcgcgcctgtgtccccaggtgcgccatctggtggtggatgtgcccggcgagggggaggaactggcggcgtggctgcgggaggagtatggcgcggcggtgctgcggcccggcggggcggcccccgacgtgaccctggccttcggcccgggcggggaggagaggggaacggtgctccggctgtacggccccgtgcccgggctggccggcctgcgccccatactggaggagggggggctgccgccggacctggccccccttccgctgctgtccctgttgtgggagtgcggccgcctgacagagggacagatccggattcatgccacatgatgggaaataattgacttgacagaaggtgggaaactacctataatatcgtattaacgtggcgtaatgtttctgttgagatttcagaagaggcctggttgaggccttttgaccgataaggaagaagcaaaaaagaaaggtgtgcgcatacggcaatggcgaaagaatttaagctgagcgcggagcgcttggaggagctcaagcaggagctcaactatctgaagaccgtccgggagaaggaggtcgccgaccagatcaaggaggcccgctccttcggcgacctgtccgagaacagtgagtacgacgaggccaagaacgagcagggtaagctctactcccgcatcgcggaggtggagaacatcctggccaactatgtggtcatcgaggagcatgagaccgaccccaattccgtccgcctgggctccaaggtcaaggtactggatctggagttcgaggaggaggagagctaccaggtggtgggctcccaggaggccgaccccatgaacggccgtatctccgaggactcccccttcggcaaggccctgctgggcaacgcagtgggtgacgaggttcaggtggaggcccccgccggcgtactgaggtaccgtattttagagattcaaaagtaaggagcagagtcatgagcacagaagagagaagcgtcaaccagcccgaggagcagccgtccctgtccgaacagcgcctgatccgccgcgccaagctcaaggagctgcaggacgcgggccaggaccccttccagatcaccaaatttgtggtgaagcaccactccgccgacattaaggagggctttgaggccctggagggcgctatgacctccgtggccggccgcatcatgtccaagcggggcatgggcaaggccgtgttctgcgatctgcaggacggcaagggccgcatccagctctacgtccgcgtggacgagctgggcgaggaggccttcgccaagttcaaaaagaccgacatcggcgacatcgtgggcgtggaaggcgaggtctttaagaccaagcggggcgagatctccgtcaaggcccacaaggtgacgcttctctccaagtccctccagcctctgcccgagaaattccacggcctgaccgacaaggagatgcgctaccgccagcgctatgtggatctgatcatgaacgaggacgtgcgccgtgccttccgtatccgcaccgccttcatcaagcatatgcgccggtatctggacgagcgggactacctggaggtggagacccctgtcctcaacaccatctccggcggcgccaccgcccggcccttcatcacccaccacaacaccctggacatcgacatgtatatgcgcatcgccaccgagctgaacctgaagcggctcactgtgggcggctttgagcgggtgtatgagatcggccgcatcttccgcaacgagggcatggatcccaagcacaacccggagttcaccaccatcgagctctatgaggcctatgccgacttccacgacatgatggacattgccgagggggttctctccaccgctgccaaggagatcctgggctcctatcgtgtgacttggctgggcaacgagattgacctgactcccggctggaagcgcatgaccatgatcgatgccgtccgggagtatgtgggtgtggactttgaggccatctccgacgacgaggaggcctgcaaggccgccgaggccaagggcatcgatctggagggctgcgagcgcacctggggcaccgccctgtacgaggcctttgaccagcgggtggaggagaagctgatccagcccaccttcatcaccatgtatccggtggaggtgtccccgctgaccaagcgctcccccaaggatccccgcctcaccgagcgcttcgagctgtttatcaaccactgtgagtttgccaacgccttctccgagctcaacgatcccattgaccagcgcggccgcttcgagcacgagctggccctgcgtgagatgggcaacgacgaggccggcatgatggacgaggatttcatcaacgccctggagtacggcctgccccccacgggcggcatgggtatcggcatcgaccgctgcgtgatgctgctcaccgactccgactccatccgcgacgtgatcctcttccccaccatgaagcccctggacaagcctgagtccgccaagcgcgccgcggctggaaccaactgcgctgtccccgccgccgagcagggcccggtggacttctccaaggtggagattgagcccctgttccaggagttcgtggacttcgagacctttgccaagtctgacttccgggccgtgaaggtcaaggagtgcaccgccgtgcccaagagcaagaagctgctaaagttcgttctggatgacggtaccggcgaggatcgtgtgatcctgagcggcatccacgacacctatgagccggaggagctggtgggcaagaccctcatcgccattaccaacctgccgccccgcaagatgatgggcatcgactcctgcggcatgatcatctctgcggtacaccacgaggagggcgtggagaagctccactgcctgatggtggacgaccacattccggcgggcgccaagctgtattgagccggtctgtcctgggaagcgggagcaagtgcaagggggtatgaggagagccatggagaagcgcctgggaagtgaatatctgcgtgctgaccgggcgtttcatacccccgctgctcccatccccggctggaattcgccggactgaatgagcatgccgaagggaatccttccttcggcatgcttttctgcgtcaaaatcgtttccatcccacccttaaggaggccaaggctttgatcaagaaatgcgcgctctggctgcgggacagctttatccgcagccggagcctcaacgccacccgcattgtggcgggctccttcgcggcgattattctgatcggggcgctgctgctgaccctgcccatcgcctcccgggacggacagagcgccgggttcttcaccggactgttcaccgccacctcatccacctgcgtcaccggcctgatcctggtggacacgtggacccagtggacgctgttcggtcaggcggtcatcctgaccatgatccagttgggcggcctgggcttcatgacggtcatcaccctcgtctccttcgccctccaccggcgtatcggcctgtcggagcggcttatcatggtgtccaccctcaacctcaacgacatggacggggtggtgcgggtggtgcgccacgccctcatcggcaccttcgccatggagacggcgggggcggtgctcatgtcggtgtgcctcatcccggagttcggcttcctcaagggcacttggcacgccgtgttccacgcagtctcctccttctgcaacgcgggctttgatctgctgggagggcgcttcggtgccttcagcagcctggccggctacaacgacaaccccctgatgctgggcaccaccgccgccctcatcgtagtgggcggcctgggcttcttcgtgtgggaggacattgtggacaagcggtgctggagcaggctgtcggtctacagcaagatggtgctcctcatcaccgctgtgctgatcgtggggggcgccctgttcttcctgatggaggagtttgacaaccccgccaccctgggggacatgcccctctggcagaagggactcaacgccctgttccagtccgtcaccctgcgcaccgccggcttcgactccatcggccagggcggcctcagcgacaccagcaaggccatgtcctgcgtgctgatgctcatcggcggctcctccggctctaccgccggcggcctcaagaccgccacggtgggcgtgctgctgctggccctgcgctccggcctcatgggccgggagcaggtcaccttccgcggccgggcgatccactaccgccgggtgctcaatgccatgactctggcgctggtggtgctgtttgtctttgtgttcagctccatggtggtgtccacggtggaggatctgccctacctggacagcgcctttgaggtggcctccgccatgggcacggtgggcctgaccaccgggatcacccccaccctcacccccttctcccaggggctgctgatcctgctgatgtatatgggccgtgtgggcatcctgtccttctccatcgcctttatcaccggaaacaggcatccggccaagatcaaataccctgagatgaacgtcatgatcggctgaagcgccgcatcaggagaaaaggaagtgttttccacgttatgaaaacctttgttgtcatcggcctgggccggtttggcagcgccgtggccacggagctcagctccctgggccatgaggtgctggcagtggacgagcgggaggatcacgtgcagagggtggccgaaaaggtcacccacgccgtcaccggcgacgccagggacccctcggttctgcgggccctgggcgtgcgcaactacgactgcgccgtggtggcggtgggagacgatatcggaaactccgcccttatcacgcttaatctgaaggagattggggtcaagcgggtcatctgcaaggcccagagccacgtccaccgcaaggtgctggagaagatcggggcggaccgggtggtattccccgagcacgagatgggggtcaagctggcccaggggctctccagctccaacgtgctcaacttcattgagctgagcgaggatttcggcatcgtggagaccgccgtgcccaaggagtggcactacgaaacgattcaaaatctggatgtgcgggcccgttacaaggtcaacatcatcgccgtgcgcaggggcaaggacggggcgctgaacgtggcccccggcgccagctatgttattgagccgggcgatgcggtggtggccctgggccgcacggaggacatcaaccatctccaggacttgtaaggaggaccgccatggagcgcatcaccagccggcaaaatccgctgatcacccgcctgcgcaggctgggggcggagaaaaagacccgccgggcccagggggtattcctctgcgaagggaccaagctggtgggggaggccctgcgctgggggccgccgccggagctgctggcggtggcggagggaaccgcccccccggcggagctgcccgccggggtgcgggtggtggaggtgccggaggcgctgctgcgggcggtgtccaccgtggagacaccccagggcatgctggccgtgtgccggacgccggacaccgctccgccggagacgctgccggagggccgcctgctggtgctggacggggtgcaggaccccggcaacgtgggcaccgtctggcgcaccgccgacgccttcggggcggcggggctgttcctgctgcccggctgcgccgagccctttgcccccaagacggtgcgcgccaccatgggggcctgcttccgcctgccggtgtgggaggggacgctggaggatctgaccggcctgctggcccggtcggccgtccccctgtacgccgccgccctgcgggacgacacggaggacatccgctccgttcccctgggcagcgccgccgtggtcatcggcagcgaggggcggggggtgtcccagccggtgctggacgcctgccgggcgactttgaaaatccccatgcgggaccgctgcgagtccctcaacgccgccgtggcggcgtctgtggtgctctgggagggctggcgctgagccaggccgccccagcggacggccccactccggtgggaccgcgcgctggcgcggcacagaacaagacaacaaccggaaggaggcaatcccgtggctgcgttaacttatctgctgtggctcactacccgggagggcctccggcccgagacggccgcggcgctggtgcgccggttcggcaccgcagaggcggcctacttcgccgaccccggggagtacgaactgctttcgttgagtgaaaggctttgccgctccctggcggacaagtccctggagcgggcggagcgcatcctgggcgactgcgaccggctgggcgtcaccctgctgacctatcaggacgcggcctacccggagcgtctgctccagctccacgactttcccctggtgctctatgtgaaggggcggctcttccgctttgacgaggagctggccgtcgccatcgtgggcgcccgggagtgcaccccctacggcgtggccatggcggggcggctgggcctggagctggcccggtcgggggcgctggtgctctccggcctggcacagggcatcgacgcggccgccctcaagggggccctccagggcggcggcccggcggtgtcggtgctggccggcggggtggacgtggtctacccccggcgcaaccagggactctacgaggacgtggccgccgcgggggccatcctgtcggaaaacccgcccggcaccccgccggaggggtggcgcttccccatccgcaaccgcatcctcagcggcctgtccgcgggcgtggcggcggtggaggccgccgagcacagcggcacgctgatcaccgcccggctggccctggaccagaaccgggaggtattcgccgtccccggcccggcggacgcgcccatgagcgcgggcaccaacggcctgatcgcccggggcgaggccaagctgatccgctcggcccaggatattctggtggaatatgtgacacgctttccccataaggtgcggcaggccccttcgctgtcccgggagggggcggaggcgcggctggaggcggcggccgagccggcgccggagccggtgccccgtccggcggagaggaatcccctccctctgcgcccccggagtgagctggaggccatgggggacgaacagcgggccatcttcgccctgctgagcggccgcgccctggtgcccgacgagatcgtgggccgcaccgagattcccgcccggcgggtgaacactgccctgaccctgctgcaggctcagggctatctgaatgagcttcccggcaagcggtttaccgctgccgtccgctttgacgactaagtatgtaaggagtactatgctgtggcaaaatcgaatttggtgatcgtcgagtctccggcgaaggccaagaccatcggcaaatatctgggcccgggctatgaggtgaaggcctccatgggccacgtgcgcgacctgcccaagagcaagctgggcgtggacgtggagcacggctttgaactgaactaccagcccatcaagggcaaggaagaggtcattgacgagctgaaaaaatccgccaagaagagcgagaaagtgttcctcgccaccgaccccgaccgggagggcgaggccatctcctggcacctgaaggagatgctgggcatcccggacgacaagacctaccgggtgaccttcaacgagatcaccaagaaggtggtcaacgactccatcgcccacccccgggccatcgatatggatctggtgaacgcccagcaggcgcgccgggtgctggaccgcatcgtgggctatcagatctcccccctgctgtggaagaagatccgccggggcctgtccgccgggcgggtgcagtcggtggccacccggctggtgtgcgagcgggaggccgacatcaaggccttcgtcccccaggagtactggtccctggacgctgatctctcccgcatcgcccccaacctggggcagttcaaggccagcttctacggccgggagaagaaggtggagctgaacagcgaggcggaggtcaacgccgtcatggaggcggtgaagaacgcccccttcgccgtcaccggcgtcaagcggcaggacaagcagcgcaaccccgcgccccccttcatcacctccaccctccagcaggaggccagccgcaagctcaacatgacgccccggcggaccatgtccatcgcccagcagctctatgagggcgtggacatcgagggggagggcaccgtgggtctcatcacctatatgcgtaccgactccctccgcctgtccgacgaggccaccgccgccgcgaaggacttcatcctcgcccgctacggcgcggactactaccccggcaaggcccgggtctacaagaccaaatccggcgcccaggacgcccacgaggccatccggccctccaacgtgaacctgaccccggaggacatcaagaagtccctcaccgccgagcagtataagctctacaagctcatctggagccgcttcctggcctgccagatggcctccgccgtgtacgacagcgtgtccatcgaggtgacctccgcgggatacaccttccgggccacccactcggccctcaagttctccggctacaccgccgtgtacgtggaggggaaggacgaggaggaggaggcgttccagtcccccctgcccgatctgaaggagggggaggccctgaagctggaggccctcaagcccgaccagcacttcacccagccccccagccgctacaccgaggccacgctgatcaaggccctggaggagaagggcatcggccgcccctccacctacgcccccaccatctccaccatcctggaccgggagtatgtggtgaaggagggcaagaacctccgccccacccccctgggggaggtggtcaccggcctgatgaaggacaaattcaccgacattgtggataccgccttcaccgccactatggaggagcggctggacgaggtggagaccggcaaggtggactggaagagcctgctgggcgacttctacggcgactttgagcaggagctccagaaggccgaggcggatctggacggcgagcgcatcaaggtacccgacgaggtgtccgacgtgatctgccccaagtgcgggcgcaatctggtgtacaagtccggccggttcggccgcttcctggcctgccccggctggccggagtgcgaccacacccagcccatcgtcatcgagatgcccggcaagtgccccaagtgcggcggcaagatcctcaaaaagacctccaagcggggatacgcctactacggctgcgagaacaactccagcaaggacgaggccaagcggtgcgacttcatgacctgggacgtgccggtgaaggagacctgccccgagtgcggccacaccctgttcaagaagtcgggccgggggttcaagaagcccttctgcatcaacccggagtgccccaacttcctgcccgaggatcagcggggctacaagaaaaaggccgcctccgcggagagcccggcagagggcgcccctcccgaggaggagaagaagcccgcccaaaaggcggcggccaaaaagaccgccgccaaaaagccggccgcgaagacggcggccgccaagaaaaccgccgctcccaagaagacggcggcaaagaaaccgacggcgaaaaaagccgcggccaagaccaaaagcgaggcctgaggcccgcttccaccggtggaagccgtcagggattccccctgacggcagactcagttgaaataccggaggaatgagatcatggaaacccaagagagaaagctgcgcaccaacctggacaccgacctgctcaagctggtcgccattgccgccatgctgctggatcacattggcggggccttcttcccggagacgcccatattccggtggatcggccggctggccttccccctgttctgctactgtatgacggtgggcctgctctacacccacgacatcaggcgctacctggggcggctggcgattttcgccgtggtgtcccagcccttctggattctcgccttcaacgccgacgacatcctgggcaacctgaccaactggaacatcttcttcaccctcttcctcagcctgctggccatgtgggggctgaccacccggcgctggtggctctttgtgctgggggttctggtgctggccttcggaagctttgactacaactacaacggcgtcattctgatgctgatcttttacttctgccggaacaaacccgccctgctggcggggctgtacatcctgttctggcttcccgccctgtggggcggctccctggaggatcccctggccctggtggtgggcggccacgccgtcaactggacgatcttcgccctgctggccctgccgctgatcctctgccgcacccactccggcctccggattcccaagtggttcttttacgccttctatcccgcccatctggcggtcatcgccctggtgggggggtgtatgggcgtgtaaccggaaaaggagcgtgttggcatgaagattctgctgctcaacggaagtccccggcccaagggcaacaccgccgccgccctggacgagatggaggccgtgtttgccgccgagggcctggagaccgagcgggtgcaggtgggaaaccgggttatccgggggtgtatcgcctgcggcaagtgcgccgagctgggccggtgcgtgttcgacgatctggtgaacgagctggcccccaagctggaggcctgcgacgggctggtggtgggcagcccggtgtactacgcctcggccaacgccaccctggtggccctgctgacccggctgttttactccaccccctttgacaagaccatgaaggtgggggccgccgtggcggcggcccggcggggcggcctgtcctccacctttgacgagctgaacaaattctttaccatcagcggcatgccggtggcctccagccagtactggaacagcatccacggccgcctgcccggcgaggccgcccaggacgccgagggcctccagaccatgcgcaccctggcccggaacatggccttcctggtcaagagcatcgccttgggccgggagaaatacggcctgccggagcgggaggagcctctgcgcacccacttcatccgctgagtcccacacaaggaggaacccatggaaccagttattgtaatcggcgcaggcctggcgggctcggaggccgcgtggcagcttgcccagcggggcgtccccgtcaccctgcgagagatgaagccctccaaaatgacccccgcccaccataccgagtggtttggggagctggtgtgctccaactccctgcgctcggatcagctggagaacgcggtgggcctgctcaaggaggagctgcgccgcatggactccctgatcctgtcctgcgccgacgcccaccgggtggaggcggggggcgccctggcggtggaccgccacgggttcgcccgtgcggtgacggagaagctccgctcccaccccctcatcaccgtggaggagggggaggtcacccaaatcccggagtcggggaacgtgatcgtggcctccggccccctgacctccgacccgctggcggaggccatccgggccttcttccccgagagccgcaccctcaatttctacgacgcggcggcccccctggtcaccttcgagagcgtggacatggagaacgccttcttcgcctcccgctacgacagggggaccccggactacatcaactgccccatgacggaggaggagtacgacgccttctgggccgagctgtgcgccgcccaggagacggaggttcacggctttgaggacaagcatgtgttcgagggctgtatgcccgtggaggtcatggcccgccgggggaagcagaccctgtgctacggccccctcaagccccgtggcctgaacgatcccaagaccggaaaggagcccttcgccgtggtgcagctccgccgggacaacgccgacggcaccatctacaacctggtgggcttccagacccacctgaaatggccggagcagaggcgggtgttctccatgatccccgccctcaggaacgccgagttcgtgcgctacggcgtcatgcaccgcaacacctatctggactccccccggctgttggaccgctattaccgggtgaagaaggagccccgcgtctgcttcgccgggcagatcaccggcgtggaggggtacgtggagtccaccgcctccggcttcctggtcgccgtggagctggcccggcggctggaggggaggccccccgtggacttcccccaggagaccgccgtcggcgccctggcgcgctatgtcagcaacgagagcgtcaccgacttccagcccatgaacgtcaacttcggcatcatcccgcccctgggctaccgcgtcaaaggcaagcggaataaaaatgccgagctgtccaagcgggccttggagcttctggacgggctggactggcggtaggggcggccacaaaggccgcccctacaggagcaccgggcggccccaacacgtaggggcgacccttgtggtcgcccgccctgccgggcgcacgtccgtaggggcggatgcccacatccgcccgctaccgcggggttcccgcaccgacaccctggggatcggacagaacgggcggccataaaggccgcccctacaggaacgctgggcggcccaaacgcatgggggcgcctcttgtggacgtccgccccgccgcgcacgcccgtaggggcagatgcccacatccgcccgcagctcaaggcagaagttccatgaggagacgcccggccagacggaagccgtgccggaagcaggccagccgctcataatcggacatttcgccctccagatcgttgagacggtcgagaaaatccagcccgagggaggcgcggatctggtcgtggcaggcgctgatgcgctccagccgctcttgatagccgggggcttgacggaaatccaagtgcctgttatccagctcatgttctaagagctgctgtaggaaatcattcattttatcaacaccccactaatagtgtggatttagtatacacgctattagtgggaaatgtcaaggggggattcggtgtattccaatgatttgtttggcacacggctaaaatgcctaagaaaagataggggagaaactcaaaaagacttggccgattttctcggtatcaaacaaaatcaaattggtgaaatggaaaatggccgcaaggcatctacctttgccaagcttgcccttttgtgtgagcactacaacatcagcgccgactatctcctgggccttacggacgagccccggcctctgcggcaagacgatggggcggggcgatgagggcatcgccccctacaggaacgccgggcggccccaacacgtaggggcgacccttgtggtcgcccgccccgccgtgggcacgtctgtaggggcggatgcccacatccgccctctgctgcggggttcccgctccggcaccctggggattggacagaacgggcggccataaaggccgcccctacaggaacaccgggcggcccaaacgcataggggcgacccttgtggtcgcccgccccgccgggtgcccgcccgccgttgccgtttatccaggaatgaacagagaaagtggaggagaacatatgaagatcatcgtagacgccatgggcggcgacaacgcgcccgtctccaacgtgcggggtgccctcgccgcggtgcgggagctgggcgtggaagtcattctggtgggccggggggaggacatcctcaaggtgctcaagggggacggcatcggcgaactgcccccggggctggagattgtccacgcctccgaggtggtggagatgtgcgacaacccggccaccgcctttaaggagaagaaggactcctccctgaccgtgggcctgaacctgctgaagaacggggacggggcggcctttgtctccgcgggcagcacgggggcgctgttgtcggcggccacgctgatggtcaagcgcatccggggcatccgccgggcggccatggccccggtggtgcctaccggcggcggcggcgcggtgctcatcgactgcggcgccacggcggagggtacgccggagtatctgctccagttcgcctttatgggctcctattacgccgagcgggtgctcaagcgccctgagcccaaggtgggcctgctcaacattggcgccgagccctccaagggcaccgacctccagcgggaggcccacgccctgctcaccgaggcgggcaaggccgggcgcatccacttcgtgggcaacgtggaggcccgggaggcggtgtacggcgaggtggatgtgatcgtgtccgacggctactccggcaacatcttcctcaagaccatggagggcaccggcggcttcatggccaagcagctcaaggccatgttcaagaagaacctgctcaccaagctggcggcggtgctggtttccggcggcctgcgggacttcaagaagatgatggacgccggggaggtgggcggcacccccctcatcggcatctccaagcccgtcatcaaggcccacggctcctccgacgccttcgccatcaagaacgccatccgccaggcccagagcttcgcggcctccggcattattgaggacatcaccgaaaatatcgaccacatgcgcctgcgcagtgagtaaatgggaaaattttgactttcctattgacaggcgggagaaacttgcctattatcatagtgcaatgacaccgtcgggaacgacggaagcgacaggagtagatgaacatgattttcgagaagctcgccgccctgctgtccgaacagttcggcgtggacgtggacagcattaccatggacacctcgtttgaggatctgggggccgactccctggacatcgtggagatgaccatggctgtggaagaggagtttggcctggaggacatggacgaggaggatctgtccggtatctccaccgtggcggatctggtccgctacctcaagtccaagctggaggactgaagaaaccaaagagacaggagccccgcctcccggcggggctccggctttgaaagggaggatcggccatggaggcattggaagaaaagctgggttaccggtttaccaaccgggcccttctggaaaacgccctcacccacagctcctacgccaacgagaacaaggccaaggggctgcagagcaatgagcggctggaattcctgggggactctgtgcttggtatggtcgtggccgactatctgttccgcacccaccccgacctgccagaaggggatctgacccgcacccgggcggccctggtgtgtgagggcagcctggtggaagtggcccagtgcctggagctgggcgcctacctgaagctgggcaagggggaggaggccggcggcggccgggagcggccctccatcattgccgacgcggtggaggcggtgctggccgccgtgtacctggacggcggcatcggctcggcccggaagctcatccagaagttcatcctggaccgggaggcggagaagagcgccagccgcgattacaagaccgcccttcaggagctggtgcagcgggagagcggccaggtgctgggctaccagctcatcggcgccgagggccctgatcacgccaagatcttctcggtggaggtggatctcaacggcatccccatcggccagggccgcggccgcagcaaaaaagaggcggagcagaacgcggctaaggctgcgatagagaagctgagggctggggaataaccggccgctccgcctcttttgcgagcgaaagcgagccgccgcgtcagcggcgtcaagcattttgcggagcaaaatcttgatgccgggcggattcactccgcccggacagatggagagaaacgggggcccaaaccgcctgcggcggtttgggcggcggagtagaacgcggccaaggctgcgatagagaagttaaaggcgggggaataaccggcccacgggcgaccacaagggtcgcccctacgtgcaggggctgtccggctcctttgtaggggcggcctttatggccgcccgtcctgtcaggccttcacagggcctggggcggtgcaaaacctggtgtacggcgggcggatgtaggtatccgtccctgcgaaatggtttgcccgccgtgtaccaccaaaccagacgcggagcgctcaggcgctccgcgtttttgtggaaaagggtttgcaaaggacgccgttccttggtataataatttattcagaatgataacatggcgaggtgcaggccttgtatttaaaagcgctggaaatccaggggttcaaatcctttccggacaagacggtgctctccttcggggaggacatgaccgccattgtgggccccaacggaagcgggaaatcgaatatctccgacgccatccgctgggtcatgggggagcagtcctccaaggccctgcggggcggcaagatggaggacgtaatcttcggcggcacggcggtgcgcagacagcagggcttcgcggaggtctccctggtgctggacaataccgaccacatcttcccgatggaggagagcgaggtgatggtcacccggcggtattaccgctcgggggagagcgagtactacatcaaccgccgttccgtccgcctgaaggacgtgaacgagctgttcatggacaccggactgggccgggagggctactccatcatcgggcagggccgcattgacgagattttgtccgtcaagagcgccgaccgccgggaggtctttgaggaggccgccggtatctcccgcttccgccaccggaaggaggaggccgagcgcaagctggagcgcacccaggagaacctggtgcgcatcaccgacaagatcgacgagctggagctccaggtggagcccctccgcgcccagagcgagaaggcccggaagttcctggtgctgcgggacgagctgcgggggctggagatctccctgtggctggagcagttggagaaaatacgggcgggggccatcaagaccctgtctgactacgagaacgccgtccgccagaaggaggaggcccagggggcggtggaggccctctacgccgccgccgaggagcacgccgcccagatgcgggacaaggacgtggaggccgagggcgtccgcttccagatgatgcagcgggaggccgacgccaacggactggaaaacgccgtggcggtactccgggccaacatccagaacaacctggagaaccgggaccgcatccggcgggagctggagcagcaggaggggcgggccgactccatcggcgcccaaattgccgagcggaaggagcgtctggaggcgctggtgggcgagctggacgccctggcggcggagctgtccgcaaaacagggggaggccgaggagaccgcccgctccgcaggcaccctggccggagagctggaggagctgcgccggaaggaggcggtggagaacgcctccgcctccgaggccaaggctctgctctccgccctggccgccgcggcccaggagctgctggaccgggatgaggcggtgcatcaggagctgtccgccggtgaggagcgggtgcgccagcttcaggagggccgggacgcggcccaaaaggagctggcccaggtccgggaggaccgggattccctccagaatgtgctcaacggctacggcctgcggctggagtcccgccggaaaaaggccaaggaggccgaggagcgccatgtcaagctccagatggaggagaacgccctccaatcccgcatccacatgctctccgagatggagaagctctacgagggctactccaaggcggtgaagctggtgatgggggaggcccggcggggccagctcaagggagttcacggcccggtggccgggctgctccacgtgcccgaccactgcaccgtggccattgagaccgccctgggcggcgccatgcagcacattgtggtggagcgggaggaggacggcaaggccgccatccagtacctcaagcgccgggacggcggtcggagcactttcctgcccctgaccaccatccgcccctccgacttccgggagcagggcatacggggggaggcgggcttcgtgggcctgggggacgagctggtgcagttcgacccccgctaccagaggatcttttccaatctactggggcgcaccgtggtggccgaggatatggacgcggccatcgccatggcccgcaaatacggccaccgctttaaaatcgtcaccctggacggccaggtgctcaaccccggcggctccatgaccggcggctcggtgtcccgcagcgcgggcatcctcagccgggccaacgagctggagcggctgaaccggcagcgcgccggtgtggaggagcagcgcaccgccgccgcccaggccatggaggaggccaggcgggaggccaccgccgccgcatacgaggtggagaccgcccaggcccagcagcgccagcacgaggacgccatcctcaagctggaggagcggctggcccatttcgacgcccagctcaccgatgcctcccgccggcgggacgagcagcgccgggagctggagcagattcaggcccgctccgcccagaccgaggcggataccgccgccgcccgggcgcgcattgaggccctggagggctccgccgccgccctgcgggccgaagccgagggcaaggcccagggccagagcgagctccaggcgcgcaccgccggtatccgggaggccatcgcggagctgaacatgcgccgggccggcctggaggcggagcagcaggccgccggacagagcctcaccgagctggaggccctgcggcgggatctcaccggcgaccgggccgagcgggagcggatgctcaccgcgtttgaggagaagaacgccgccctggaggaggagattctggagaaggaacggcggctccaggccatccgccaggagaaccgggagcggcaggaggccgtcgcccgcatcaatgaggagaagctgtccctggaggcccggcgcaaccaggccgacaagcaggcgcgggaaaaaaacagcgaactgttaaacttagagcgggaggtctccgtcttagaacagaggaaggccgccgccgccctggaggagaaaaccctgctggacaagctgtgggagacctatgagctgtcccatgaggccgcccgcgcccagcgggtggagctggagagcgtccccaaggcccagcgccgggtgggcgagctgaaaaaggcgatctccggcttgggcaatatcaacctggatgccattgaggagttccagcggatcaacgagcggtacacctacctgaccgaccagcgggacgacgtgctcaagtccaagaaggagttggagggcatcatcgccgacatcaccgaggagatgaaaaccatcttcgcccggcagttttccgtcatcaacgaggcgttccagcagacctttaccgagctgttcggcggcggcaaggccaccctggagctcgaggagccggaggacatcctcaactgtggcattgaaatccgggtgcagccccccggcaaggccctcaaggtgctctccctcctctccggcggcgagaaggccttcgtggccatcgccctttacttcgccattctgaaggtgcggcctacccctttctgcgtcatggacgagatcgaggccgccctggacgacgccaacgtggtgcgcttcgcccgctatatgcgccaaatggcggacaagacccagttcatcgtcatcacccaccgccgcggcaccatggaggaggccgacgtgctctacggcgtcaccatgcaggagcagggcgtgagccggatactgaccatcaacctgaacgacgtggagaaggaattgcacatcaaatgacgccggacacggcgggcggcaacacccagcgggacgggccatacctgtgccgcagggtgtgagcagaccccggcgaagcccagtgaaacgggttcgccggggagaggagacgcaagggagcgggcgaggaatttccgcctgcgggagttccgagcgaagcggactttgcgtcgacgaaggagcagggcgtgagccggattttgaccatcaacctgaacgacgtggagaaggaattgcacatcaaatgacagagcttccaaagcgggtgcatccgcgcctgcgcgggtatgattacagccggagcggagtatattttcttaccctctgcacccagaaccggctccccatcctgagcgagattgtagggcgcggcatccctgacgcgccgctggtacagttgtcggagaccggccggtgcgttcaggacgcgatggactatctggccggacatgacgcccaaattcagattgcggcgtcggtcatcatgccaaatcatgttcacattttgctgtgcgtctgcggggagggaaacggcgcgtcagggatgccgcgccctactgggatgcgcgtgccgggttttgtctcctctctcaagcgctacaccaaccgcgtgtgcggccgtccgctctggcaggcatcctatcacgaccacatcatccgggatgagaacgaccttctcaaccactggagctacatcgagcataaccccgcccgctgggcggaggatgaataccatgtttgaacgacgaaaggaaccaacaccacatgggcttttttgaaaagatcaaggcggggctgacccgcaccaaggagaacatcggacactccttcgaccagctcttcgccggagagctgaacgacgacttttacgacgagctggaggagacgctgattctgggcgacatgggggtggagaccaccatgaaggccgtggaggagctgcgccgccgggtgaaggcggagaagatcaaggacatggagggggcgcgggcgtgcctgcgccaggtgctcaccgacatgctccaggtgggggagccggagctgaggctggacaccgccccgtcggtggccctgtttatcggcgtcaacggcgtgggcaagaccaccaccatcggcaagctgtccgcccggatgaagggggagggccgccgggtactgatggccgccgccgacaccttccgggccgccgctgccgaccagctcgagatctggagcgagcgcagcggcgtggagctcgtccgccagtacgagggggccgatcccgcggcggtggtctttgacgccctgtccgccgccaaggcccgcagcgcagacgtggtgctcatcgacaccgccgggcggctgcacaacaagcagaacctgatgaacgagctgaataagatcagccgcgtcgtggaccgggagctgcccggctgcgaccgggagaccctgctggtgctggacgccaccaccggacagaacggcctgatccaggccaagcagttcaaggaggccgcgggcatcaccggcatcgtcctgaccaagctggacggctcggccaagggcggcattgtcattgccatcgcccaggagctccaggtgccggtgaaattcatcggcgtgggggagggcatcgacgacctgatgccttttgaggcggagaaatttgtcgaagcccttgtttaaaaagcagtatgggccggtgccctcatcggcccgcatattggagattggaggccgtaacatggcgagaatcgacggacgggcggcggatcagctccggcccgtggagatcatccccaacatcaatcaatttgcggagggctcctgcctgatccgctgcggcagcacccatgtgctctgctgcgccagcgtggaggagggcgcgccccgccacgtccccgagggggagggctgggtcaccgccgagtattccatgctgccccgggccaaccgggagcgctcccggcgggatatcgccaagctgaagctgtccccccgctccgcggagatccagcggctcatcggccgcgccctgcgggcctgcgtggacatgaaaaagctgggagagcgcactattacgatcgactgcgacgtactccagggggacggcggcacccgcaccgcctccgtcaccggcgggtttgtggcgttgagtctggccctgcacaagctggtgatggacggtgtcctgccagagatgccgctgaccaactgtgtggcggcggtgtccgccggcatcgtgggggacgagcccatgctggacctgtgctatgaggaggactcccacgcccaggtggatctcaactgcgtcatgaccggcgcgggggagctggtggagctccagggcaccggcgagggccggcccttcaccatcgtggagcagcgtgccctggtggagctgtgcgccaagggcatccgggagctccagaacattcagagacaagtgttgggggggtaaatgtatgaaactggtattggccagcaagaatgcccataagctggtggagatgagggacatcctttcccagttgggggtggaggtggtgctggagtccgaggtgggcgtcgatgtggacgtggaggagaccggcgccacctttgaggaaaacgcctttttgaaggcccgcgcggtgatggaggcctccggcctgcccgccatcgcggacgactccggcctgtgtgtggacgcactgaacggcgcgcccggcgtgtactccgcccgctacggcgggccggagctggacgacgtgggccgctaccggctcctgctggagaacatgcgggggcagatggaccggaggtgccgctttgtctccgccatctgctgctgctttcccaacggggaccgggtggaggcccggggggagtgccccggcaccctggcctacgcccccaagggggaggacggcttcggctatgaccccgttttctttgtccccgccctgaaaaagacctttgcggagctctccccagcggagaagaacgccatctcccaccgggggaatgcgctcacggcctttcgggagaagctggagcagtatctgaacaagtaaaatgccttcccgcaggagggccgatcaaaaggagaacgatctatggaagatttgacaagcaagcagcgggcccagctcaggggcctggccaacagcatcgacaccatcctgcacgtgggcaaggacggcatcggggacaacctggtgaagcaggccgacgacgccctggaggcccgggagctcatcaagggcaaggtcctggagaacagcctgctgagcagccgggaggcggccgaggccctggcatcggccacccgcagccaggtggtacaggtgattggaaccaaattcgttttgtatcgtccaacccataagaaggacaaaaaggacaagatcgtactggtgacggacaggaagcgcaagtaacgcagaggaggggaagcctatgaagctcggcatctacggcggcaccttcaacccgccccacctggggcacctgacctccgcccggctggccctggacgcgctggggctggacgagctgcggtttgtcccggcggcgctgccgccccacaagcgcctgccccccgacgcccccgggccggaggcccggctggagatggtggagctggccgccgacggcctgctcctgcccggccgggtgagcgtcagcggcatggagctctcccgccccggcaagagctacaccgccgacaccctggcgcagctccacgcccagaaccccggcgcggagctgtggctgatgatggggacggacatgttcctcaccctccagaactggcgggagccggagcggatcaccgccctggcgggcatctgcgcctttgcccgcacccaggccgactgcggggagctgctcaccatccaggccgagcatctgcgcaagaccttcgaggcgaaggtgtgcgtgctccaactgccccaggtggtggacgtgtcctccacccggctgcgggagctgctggcccaaggcgggggacaggagtacctgtctccggcggtgtacggctacatcctgcgccacgggctctacggggcggggcgggatctgaagcgcctgcccgaccgggagctgcgggcctgctcctactccatgatccgcgccaagcgcatcgcccacgtgaagggcacggaggaggaggcggtgcggctggcccggcgctggggcgccgacgaggagcacgcccgccgggcggcgatcctccacgactgcaccaagtatttggaattggacgagcagttgcaattatgcgcgaaatatggtatcgtactggacgaattggagcagcaggccgtcaagctcctccactccaagacgggcgcgtgtgtggcccggcacgtgtacggggtgagcgacgacatctatgaggccattttctggcacaccaccggaaaggccggcatgaccctgctggagaagctcctctatgtcgccgactacatggagcccacccgggactttccgggggtggagcgcctgcgggcgctggcctatgaggatctggacgcggcggtgctcctggggtgcgagatgagcatacaggagatggcggagcggggcctgcccgtgcaccccaatacggtaaaggcccgggattggctgcggagcaagacgaaaggaactagtgattgatgaacccggaacagagaaagaaccaccggggcggcgcccgggtacagaagccggagagtccccggcgggaaaaagagaccaagcgggagaaaaagcccggccggccgcgcaccaaaaagcagaagattctgctggggctgtatattgccctgacggtggtggcggccatcatcgtggcgggggcgattgtgttcggcctcatgagcgccccgccggaggtggccctccccactcccaccccccggcacaccaccatcatcaacgagcagggtgaggaggtagaggtggagatcccaggcctgtccgccggccgcaaggagcagttttacaccttcctggtggcgggcgtcagcggcggcaacaccgatacgatgctgttggcggcctacgatgtgcccaaccagaagctcagcgtcatgagccttccccgtgacacctatgtcatctacaacggccgcaccgtgatgatcaactcggtctacagccggggcggcggcgaagaaggcggcgtggaggccctgaaaaaggcggtgggctccctcaccggcgtgacccccgacttctatgtattggtggagtgggaggcagtgggtgagctggtcgatgccatcggcggcgtatattttgacgtgccgcggcgcatgtattacaatgatctgtcccagcacttcaaaattgacctccaacctggctatcagcttctggacggcaacggtgccatgggtgtgctccgctggcggcacaacagcgatgacagcgggcacattctcaacagcggctacgccatgggcgatctgggccgcatcgagacccagcaggcattcctcaaggaggtcgtccgcaagtgcctccagcccgatgtgctgctgagcaacctgatggactatatcagcatcttccagaagaatgtgaccaccgatctgagcgtgggcaatctggcctacttcggcaagtcggccatcggcaagctagacatggacagcgtggagtttgtcaccctgcccaaccagtccgctggggacgcccacctgctgcccgtgggcagccagattgtggagatggtcaatgagggcttcaacccctatcagtcggacatcagcctgcgggatctgaatctggccggaaagcgacccggctccagcagcacgggcacgacgcccaggccccaggctacgcctaagccggaaaccacgcccagcgcaacctccgctccggtcgaaagcccgccgggcacgccgccggccacgtccaccccgggcggaagccagcccccagccatatccactccgggcgggcagacgccgcctccggtccagaccccggcggccactccggcgcccgccgtcccctccgcggagccgaccccgcccccggcggagaacaccccagccatgacgccgcccccggccgccacgccggacggcggctacggacccggcatggtgccggtggaataaaggaagatagaaacggatgaatcctgagaacaaaaagacaagccggggtggaacgcgggctggaaagccccgcacgcccctcacaccgaggcagaaggccctgcgcattgcgtgcctggttttggccattctggcggcggttctggtgacggttttcgccgcctaccgcctcctggtggtcaagccctcgctgccggagccaggtgtggagctgccggacgaggaccaaaactatgagtttggcgacggcccccgcctctccggcgaccgcaaggaggagttttatactttcctgctggtgggccgggacacgggcggcggcggcaataccgatacccttatggtgatggcctacgacatcccaaaccagaccctaaacgtcatgagcatcccccgggacaccatggtgaacgtgccgtgggacatcaagcgcatcaactcggtatacaactacgcgccctactacgataaggacggcatccaatttctcaaggaggaggtctcctacctcatcgggtttcagccggactacaccatcgtggtggagtgggaggcggtgggcgagctggtggatgccatcggcggcgtagagtttgatgtgcccatcgacatgaactacgacgaccccacccagaacctgcacatccacctgagcgccgggctccaggacatcgacggcgacaaggccatgcagcttctgcgctggcggaagaactccgacgcctatggaaacgtatacggcggctaccccaacggcgatctgggccgcatcgagacccagcaggcctttttgaaggcggtcattgagaagtgcctcaacagcatcagcctcggcaccatccccaaaatggcccagatcttcctggacaacgtggataccaacggcagcctgacggtgaacaacctggcctggtttgccaaggaggccatcgtgggcggcctgagcatggagaacgtgcactttatgaccctgcccaaccggggggccagcgtctacagccggacgtaccacaactaccagtcctatgttactcccattccggacgagatgctggagctggtgaatacctgcttcaacccctatttggaggacatcgagctgaacgagctggatctgatgcaggtcaacgaggacggcagcctgtcctccacccgcggccatgtggaggataccaaggccacccagccccccgcgaaggggaactccggcagctccaagcccaccgacaatcccgcgccggaggtgcccgacaccccggagccgtcggtcactccgacggccacaccggaggccacgccaacggtgacgccggagaccacgccctccgtcccggtggacagccagccccccgccgtagagactccggctgtcacgcctgcgccggaacccaccccggccgcaacccccgtacccacgccggctcccacgcccatccccgcctccaccccggcgcccgacgtgcccgtggacggctttggtcccggcatggagcccattgaatagaaggagaatgagatgactgcaaacgagattgccctgaccgccgtgaaggcgctggacagcaagaagggccaggacatcaagtgcctggagaccggccacctgaccaccctggcggactattttgtgctctgcaccgccacctccaccacccagatcaaggccctggccgatgtctgtgagaagaccctcaaggacgccggggaacccccccaccatgtggagggccaccggggcggcacctggatcctgctggatttctcctccgttgtggtgcacatcttcaacgaggaggcccgggagttttacgacctggagcgcctgtggagcgacgccacgccggtggatctgtccggcgtgctgaccgaaaactaacgcaaaaaagcccggcgggactcccgccgggctttttttgcgcggagagggaaccaaaccgcccgcccatgcatctatagggtgtccggacaaggaaagacgaggtgagcacatggaacagaccagagacggcgcgggccgggcgtcggcgcgggaggaatttgctgcggcggtgaccgagcacagccacggcatgttccgggcggcccggagcatcctggacagcgacgccgacgcggaggacgcggtgggcgaggctgtcctgcgggcctggcagtcctgggaccgcctgcgggcccggggagcggtccgcgcctggctgctgaagattgcggtcaactgcgcctatgagcagcggcggagggacagcagggtgatctataccgacgagctggagccgctggccggcggcgcggaagacgcgctccccggcggcctgtgggatgcggtgctccatctgccggaggagcagcgggccgccgtgaccctctactactacgaggatttgcccgtggcggagatcgcccgggtgctgggggtggcccagggaacggtgaagtcccggctgggccgggcccgccagcggctgaaggagcaactacaggaggaggagaaaatatgaaccggttggatgaacggttaaaagagcgggcccggcgggaggactgcccaattccacagggctttgacgggcgcatggacgccattttggaggggctgccggagggacggagaaagcccggcccccgccgtctccgccggtgggcggtagccggggttctggcggcggccctgtgcgtgggcggcgtggcggcggcctccggcgcgctggagctgatcgcccggcccggcggcttcggcggtacggcggagggcttccagccctattccgccgaggtgggggcgtcggtcaccgaccagggctacaccctcaccctggacggcatcggtgtggacgaggtgtttattaccctctacgccaccatcaccggagaagagccgatccccaggaatgaccggggtgagccggagctgtggtccttttccctgaaggccgagggaaaggagctggagttctggggccgggatcgggaaaccgagtgggtggacgactatacattaaaggtgatgcagcgttgcccggtggcccgcgcgctgcccgatgtggtggagctccaggtctacaccaatgagctgttttacggcctgtccggggattggagcctgaacctgctggtggacaagaccgccccggacggggagagcctggtggtggagcccggacagcgaatc

SEQ ID NO: 4229 - DNA, 84450 bp, Unknown
  gut microbiota DNA sequence
cagcgcttcatgttctgtgccttcccgctgcgctggtatatgggcgacggcaccatcgtccgcgccgtggccatcaccgacgaggaccatatcaataaggatgttcccgaccgggtgtataaatacggcgtatattgatccgcagccgaacagaaaggtaattggaggccatgatggcagacaagaagaaaattgcgcttctgggtgccggcaccatgggaatcggcattgcacagatgtttgctcaggctggccatgaggtaaaactcatctatgtgtatgacgataaggtgcgcgcccggcccagagagaccatggaggccaatctgaatatcctccgggaggaaggagtgcaggatggcggggcgatccccgccatcctggaccgggtcagttggaccgagtctcttgaggaggctgcggcgtttgccgatgttgtcattgagtgcattgtggaggatctggcagtcaaacaggactactttcagaagctggacgccctctgccccctctcgacggtcctgaccaccaatacgtctgccatcagcgtgacggagattgccgggaaggccgtccataaggagcgcatcatcggtacccatttctggaatcccgcctacctcgtgccgttggtggaggtgatccgtaccaaatatgtctccgaggagacggtggccgccgtatttcagctaatggaggaggcgggcaaaaagcccgtcctcgtcaaaaaggatgtaccgggcttcctggccaaccggatgcagcacgcgcttttccgcgaagcgatctctatcgtggaaaatgggatcgccgaagccggggatgtggacgacgccatcaagtacggattcggtatgcgcctgggggtctctggccccatggaggtgatcgaccgcggagggctggacctcacctactccattcacaagtacttatttccccacattgagagctccgccgagccctccaagctgatggtacagctcatggacgagggaaaactgggctttaaaacgggagagggcttccagctctggagtcccgggcaggtcaaagcatccaatgagacgttgacccgcggcctgattcaggtgtcccgcgcgctgggccggctctaatggcctgaacgtcaacggcggggaatctccctggggcacccggtggacgccaccggttcccgcattgtgattacactgctgtatgagctcaggagccgcgggctgcggtacggcttgcccccctgcgccggcgtcatggggacggcagtggtaattgaaaacttggattagaaagagggaaaccgcatgaccacaaccaggcgtttgaatgacagcaataaggtgattgtcaccgccgccctcaccggcgcggtcaccaccaagcaggataacccttatcttccgacccagccaaaggagattgccgaggcagcgctgcgctgctacgaggcaggggccgccatggtacatatacatgtcagggacgacaacgacgcggggagcatgcgctttgacaaatttgaagaggcggtgggcctgatccgcgccactggctgcccggtgctgctcaacctgacctcctccggaggacaggggttctcctgggaggagcgtatccgtcccttccgggagctcagacccgagatggcgtcttttgacgcgggtacgatgaactggcttcacagtgtggtatttatgaacgaacccaagttcctcgaactgtgcggccaggagatgcgcgccgccggagtcaagccggagattgaggtcttcgacatgggcatgctcaacaccgcaaagcactatttgaaaacgggcgtcctcgatgcaccggcccatttccagctctgcctcggtgcgccgggcggcatggaggccaccacggagagcttggtctacctggtcaaccatctgcccgagaactgcacctggagtacctttggaatcggccggggtgcaaatgagattaccctggccgccttggcgatgggcggtaatatccgggtcggtctggaggacaatgtctattacaataagggggtattggcccagggcagccagcagtttatcagccgggtgaagcgggtggccgccgagttcggcagggtactggctaccccggaggaggctcgtgctattttgggcctgaagtgaaatccgcccttgtaaagggacggatttctctggttgagaagctccgatggcaggggctgcccgcagatggatagaacggttccatttgccgaatacagattcactgtgtgatagaggagcggtgcacagtgatgcacctgccccttcccacggcagaagctgcaaaacaaaagctccgccggtttcctgtggaaacggcggagcttttgttccatatatgtcccttacgacgacctgcaatattctgcggacggggggagggctgtggaagttgcgggtgatgaagtctttacttcgtgcagggagtgtgtgaaaggtgagcggatggcctgtacctgaaccgcattacagataagcgtagaaaatattcagaatattcggattaaaggagtcctttggggcagaaatggcatgctgagagacaaaaggtgaatcgcggcagggtcaattcccgtgtttaggaattggctggagagccccccagtgcgatgccgagcccgccggaagaggagccgcagattccggccgggccgcgcttacagtttgagagccaggccggaggccttctccttcagcatgcgcccgcacagctcggcaatgaacgcgcccgcctcggcagggttggtgccgccgcggtggatgttggagactacggtgcggctggcctcagggatgcccacatagccgccgtaggtcatgtaggcgctcatggactcgccggtagccaggccggggcgctcgcccaggaggatcacggtgaccttggagcccagggcctcggtgacggcatccatggctcccacacggccgtacttgatgaagaagggggtgcccacactgacccccgtgctgctcagcccttgaaggatggcgggcaggatgtcccggaggttggcggacactgaggtgctggacaggccgtcggacaccacgagctgcacgtcgggattgcgcttgcagcgctgctggagctcggccagagtctcctgagagaagcggcggcccagatccggccgggtgaggtacatgtccttggtctcgcagagggtctgcacggtgaacaggcccatctcttccagcagacgctccggcacgtcggtaaacacggcgtccatggcggccgcgtgatccgcccggaaccgcaggtaggtgttggtgcggcaacggggcccggcccgccacacgccgatgcgggccaccgttttggagcgcatgcggcggaactcctccgggttggcgggggtgggcacgtcgataatctggcggaaatctacggcggacaggtcgcggacctctccgctctccaccgcgccggaggccggggggacgggagcggcggactgtgcaccggcggtatcgcccactgcctcggagatggctttcaggatgagctctctcagttgggtttcattcatgtcagttccctccctcttactgtaggaaaatggaggcgtcgccggccagctcggtcaggacacccttttcgtcaatcaggccccgcttcatcatccactggtggaactccggcgcgggcagacggccggagagctcccgcagggtggcgttgtcgtggtagctggtgtcctggtaggagagcatgatatcgtcgttgaccggcaccccgatgtagtagttggcccccgcggcgttgagcagcatggtggccatctcctgctcgtcctgggtaatggaggtgtggttggtgtagcagggggccatgcccatgggcaggcccatcagcttgcccatgaagtgatcctccaggctggcccggatcatctccttgccgtcgtagagggtttccggtccgatgaagccggacacgttgttcaccatgaaggggcggaaaaagcggccaaagccgtaggtacgggcctccagggtcatctcgtccaccccgcagtcggcgccgatggacacctcggagccctggccggtctcaaaatagagcaggttggggccggtgctcagggcgtgctggcaggccagttcataggcctccgtacagagctggcggctcacgccgaagtcgttattggcggcctctgtgccggcgatggactggaaaatcatgctcaaaggcgcgcccttccgaatggcgtccatctgggtggtcatgtgggagagaaccaccagttgggtggggatgtcgttgcggcagataaagctgtagaccgcatccgcgatacgccgggtgctctccacattgttttccacagggttgatgcccatgcaggcgtcgccgcagccgtaggagacgccctccatcatctggatcaggatctcctcggggtcgtcggtggggctgttgggctggttgcggaaggccagcacgcccggctggccgatggtggtgttgcagcgggtgatgtggtgaattttgctggcgccgtagaccagatccatggcggacatgagcttggccacggccgccgctacctcgccggtgaaggcccggcagctgcgtaccaggtcgtcccccgtagttttgtggtccagaatccactcccgcagctcgccgatggtcatgcccttgaagcgctggtaggtgggctggttgagtccgtcgagattgacccgggtcacctcgtccttttcataggggacggtggggttctcggtcagctcgcccaccgtcagctcggacaggacgatcttggccgccacccgctccgtcacggtttcggcggccacgccctgaagccggtcggcggccttgggctcgttggccttggccaggacatccctgatgtcgcggaaggcgaaggtctggccgttcagtgtggttttcaatttcattctgctgcacctctcctttgcgccggacgccccctcggcgcccgtttcaagcttgtcaaatttggctgtttatgcaaaacagcccaggggcagcgcctgcgctgtccctgggctgcatcgcccgtgctcttgtacgcgccgccatagcctcaggtcggcgcacgatttggttttactgctccagaaagtcgaaggagatccgcgtcccgccgggaccgctctccacgctccactcgccggtgagcttctcccgcacgatcgtggaggccagctccagaccggcgcctccggggcgagggcggtccgcctggaagcccacgccgttgtcccagacggtgagctggcagagggggcgcccgctgtggagctcgatgccgatccttcccgcctggccggagggaaaggcgtatttcagggcgttctgcaccagctcgttgaccaccagggccaccgaggaggcgcagtccgcggacacaatgacgtcctcgccgcccacgtggatggtgacacggcgggcggagggcagaagagtctggagcatgtaccggcggatctgctccagaatctgaaggagggagaccttctcccgggagacctgtacgatgccgtccagcgtggcggccagggagagcagccggttggccgtatccagaagggcggtctgcaccggcggggactcggccggatcacaaccccggctccgggtgaggttggcgagcatctgaaggttgtttttcatgcggtgccgcagctcctgaagtgccgtccgctgcagggccagctcctcctccagctgccgctggcgagtgaggtcgtggatgatgagcgccgcccgggcctgcccggaggagagagggaggcgctggtactggagtacccggttggccagggccgtctcgtgcctgtcctggtcgcactcgctgagggcggcgggctgaatgttgttgacgggcatcccggccagagtgccgatgtaacccatccggcggtagagggctgtggccgccgggttgaagccgcagacccggtcctcctcatccaggaaaaggacggcgtcgtccagacagggggataccgcagcccagtccagagccccggacgcctgctccgcctcccgctccccagcgggcggcggctcctcggcggccagagcgggccgctcatagatgaggacgccgatcagccgcccctcataaaagaggggttccaccgactggacgatccggcggtcctccggcatggagaccgcccgcaccccggaggtgggaaccgccagacggaaggagcggtccaccgccggctcgtcccgccagtggatcagcatgcccaggatggagctgcggtagttggaggggacggtttggggctttgcctcacagaccacgatggcagagcgcccgctgacggtccggcagtcgatgaagacatccgcctgctcggcgttggccagggcggggagcagggcgccataggattccaggtaggagatctccgcgtccgtgagatccgtgtatttctgacagagcatccgcgtggcgctaatcatgccgctcctcctgctgggccagcaaatagctggcgacccgggccatagacatgcccttgcggcggctgagctcccgaatgtactggtaggcctcgtcctcgcgcatccccctggtctccatcagcaggagcttggcctggtcgatgggctcccggttctgacagcgccggctcaggtgctgatactccttgttcagcaggtagtactccttgctgcgcgcaatacacagctcgatggtaggcagaatcttctccgcctcaaaaggcttggtgaggtaccccgccgccccgcacgcctgtacgcgctcgatgtgctcccggtcgctgaacgccgtcaggataatgacacatttggcggcccggtccgccagaacctgtctggccacgctcacgccgtccagcagcggcatctggatgtccagcagcgccacgtcaggggccgacgcccggcagccctccaccgcctccatcccgtcacaggcctcgcccaccacccgatatccggggagcccctcaaaaaaagtgcgcaaggtacggcggacgccctcatcgtcatcagccaggaaaatggtggtcttgcccatcctggtcacacccatacgcctgtcctcccgttttacaaaaaagagcatcttgaagcgcacaaaaacgcctcaagatgctctccacgcatctgaagtcaaacccactcccacccggaagtggagtacggcaggtttgctacacccggcataacctgacctttcgattgtatacgatattatataaaaaacccgcccttctgtcaaccgtaatttggaacttatggctgggataggagagaaaattgtgatattctgcctccgccatcttgacaggcgggggggcgcgcggctataatgaacgccgacaagtgaatcagcagacggtagcgattgctttcattgggaatgcggtgagaatccgcagcagccctctctactgtaaggatgacaagcgcccagaaatgtcactgtccggtacgccggatgggaaggcgggcgtgaggatgagtccaagccaggagaccagccgcctgcggtgtgtgcacgttctttcggtggggaaagctgtgcagcgccggtctgccggcctgtcatccgattgcggctcctctctggaaaataggggggagtttttttgtgcatggattcatgcgtcagtcaatttgagaggagcatgaacatgaaaaagcgcaccctgtctctgctgcttgccgttgcctgcgccctgtccctggccttgtcgggctgcggcggcgcgcccgcgccggatgcccagacctccgctccggcgggcagcgaaacccctgccgccgtggaccagacccgcgagatcgtctttgccgcctcccgcgaccagtgccctggcgagcaggacgcctactacgcctccatgtccctgggcgtgtgggagcccctgatcaccaaggacgagagcggcaagcccgcccccgccctggccaccgagtgggagcacaacgaggactccaccgtgtggaccttccatctgcgggagggagtcaccttctccaacggtactcccttcaacgccgacagcgtgctggccaacttcgaccgcatgaagaaggggcccttcgagtcctccttctacggcatgaacatcgacaccatctaccccggcctggtctcctacgagaagaccgacgattacaccgtggtgctcacgctctccgagggccagcccctgctggactacaccatggtcaactacggctccgccatcttcgagccctcctgcttcgccgaggacggcaccttcgccggcttccccatcggcaccggcccctacgtggtgaccgagaacgtgctgggccagtactgcgtcatcgagcgcaacgacagctactggggcacccccggcatcgccaagaccttccgcttcaaggtcatccccgacgccgagacccgctacaccgccctgcgggccggcgaggtccagggcctgtgcgatctgggcgccatctccccctcccaggccgcggagatcgacggcgatccggcctacaacgtgtcggtgggcgactccggcatcacccacttcctcaacgtcaacggcggcgccttccccttcaacgacgtgcgcatgcgggagggcctgtccctgctgctggaccgccagaccatcatcgacagcttctacaacggctacggcctcgccgccggcggcttcctgaactacacctccgccttctaccgcgagcagcccgtgcagcacgacccggagcggggcgccgagctgatccgcgaggtggtgggcgaccaggaggtggagctgctgttcctgctgcccggcgtggacgccaaccgctacccctaccaggaggaggccgagtacatccagtccctgctggagaacatcgacggcactcacatcaaggtcagcatccagcagatggactggggcccctgcaaggaggagatggaggcgggcaactacaacctgtgcctcaagatccagggcctgccctccgccaaccccttctccctgttcaagggctttatgtacaccgagggcggcaccaacatcagctacggcctgggctaccacaatgaccacgtggacgagctgatcgaggaggcggctacctgcctggacgccggccgcctgaccgagatctacacggagctccaggagatttccgccgtggacttccccaacatccccgtgctgtactcccaggaggtggtggcctcctccagcgacatcaccggctatcaggccacggtgtacggcctgaccggcttcacccaggtctgctgggccgggtaagaaccgtatgtgaaaataagcccccgcgaggcgggggcttgaggctgtggatgaaccctccagccaaaggattcggagggaaggatagtgtgaaagggaaccgtcagggttccctttcgcgtcggatcaaacaactttttgaaacttttttaagtttcaaaaagttcagcagcctgtcgaaaagactttttcgacaggctgaagcccccgcgaggcaggggcttattttccgtttgtattctgtctccgaaggcggtggatcatggcaattctcaagtatatcggccgcaggctgctggtgctcatcccggtgctgctgggcatctccttggcggccttcctgctggggcgcatcgcccccggcgacccggtggacgacgcgctgttccgcatcggcattgaattccccacggaggaggaccgggcggacatgcgcgccgagctgggcctggaccggcccctgccggtgcagtacctggactggctgggggacgccctccggggggatctgggccgctcctacatcggcaacaaggacatcgcccaggagctgatgacccggctgcccatcaccctcaaggtctccctggccgccatgctggcggcggtggtgttcggcgtgggaggcggcgtgctcatggcggcctgccacggcacatggctggatacggtgctcaaggggctgtccaccctgctgctgtcggtgcccggcttctggctggccctgtttctcatcacggtgttcgccgagtggcttcacctgctgcccaccagcggcctggaccgggggctggcctccctggtgctgcccgccgtggctctctccgccgccaacgtgggctccacctcccgcttcacccggggcaacatcctggcccaactgggggagcagtacatcgtggtggccaacgccaagggcctgtcccagcgggcggtgatggtggggcacgccttccgcaactccctggtgcccatcatcaccctcatcggcaactacttcggcggtatcctgggcgggagcaccatcatcgagaacatctttgccatccccggcctgggcagctatgtcctctccgccatccagaaccgggactaccccgtaatccagggctatgtgctcatcaccggcaccaccttcgtgctcgttacgctggccatcgacctgctctacattgtggtcaacccgaaaatccgcctacaggggggagaggcatgacaagacgccggaaacagaacatcaagctggccctcgtgtgcgccatcctgggggccattgtcctcatgaccatcttcgccccctggctggccccctatgaccccctggaggtgaacatggagctgcgcctgctggacccctgccgggcccatcccctgggcaccgacgccctggggcgggacgtgctcagccgggtgatctacggcggccgggcctccctgctgctggcggtggcggccacggcctgctccatggccgtggggctggtgatcggcgtggccgccggctactgcggggggattgtggacggcgtgattaccgccgtctccaacgtgttccagggcctgcctggcatggtactgatgatcgccctggtgggcgtcctggagcggggcacccggagcatcatcctggccctggtcatcacctcgtgggtgggcttttcccgcctggtgcggggggaggtcatgaaggtcaagagcgagatgtacgtcgagggcatgcgctgcctgggggcggggcacctgcgcatcgtcctccgccacgtgctgcccaacatccgcaccaacgtgatcctccagttcaccacccgggtggggcgggtggtgctgtcggtggcgggcctgagctatctgggcctgggcatcgagccccccacccccgactggggggagatggtcagcggcaccgcccgccggtacttccgcagcgccccccatctgctgtgggtgccgggcatctgtattatcctgctgaccctgtccatcaacctgctgggcgatctgctgcgggaccggctggacgtgaagcaggacgcggtgaaggagctgtgagcatggtaccggacattgaaattcagcacctgtcggtatgcttcgacaccgcccaggggccggtgtacgcggtcaacgacctgtccaccaccttccgggcggggcgtatctccggcgtcatcggggagagcggcagcggcaagagcgtcatgggtatgtccctgctgcgtctgctgcccaatacggcccgggtgacggggaagtgcttcttcggagaagacgagctctactccatgcccctgcggcggctgcgcaggctgcggggggcggccatcggcctcatcccccagaaccccggcgcctccctggacccggtgatgaagctccgccgccagctcaccgaggccatcaccacccacgggcgctggaagcggagggaggcggaggcccaggccgccgagctgctccgccgcttcggcttcgaggagccggagcgcatcctgaaccagtattccttccagatgagcggcggcatgaaccagcggctggtgtccgccctggggctggcctgccggccggggtgggtgatcgccgacgagcccaccaagggcctggatgcagtgatccgcaaccaggtgtactccgtcctgcgccagatctacaccgagcaccactgcagcatgctcgtcatcacccacgatctggccctggcccgccggctgtgcgacgacatccgggtactctacatgggccggatcatcgagcagggcacggcggaggaggtcatggagcggccccgccacccctataccgccggcctgatccgctccctgcccagccggggcatggtgcccataccgcccccggaccccggacggctggagcacaccggctgccccttctacccccgctgccccagggccatggagcgctgcggccgggaggcgccgggggaggccacgctgcccacgggcgggaaggtgaggtgcttcctttatgaataaggtgctggagctggaggaggtcagccggacgttctccagcggcgtgttccgcacccataccgtccgggcggtggaccgggtgagctttgccctggagcgggggaagaccttcgggctggtgggcaacagcggatgcggcaagaccaccctttcccgtatgatcacccgcgtcctcaagccctccggggggcgcatccgcttcgagggggaggacatcgcacgcctggaccggaaggggagccgggcgtaccaccggcgggtgcagatcatcttccagaatccggaggcctccctggacccctccatgcgcatccgggacagtctgctggaggccatggccatccaccggctgggggagagccgggaggagcggatggagaagatccgggccgcgctggggcaggtgggcctgcccgactacctgctctcccgctacccccaccagatcagcgggggcgagggccagcggctggtgatctgccgggccctgctgctggagccggaggtgctgctgctggacgagcccacctccatgctggacgtgtcggtgcaggccagcatcatgaatctgctgcgggagctccaggagcggctggggctgacgtacctctacatcacccacgacatcgagctgctggggtggatcagccacaccatcggcgtcatgcagagggggcggctggtggaggtggggagccgggaccaggtgatggaggcccctgtccacccctacaccagggagctgctctactcctacacccactgggagggaggcggggagacatgagggagcgggtgcccatgaccgacttcgcccggcagtgggcggagcacgtggcggccagcgcctccccccggatgaccgacgaccaggcggagcgggacttctggcacgccttcatgacacgcaagacctatgccccggagccctccgccctccaggtgctggagcgcctgcgccccctgctgcgggcccgcggggtggagaccgccctggaggtggggcccggctggggcagctataccctgaccctggcggagctgtgccgggaggtggcctgcgtggatctctcccgggacgtgctggacttcgtcctccgggccggggcggagcgcggccgggacaatatcaccgccttccatgccaagtgggaggagttcacgccggagcggcggtacgatctggtcttcggctataactgcttctaccggcaggcggatctggccgactgcttccggcggatggaccgggcggcggacaagctgtgcgtggcgggcatgaacaccggcctggcccccgcctggctccatgaactggacgcggcgggaggccgggtgagctgggagtggaaggactacatctacttcgtgggggtgctctaccagatgggcattgacgccaatgtgatggtgctcccctttgagaaggagctgtcctacccggacaccgacgccctggtgcggggggagtgcgcccgctgcgcccccggcgcggtggacggggagaccgccagggccatcctgtgccgccacttcacccagaggccggacgggagctggcgcgcaaacgtgaaataccgcagcggcgtggtgtggtggacgccggtccaccgggactgagccgccccacgtcatgcagaaggggcccggccgaatcgcgcgattcggccgggcccctttttgcctggagggccggggctcagccctggtccttttccatcatgatgctgaggatggtgcggtcggtctccaccatgccgggggtgctgatgcggcccatgttgcggatgacctgctccggggtggcggcgcagatgccgtcgctggggctgaccaccacgccgccgacggccaggtaggcgctcatgatggcggcggaggcggcggtggccagcttgagggcgcagccgatcttgccgccgtcgcagatcatgccggtcaggttggcgctcatgttgatgatggcggcgccgatctgcttgtcgtcgccccccaggagccacaccatggcggcggaagcggcggtggcggcggacacgccgcagccgcaggtggcgctgagcttgccggtgaacagcttgatgtagacgttgagcaggtgggagaaggccagggccttcacggtggcctcccggctggagcccaggtgcctggccatctccaccacggggatgatggcggtgatgccgtggttgccgctgccggcgctgctcatcaccgcgtaggggcagccggacatgcgcccctcggcgctggaggccacccgcaccatggtgcgggccatcaggctgctgcccatgatgtcggtggacaggtgggccttgagggtgtcggcgatgccgatgcccaggcggtgctccaggccgtagtcggagagggtctcgttcatctccgcgccctccagcataaaggccagctcctcctcgccagcggagtccgccagctcccggagctgggcgacagtcatggacttgagcttggcgtggagcgcgtcctcgccgccggcggtgtactccttctcaaagagcacctcgttgttggcgctggtgtagatgatgttggagtgggtgtcccggatggtgctgatgccgatgccccgggtggtgatgatctcggcgtgggcgtagagccggctctccccctcggcgatggtcacgctcacctgcttgtcctccaccagacggatggcctccttgctgacgatgctgttgatctcctccagcagctccagccccttctccgggttgcccaggcaggcacccagggcggcggcgtacttcaggcccacccgctggaagccggggatgcctacgctcatgccgttcttgtagatgccggggttgacctccatcttgatggacaccacctgtccgccgatggcgtggtaggcgtcggcggcgcagagggccacgcacacgggctcggtgcaccccagggcgggaaccacctcctggtgcagcagggtcagcatctcttccttgttcagttgcatcgttcatcgctccttttccgccggccccgtagggcggccaagtcttctgcccattttatcatgcaaccggcatgccaactgcatttttggccgccaaagccaaaaatccgcgaaaaaaagcggggatcggcttgacatggggcgggaaatcccgcagaatactgttaaatcggttaaactggttaaagtaaatggccaaaaaggaggggagaaccccatgaaacaggatgtggcggtcatctctctggacgcctacgccgggcagttttacgcccagcaggtccaggagctgttcggcgagcggatcaccgtctgctcctacagcgtgcgggacggttccatcgagcacatgccccgccggtacgacctctatatggtcaccaccgacgccttcgactccctgggagatctccaccagtacgtccccatcgacggggagatgatggagatccacgttaccctccggtgggacgtggtgcgccgcctccagagcctgccggcgggcaagcgggccctcttcgtcaacctgagcgacaagatgtgccgggaggcggtgacccgcctcaaccaactgggggtcaaccaattggtgttcgacctctaccaccccggcgcgccggagccggacatgggccagtatgacttcgtcatcaccccccaggagacccgctacgtccccgccggggcgaaggagatcatcgacatcggccagcgggtgtgcgacagctccaccatgatcgaggcggccctccgcctggggctggaggagctgctggagagcgagcggtttgagcagtaccagcgggaggtggccaccaatacctacagctttgaccgggtgttcgcccggggcctgcggctggagagccagtttgagatgctcatggagattctggatgaggggatcgtgggggtcaacgagcggggggaggtctttgcctgcaaccgcaagctggaggagatcaccggcatcccctgcggcgaggctctgcaccgccccgccggcgcggtgtaccccttcctgccctttgcccgctgcctgaaggagaaggccccccagcccgcccgggtggtgagcgccgggggagtcaacatcaacgtggccgtggccccggtgctgcggggggacgcctgcatcggcgccttcgccacggtgcagcggttcaacgatgcggagaaccggcagaacgagctgcgcagccagcttctccacaagggctaccgggccaagtatacctttgacgacgtggtgggacagtctcccgccctgctgcggtgcatcaccatattaaaaaagatgagtctcacccccctgccggtgctcctcatcggcgagacgggcactggcaaggagctgtttgcccacgcggtgcacaacgcctccccacgcgccggcggggccttcgtggccatcaactgcgccgccatgccggaaaacctgctggagagcgagctgttcggctacgaggagggggccttcaccggcgcccggaaggggggcaagccggggctgtttgagtttgcccacgggggcaccctcttcctggacgaggtggagggcatgagtaccgccctccagtgcaagctgctgcgggtactacaggagcgggagatcatgcgggtggggggcaaccgcattatctcggtggacgtgcgcatcgtggccgctaccaatgaggatctggagcgccgggtggaggagggcagcttccgccgggacctctattaccggctcaacaccctgcccgtcctcatcccgcccctgcgggagcgggagggggatctgctgttgctcatcgaccacttctgccgcaacattggggcctccttcaccctctcgcccgagctggagcggctcctgctggcctaccagtggcggggcaacatccgggagctgcgcaatgtggtagagtatttcagctacctgggacatactgtggtgggggtggaggagctgccccccaccttccactacctccccgccgccgcgcccccggcggagctgcccgccctggccgactgcccccgggaggacgcccgcttcgtgctggagcggctctacgaggccgaccaggagggccgcagcctggggcgggaggccatcctcgccgccgcccgggaggcggggctcccctgctcccagcaggaggtgcggcgcatcctggccgggctggaccgggcgggcctggtgcgggtgagccgcggccggggcggcacccgcctcaccccggccgggcgggccctgtgccgccggcaggcggtggagggcggagcggaaatggtttgaccaatttgaccgttttttctttctttgaccagtttaaacgcgccctgctgcatttctccgccgggtggtcctggactgcccggcgggtttctttctgttatgcataaaacagcagactaaattttaagcttatttaacaatgttttgccgcccggagcgattcggcacatagattgcttttatggtcggacagaatacagggccgggaagcccaggccaggagagaaagaaggatgatcccctatgaagtatgatttcgacaccgtggtggaccgcggcggcaaccgctccgccaaatacgacgagcggatgaagaagttcggcaccgaccaggtgatccccctgtggatcgcggacatggacttcaagaccgcccagcccatcgtcgacgccctcaccgctagggcccaggagggcatctggggctataccagccgcccggactcctattttgaggccatccggggctggcagaagcgccgcaacggctgggacatcgacccgcgcctgatgagcttcagcctgggtgtggtgcagtccatcagcgccatggtcaagctctttaccccggaggggggcagcgtgctcatccagaccccggtgtactccgagttctacgacatgaccgaggcgtggaaccggaaggtgctggagaatcccttcgtggaaaaggacggcaggtgggagatggactgggccgacttcgaggccaagctggccgaggccgacctcttcctcctgtgcagcccccacaaccccctgggcatcgtgtggacgccggaggagctgcgccgcatggtggagctgtgcatcaaacaccgggtggtcctgttctccgacgagattcactccgacctgatcttccacggcaagcgccacacccccaccgcctccgtctccgacgaggccgcccggtatgtggtcaccggcatctccggcaccaagaccttcaacctggccggcctgcaggcctccactgtggtgttccccaacgcccacatgaagcaggtctttgaccagttctggatgaacatggacatccaccgcaacaacgccttctccctcaccgccatggaggccgccttcaaccacggcgaggagtggctggagcagctgctgccctacctgtccgccaacttcgactttgtggcggactactgccgggagcacattccacagatcaagacctgcgcccccgacgccacctacctcatgtggctggactgccgggcgctgggcctggacaacgacgccctgcgccgcttcatgatcgagcaggcgggcctgggcctcaacgacggctgctccttcggccgcagcctgaacggctacatgcgtctcaacgccgcctgcccccgcagcgtgctggagcgggcgatgaagcagctcgaagcggcggtcaaggccctttgagcccacacaggactggtaaaaggaggtaaattccctatggcaaacctgcaaaagaagagcttctggcagcagtacggcaacctgattctcatcctcagcggcatcctgatcggcgccctcatcggcgtggtcgtccccgacttcggcaccaccatcaagcccatcggcgacatcttcctcaacctgctgttcacgatcgtggtccccctggtgttcgtgtccatcgcctccgccgtgggcagcatggccaatatgaagcgcctgggcaagattctgggcggcaccatcggcaccttcatcttcaccggcgccatcgccggcgtctgcgtgctggtgtgggtcaacctgttcagcccctcagcgggcaccaccatcgagctggtggccagcgaggtgggcgaggcacagaccgccggcgagctgctggtcagctccctcaccgtgtccgacttctccgacctgtgggacaagtccaacatgctgcccctcatcatcttcgccatcctcttcggcttctgcgtctccgcctgcggcggcgagcagagccccatgggcaggctgctggccaacctgaacgacatcatcatgaagttcgtgggcatcatcatgctggtggccccaatcggcctgggcgcctacttcgccaacctggtggccacctacggccccgagatcatcggcgactacggccgctccatgctggtctactaccccctgtgcgccctctatggggtgatcttcttccccctctacgccttcctggccggcggccggcacggtgtggcggccatggtcaaaaacatcctgcgccccgccgtcaccgcctttgccacccagtcctccgccgccaccatccccgtgaacaaggaggcctgtgacagcatcggcgtgcccaaggacgtcagcgatctggtgctgcccatgggctgcaccatgcacatggacggctccgtactcagctccatcaccaagatcgctttcctctacggcgtgttcggcatggacttctccggcgcgggcacctatggcatggccatcgtggtggctatcctgtccgccttcgtcctctccggcgcccccggaggcggcctggtgggcgagatgctgatcgtctccatgttcaacttccccgccgaggccttccccatcatcgccaccctgggcttcctgttcgaccccgccgccacctgcctgaacgcctccggcgacaccatcgcctccatgctggtcacccgcctggtggagggcaaggagtggctgaccaaggccgcggccgccaaaaagagccgggtctgagctccattcgcctctgtctgttccatccattgatccatttgtaaaaggagaatctgccatgactatcatcgacaccgagcacgcccccggcgccatcgggccctactcccaggcctacgagaccaacggccttgtcatcacctccggccagcttccggtgaaccccgccgacggcgccatgcccgagggcatcgccgcccaggccgagtggagctgtaagaacgtgggcgccattctggaggccgccggttccggcttcgacaaggtggtcaagaccacctgcttcctggccgacatcgccgactttgccgccttcaacgaggtgtacgccaggtacttcacctccaagcccgcccgctcctgtgtggcggtgaaggctctgcccaagggcgccctgtgcgagattgaagccattgccgtaaagtaaggaggagacaagatgaaagtgaccgtgatcggcagccacctgtgcccggataccctgtacgccctcaacaagctggttgaggccaaggcggatatcaccttccagaacctgtccgccagcctgcccgacctgaaggcctacctggccctgcgggagagcagccccgtcttcgaaggccccaaggccaagggctccctgggcatcccctgctttgtgcgggaggacggcaccgtcaccctggagctggagcaggtgctcaactgagtggataagagcagctgccaataaaccctccccgcaaaaggattcgaagggaaagatcgtgtgaaagaaaaccgtccgggttgtctttcacgccggatcaaacgacttttcgaaccgttcaaaaggctccaaaagtccggcagcctgtcggaaacacattttcaacaggctggaagggagcggcccccggtggggccgctcccttgtgcgtttttacaggtcgttgcggcacagatcctccagggactcccggcggactgccacataggactcgttgccgccccggagcatgacaatgggaggcctgggaaggcggttgtaattggaggccatggagtagttgtaggcgccggtggtgcataccgccagaaggtctccccggcccacgctcccgggcagcaggacgtgctcctggatgatgtcgccgctctcgcagcagcggcccaccaccgagcagggaaattcggcgggctggtccagcttgttggccagcaggcaggtgtagctggccccgtagagggcgaagcggggattgtcgggcatgccgccgtccaccgagacgtagtttttatagccggggatctccttgaccgtgcccacggtgtagagggtcagtcccgcgtctcccacgatgctgcgtccgggctccatgtgaatctcgggcagggcgatgcccaggcgggcgcaggcgcccttggccgcggcggccacctgggccaccttggcgtccacgtccagaacggggtcgcactcgacgtagcgcacgccgtagccgccgcccaggtcaagctgccgggtctggtagccatgggctttctccatgtgggcggcgaactccagcatgatcactgcggcccgttcaaatacgtcctcggcaaagacctgggagcccacgtggcagtggaagcccaccagctccacatggggctggcggagggtgaagagggtgatctcctcggcctggccggtctcgatggcgctgccgaatttggagtccaccttgccggtggcgatggcctcataggtgtgggggtcgatgccgggggtcaggcggagcagcacccgctgcttgataccccgccgggcggcctccgcctcaatggccttgatctcctccacgttatccgccacaaaatagccgataccgtgatccatactgtagcggatgtcctcatcggtcttgttgttgctgtgaaagtaggcctggcccaagtcgtagcccgcccggagggcggtgtaaatttcgccggaggacaccacgtcaatgcccatgccctcctcccgcatgatctcatagatgcgctggaaggagttggccttgctggcgtacaggggccgggcgccggggccgaagtgcctgcggaacgcctcggtatacacccggcagttggcgcggatccggtcctcgtccatcaggtagaggggggtgccgtactgccgggccagctccacggtgtcctgaccggcaaagagcaggcgcccgttagagacggtaaggttgtcgcagatcatgtctcatttcctttctgtttctctggaagatatcccgccccgcagggggccccggggggatgctatttggcgtgtctggccgcaatggccctgtccagccagtccttgccgtcggtgacgcgggcgacgatgtagcacaccacatagtctccggcggagttgatcattgtggccgggggatctaccaggttgccgatggccaccaggatggggaaggcaacctcaatctgctgggggaagaagatggagcagatgatgtactcaccgatgtagcctccgccgggcacgccggacatgcccaccgaggagagcaccgccacagccaccaccgccgggagcatggtccagggcatatccacgcccatggcccccaggacaaaggcgattttcagcacgcaggagaagcaggagccgtccatatgcatggtggcgcccatgggcacgaccatatcggccacatccttggggatgccggtgtcctccgcctcacgcaggttggtggggatggtggcggaggaggagcaggtgcccagcgacatgatggcgggccttgcgatgtgctggaacatagtcttgatgccgtgcctgccgccgccgatataggcgaagaggggaaaggcggtgaagatgtagataaagcacagggggtagtataccaccatggcccggccataggcggaggccacgctggagccgtaggtggctaccagatccgcaaacagggcgaagaaggcgatgggggcgtaataggtgatgatcttcacaaaggccatcatcacttcggtcaggccgtcgaggaacttgccgatgacgtggtcggggccgcccaccagattggtggcaaagccgaacaggatggagaagacgatcagcggcagcatggcgctgcggctcagcaggcccacaaagtcgtcggtggtgaagaagttcacgatcatgtcggcgagggaggcgtgctcgccgatggcctcggtggccatgtcggtccagggctccagcaccgggggaaccagcttcatgacaatgaacatgatgacggcggcaacggcgccggtgaccacgaaggtgagcacggtggtgcccatgatcttgcctgcccgtttccggctgcgtacgctggccacggagttggagatggaggcgaacaccagcggcaccaccacgcagaacatcatattgatgaacacggtgccggcgggcttgataaagtgaccaaattcaggaaagaaccagccggccacgcagccggctaccatggcaaacagcatcagggccaggaagcggtagttcttcataactgtggatttatccataacaatacctctctttcttctaacacacagaactgccggtggggtatgcggcgtcacctcctctctcagtgtaccgcaccggcggccgctctatcactcaaaggggcagttcctcgtcggtgagctccccttttgcaaccatattggtgggcccggtcagaaagaggtgttccaccgtggagccgcggcgctccacatccaccaccagctcgccccccgtcatctggacggccaccgcccggccgctgaccgcgccctggagggtcagcacggcggccaccgagccggtgcccgtgccgcaggcgtaggtgaagccctccacgccccgctcaaaggtgcgctcccagatccgccccggtccctccacatcgaagaaattgacatttgcgcccttggggaaggcggggtgggcccgcagcttccgccccagggcgaacagctccgcctccggccggccgcgcagtcccggaatcggaaccactgcgtggggcaggccgggatctcccagctccacataggagcagggataggtcttgccgtccacctccacggggtagtccagccggagggtggtgggccggttgagttcgattttatactgccgccgggtgatgcgccggccggtgaccaggccagcggtggtctccaccctctggagctctccggccagcccgatctcatagccatagcggcagatgcaccgagccccgttgccgcacatctcgcccgcgctgccgtcggagttgtaaaacagcattcggtagtccccgccggactgcggccgctccaccaccatcagaccgtccgccccaatggacaggcggcgctcgcacagccgccgggccagggcgggaaagcaatccgccgacagcccctcctgtagattgttgaggataataaagtcgttgcctgcgccgttcattttccaaaactgcatcgaaggctccctcccattaaacgtgctccttgtctcattgcctatgcaagctgcatgccaggcggccaaggggggcgaagttcagcggttccaacaaaatatggccgtcaaattcagacagaatccgcaaaacatggggcgcaagatccagcatacccggaacctgggtgaaaaaaacgggaaagggagttcggatttccgaactccctttcccaaaaacaggacgtgtttagtccagttggtattccttcagcttgccgtaaaacacggtcttggacaggcccagcagctccatggccttcacacggctgccgccgcactgggccagggtctgccggagaatctgcctttcctcccgcttgagccgttccttcagcgtgagcggggcgggcgctgtgccctccaggtggatgtgctcggcatagataagctccgactcggagagggccacggcgttctccagtacgttttccagctcccggatgttgcccggccagttgtaggccagcagcttgccaaaggcctcgccggacaggctcctgggcgggacgccgtacttctggggaatcttctccatcagccggtcgatgaggaagcacacgtcctcgggacaactgcgcaggggaggcagctccacagagaaggcgctgagccggtagtagagatcctggcggaagcgcccggcggccacctccgccctcagatcccggttggtggccgccaggatgcgcacatccaccggcacggaccgggtggagcccacccggcagaccaccttgttctggattacactgagcagcttggcctggatctggagggggatctcgccaatctcgtccaggaagatggtgccgccgtcggccgcctcaaaaaagcccgccttgccctgggggttcgcccctgtgaaggcgccccccacatagccgaacatctcgctttcaaacagggtgggggagatggtggcgcagtccaccgtgacgaaggggccgcggcggggctgggcctgacggatggcctgggcgaggaaggactttccggtgccgttctcgccggtgatcaggatgccgcagtccagctgggacagcttgtagacccggtgccggacggaggccggcagggtgtcgaagccgaagcgctccgcaaaggacgcctcctggggcgcgtccttgcgggcggtctcccggtaggtccgctcggccatcttgatggcattgttgcgctccaggatggtcacatggatatcctcaatgttccggaacttgacgatcactccgtccgggcgtccgccctccgccccgggcacggggagaagggtggccaccagctcaaagccgttgatctcgtactcccggtcctcaagcctcggcgcctgtccgttgagcacccgggcgagatcccgctcaaactgcgccccctcaaagaagtcgcggaagtgatagccctccacctggagggacagcccggcccgtttttcgctgtaggagccgccccgaagcaggtggccgatgccctccctgcgggcggagtagcccttctcctgccagaacttcacccggccagtcgccccgtccagaaccaccatctgtccaatgcagcggaaatacccgatggtgtagacggtgtcccttaccgtaacggtgacgctgcggcgctcgatggagaggcggatcgggatcccctcacagacggtctccagacagaggctgtccgcgtcctggtctggcaggaacttgtagacgggccgccggccgggcatgtcgaagacgcctgccgccaccagccggtcgttgacgcggagcctgggctcccggatgccgatacgggcgagatcctccggccgcagcgccccgtcgtccgcgccgatggctgtgtcggcgatcagcaccaggtcgcccggctccaaccgcccggcggggtgggggtgctggctgttgtggtagaggccgaacctcaccttggcctgctggttgatatgggtgatgatgccatcccgatccagggtgaaaatggcatgggatgaggaatccatgagacattgcagaagatccatagcggtgctcctctccgggcgggccgggaaatcacctctattgtacgggagaaaggagccggtgtaaataccggatttggagggggttcgccgcctgtatgcagaaacgcacctgacttcggagggaaatcaggtgcgcattccccgtggggctcagcagcgggcggagaggacgcgcaggatgtcctctgccgggggcgggcagcctgggacgcgctctttggcgtagttgcagcaggcgccgaccccaaggccgtcgaagggaatcccccgccagccctggccgatggcgatggggatgccccgcacgccgctggtgtggagggcgcgcaccaggcttgcgtagcaggccgagcaggcgcttctggcctggacggtgcgggtgagggcggccacggcgccggagggggcggggtagtccgccgccgcggagggctcgttgaggcgcaccacatccccctcctccagccgggtggagccggccccccaggcctcggccatctggatatagggcacctgctccagggccaggcccataaggcggcagccgtaggcgtccagctgcacggggtcctcacccagcagcatccgacccgtggggacggggttgcccccctcctcaaagtccagatccccgcagaggctgtccacgatggtcagctccggccgcagggcggcggccagggcggcgatggggcgcatcagcccctcggcgtggaagcgccgcttctcccggtcgggcaggcagcccttgcagttttttagggcgcaggtcatggcggtctggcagtggcccttgagcacgggcaggttgatgaggtagtccgcgtccagggcgcggcagcagatgtccatgggccgcaggggggtgtccacccggcgggtcttgtcccgcttgaggtcgaagaggggcacgccgtacttcttccccaccgcctcgtatcccgccgcccggaaggcccggccggtgtcgtcccccacccaggagccctcgatgatggagatatcccggaagccatggtcacgcagatactcgatggcgccggacaggacgccggcgtgggtggtggcgccggtttcgggggaggcggccaccaccaggttgggcttgagggccaccgaggccccggaggggattttgcacgctgcgccggcggactccatcagggcgcgggtcatggcgtgggcattggtgccaaagatctcatagatgcggctcattgcggcaactccttttcttgcgcggcgcactcgggacggaaataggcggcggccagggcgatgaaatactgggcggatttggacaggtagcgattgcgccggtagcaggcagacacggtccaggcgggatgggcagacaggcggaagcaggccacgtcctccaccccctggacgtagtaggcggggacgatggagcagctcagccccttctgtaccatggagacattggcccggttgctggcggtctccagaaagaggttgggctttcgccccgcccgctcaaacagggggtcgatgacctcccgctgggtggaggagcggtagatgaggcagaaggtcaggtcccagaggcactccgtgtccagcaccgtcaggggcgcgcccggcggcgcggccctggccgccagcggatggctgcggggcgtgatgagcaggaactcctcccgcaggagggggacgcaggtcagccccggaacctccccctccggcctggagatgaagcccagatccagctcgtccccggccagcatctccaactgccgccggacgctaatctcccggggggtcactgtcacctcgggatagctctgatagaaccgtgggtacacggccatgaacatctccatgccccgctccggggcgaaggcaagggagagggtgccccgcctccggtcggcgatgtcgtggatgatgcggtaggcctcgtttttcagctccagcatccggcgggcgtagtccacgtagacccgcccggcctcagtgagggcaaagctgctgcgggagcggaaaaagaggcgggtgcccagctcatgctccagcttgagaagctgctggtccagggcggactgggtgatgaacagcttggccgcggccttgctgataccaccctcctgggcgatggtgagaatataggtcatctgtttgacgtccaaggccgatcactccttgccggtaaaagggcgcgcccccggctccgcgtgggaaggtcgggggcgcaggggggaaaggaaccactcagcggcggatgagaagcaccgccacgtcgttgacattggtgcccgtcgcccccgtgtggagcaggccgccgcaggcggccagggcgtggtaggcgtcgttgttcttcaaaacctcaaagatgcgcacgccctgcctggccagccgctcctttgtcccgccgtccacgaagccgccggcggcgtcggtggggccgtcggtgccgtcgctgcccacggagaacacggctgtgtcctccagcccggcgatgccggcggcggcggagagggccagctcctggttgcgcccgcccaggccggagccggtcaggtgcaccacggtctcccccccggccaggaaggccagggagcgctccgtatcctggtgggcgcgggctacggcggccaggaaggcccccgcctcccgggcctcgcagtccaggctgtcggtgagcagcaccggctcatagcccagttcccggcaggccgcggatgcggcggcgcacagctcccgcacgctgccggtgataagagtctccacattgtccagaaccttgggcgtctcccgctccaggcactgggaggcctcgggcgacaggcgcaggccgtactgctccgcgatgcggcgggcatcggcacaggtggaggagtcggggtaggccgggccggaggcgatcatgtccagcggatcgccgatgatgtccgacaggacgatggagaatacctttgccggggcgcagtgctgggcaaaccgcccgcccttgacggcggagagccgcttgcggatggtgttcatctccacgatgtccgccccgctggccagaaggctctgggtgatggactggagctcctcctgggggaccagcggcgcctcgaagagggcggagccgccgccggagaggagaaagaggacggtgtcctccgccgtcaggccgtccgtgagggccagcgcctcctccgtggcggaaaaggtgtcctggtcggggacgggatgccccgcctcccggatgagcagggagccgatggggccctgggcatggccgtgcttggtgatgatgatgccgccgtccagccgcccccccacgcagtcgcaggcggcgcgggccatggaccaggcggccttgcccacggccaccagcaccacccggccgccctgaaaggggttcccctccagggcgcggcgaaccgccgcgtcgggctggacagcggcgatggcccggcggacaatctgatcacagtcgtttctcagtttcatgcgttcctccatggtcgcctcgcggagaggcttaaatcaggccggcctcagacatggtgcggcggaagccctccttggcggggccctccggggtggggaggctgggccggtagggcacgcccacatcccggccgcggagcgcggccatatccttggcggccacagggaagctggcggggtccatggccagacggacggggttgagcttgaactgggcctccaggctgccctggagatccccggcggcaaacttgttgtagacgtcggtgatcagctcgggcatgaagttggccgcggtgcacacgccgcccaccgcgccgtggcacaggctggcgtagagcagggtatccttgccgccgaacaccttgaagcccacgtcgcgggtacggcggatgaactcggcggtgagggtgatgtcgccgctggtgtccttcatgcccacaatgttttccacctgatgggccagggcatccacgagatcggcggtgagggtgtaccccacccgcccggggttgttgtagagcagcatgggcgcgccggggacgctttcggcgatggtcttgaagtgctggaacagctcgtcataggtgggcttgaggaacatgggctgtagcacactgacgccggcggcgccgttggccacggccattttggccagacggcagcacttctgggtgcggatggcgccaatgccgaagtagacggggacgcggccagcggcctgatccaccataatcttcaggccccgctccatctcgtcctcttctaccatatagaactcgccgttgctgccaaaggccagaataccggacacgccgcccttgatgacgtagtccacctggtcgcggagcctggcctcgtcaatgcgctcctccccgtcgatgggggtgagtatgggcaccacgacgcccttgataaaatccgtattcatgatcgatcacctcgcactcgtgtcgggcggccttacagggactcgatgccggtgagcttcttgtagtacttgatgatggagctgtgatcgtcctggccgcagccgttgttgtgcagccactggaagatctcctgcaccgcggcggtcatgggcaggggggagcccacggtgtgggcgcagtccagggcgttgttcagatccttgatgtgcaggtcaatcttgaagccgggcttgtcgttgccctcgatcatcatgggggccttggcgttcatgacggtagagccggccagaccgccgcggatggcctggaacaccagctcgggatccacgcccgccatcttggccagggtcagggcctcggacagggcctggatgttgcaggccacgataatctggttggccagcttggtggtgttgccggcgcccacgtcgccgcagcgcaccacagaggcgcccatggcgcccagcagctccttgtactggtcaaagacctcctgcttgccgcccaccatgaaggacagggtgccgtcgatggccttgggctcgccgccggagacgggggcgtccagcatctcgatgccgcgcttggccagctccgccgcgatctccttggaggccacggggttgatggaactcatgtcgatgaacacgctgcccggcttcatgtgggcggccacgccgtcctcccccagcatgacagcctttacctgggggctgttgggtaccatggtcagcaccacgtcgcaggtctcgccgatctctgcgttggtggcggccttggccccggcggctacgatctcgtccacgctggcctggttcagatcgctgaccgtgaggtcatagcccgccttgagcaggttcttcgccatgggcttgcccataatgccaagaccgatcagtccgattttcataatacatttcctccttaaaataatagcacagattggggtggataggaactataaaagcgggactcacgcgttggcgcgggccacgtttttggtgacaatcacatcggcgcccaggccgcacacgtcggccagggccacctgcccgacggcggtgggggcctggagccggacggtgttgatgacctccatcacccgaaagatctccttcttggggatggggtggctgagccgcacgctggccaagggcagttcgccgccctccactagtacgctggtggcgatgttgcgctgggggtcggtcagctcctggcggacataggcgtctcccttgggacaggcggccccccggacggcgtgcaccgcgctcccctcatattcggctgtgatctcacagccgttgggacagataatacaggtaaagctccgcgtcactgtacgctcacctccaaatcaccggactgctccagcgccgcggcgcggatgggaagctgaagcatctcggcagggagtgccttgggcagcctgcgccgtagcacctcgcggccgtcctgcgtcacggtcagggtgacggccttcatgggccgggacacccgcagggagagggtgaaatcccggctgccgctgatgcgctgggggatgacgtggcccacgttggcgcccgccctgacctccaggggacaggggggaagcgcgtggtttttcaggtactccgccgccgacgaggccagggcctccgcctccagggagacgaagtccaccagatcgtggacatggagcacattgcccgcggcaaagacgccgggaatgctggtctggtagtgctcgtccacgaaggcgcccctggtgcgcccgtccaccgccaggccggaaccgttggcgatgtccccggcggggatgaggcccaccgagagaatcagcgtgtcgcactccacccgctcctccgtgccggggatggggcggaggcgttcgtcgacctgggagaccgtaacggcctccagacgcgcccggccgtgaatatcggtgacggtatggctcaggtacagggggatgccatagtcgttgaggcactgctcgatgttgcggggcaggccgctgggatagggctgcacctcatagacggccctcacatgggccccctccagcgtcatgcggcgggccatgatcatgccgatgtcgccgctgcccagaatgaccacctcccggcccaccatgaggttgcgcaggttgatgtactcctgggccacgccggcggtgtagatgcccgccgggcggctgcccggaatggccagggcgccccgggtacgctcccggcagcccatggtgagaatcaccgcgtcgccccggagctgtttgagcccggcggggccggaggcggtgacggtgcggtcggcctccagggagagaacggtggtgtcggtaaggcaggtgatgcccagctcctccgcctgggccacgaaccgctgggcgtactcggggccggagagggtctcgccgaagcgggtgaggccgaagccgtcgtggatgcactgacggaggatgccgccggggcggtgctcccgctccagcaccaccacgtcgtcgacgcccttctgcctgagccggatggcggcggccaggccggcgggcccgccgccgatgattaccgcctgatggcgttccacgttcatgccggctcccctcctttcactgacccggtgaacatccaggagccctccggccccaggtggatgtccctgaagtcctctcccagctcccggcggagggcctcggtgatgcgggtctcgcagtagccgccctggcagcggcccatggtggcacgggtgcgcaccttgataccgttgacggtgtggacgcccagggggttgtggatggcctggagaatttcggccttggtgaccttctcgcagcggcagaagatctcgccgtagtccgggttctccgcgatggcggcggcccgctcctcgtcggccatatcggcaaaacggcggatgccgtgccggatgggatcaaagtcgggattgggctccagcgcctcctgccgggcgatgagggccacggcccggcgggccagcgggagggcggaggtgacgccgggggactcgatgcccaccaggttgaccacgccgggcgcctcgtcccggcactccagtacgaagtcctgtaccgcgccggtggcggggtcgatgcgcttgggccggatgccggcaaaattgcggatgaagtaggcgcggtccatgtgcttgaacatccgcgaaccgctctcaatgaggccgtccatggcggcctgggtggactcgtagtcctggaagtcccgcgccaattggctgtcgggccccaccagcacatttccgtccacggtgggcgtggcatgggtgtcaaacgtattgtccggattgggggcgggatagacgggaatcctggcaaactggcccgccagcttgtcaaggacgaagtattcgcctttgaccggcttaatgacatagccgggaatgcccagttgcccgctgaccacggcggagttgagccccgcgctgttcaccacccagcgggtgtggaagtcgcccctggtggtgtggagcaggtgggtgtcgtcggcctgccgggtctcgccggtgaaagcgcagttgaggtggtactccgccccgttgtgaaccgcgttctccgccagggcaatggtgtagaggaaggggtccaggataccgctggccgggcaccacatggcgaaatttccgccggcgctggggtcaagctcatccatccgcttgcggtcgatgagctccaggcccttcacgccgttggcctcgccccgggccatgaattgctccagccgctgccggtgctcgtcggtgaagcccacgatgagcttgccggtgcgcttaaaggggacatccagctcgcgggctacctggtcgaactcctggttgccctccacggcgcagatggccttgagggagctggtcttatagaggaacccggcgtggagcataccggtgttgcgcccgctggtctgggtgcagacgtcgctctccttctccagcacggcgatgcgcagcttgtaccgggagagctcccgggcgatggcgctgcccaccaccccgccgccgatgatgacgacatcataggactgctgcatagggatggctcctttctccatcaaaggaacagggtcaaaatggggacggtgaccaggctggtcagcgtcgagataaacacacacttggaggcgaactgggcgtccgccccgtatttctgggccaggatggcggtggtggagccgatgggcatgccggtgatgaccacactcacgccgatggtgaggggatccatccccagcaggcgcagagctgccagacagatgccaggcagcaggaactgccgcaccgccaccaggtagaagcacctggggtcgaatacggtcttgaggggcacgtcggccaggatggcccccaccagggccatggccatgggggaggtacaggcccccaggttatccaccgcggtatccacaaagtggggcagggggagctggaagagcatccataccagccccacctccacggcgatgatgccggggttgagcagcacctttcggacggcctgcttggcgtcggccttggtaaacagggagatgccggcgctccacatgaggatgcgggtggggatgatgaacagggagcccagaaagaggccctcgtcgccgtaggcgccgctgaccacgggcagtccggcaaagccggagttggtgaccagggtgccgtactggaggatgctcttctccccatagggaaagcggttgtagagcaccttgcccagcagcagggccgccgcggccatgacggtggcgatgaggacggccacgcccccctgcttgagggactccaggctgaactccatgtggaaggactcaaagatcatgcagggcagggtgatgagcaccacaaagtcggtcagcttatcccgggccgcgtcattgaatatgcccttcttgcggcagaagaagcccaccgccatgtagatgaagaggacggtctgcacgtccaccatcttgaaaaagctgtccatactacccctcgatgggggtgagaagggccccgtccccgtcaaattccagcggctcgggctcagagcaggccgccacgccgggccatttacccgccttcacgtccctgtaataggcctcgctgagcatgatgcggccgatgtggaggctgtttgggatgcggatgatccgggcgcggctgcggtcgatgccggtgcaggtgcggatacacatctgaatagcctccctgtcgttggccaccacgcaggggatgcgggcggaggtgaggacggtagaggtgagacagttggggtacatcttttccgtgtcgattttgtcaaagaaccgctttgtgatcacgttggccaggcccacgcccagggcgttgccgtggctggccgcgctcagatcgagaaagcaggtgcgctgcacctccaccccgccgtgggcgtactcggtggaaaaggtgccggtgatgttggggtccacgccggtgcccgagtagttcttgcccgtctcgtccaccaccagcacgtcgcaggcgcccaccagcagggagggcatccgctcaaaggcgtactggagcagctccggctcccgggcgagaatgtcgtccctgtcgatggcctcgatgcggcaggtctcgtcataggcgttctcgatgcagggcagggcaaagaggatgggggccctggccagaatgaccttggcgatggaggggatgttggccccgatcttgcccatgccgtcggagtggacccgctcggcccccttctgcttgcccaggcccacggcgagcatcttgcagggcccgctctcgtaggggccgcggaaggcgttgtggggcttgaggcggcaggagacgatgataccgtcggcctcataggcgtttttgtccaggtacaccggcaggccggtgtcggaggtgcccagctccactacctccatgctgctgcggatctcacagcccatggcctccggggtgatgccgtagctggccagcacctccagctgcccctcggcagtggcgccgccgtggctgcccatggcgggcacgatgaaggggacggcgcccctggcctttacaaagtccgcgatggaccgggtgatgagatccacgttggcgatgccccggctgcccgccgtgatggcgatggacatgccgggccggattttggagcggaagggctcccgggacagctcccccgccacggcggcggggatgtctgcgggggcaatgcgctcccgggggaagagctgctcggcgcggaacatgcggggaatgggcacgtcggccagcagacgggagacgacgcccccctgtttgatttccataccaaaccgacctttctcttgtcaggtaataggcgcgggattgaagatgcacaggtcgttgtggaagccgtactggtcggagtagggcttcttcacgccgctggccacgtccagaatcaggtggaacagctcggcgcccacgtcggcgatggtcttctcgccggtggcgatggggccggcgttgacgtcgatgaggtcaaaccagtgctccttcatctcgttgcgggagcagaccttgatgaccggggcggcggccagcccgtagggggtgccccggccggtcataaagacctgaagcccgatgccgctggccaactggcagggcccgcagacgatgtcgctggcgggagtggcggcgtagatcaggccgtgcttatggggcttctctgccggggagagcacctcctcgatgggggcggtgcccgacttggcgatggagcccatggccttctctacgatgttggccaggccgcccttcttgttgccgggggtggggttggcgtcccggtccacgccgccggcgtccaggtagtcgtcgtaccacttcatctcggcggccagcttgtcccgggcggccgcgtcgcggcagcgggcggccagcagatgcactccgtcccgcacctcggtgacctcgctgaacagcacggtggcgccgcccttcaccagcatgtcggcggcgtagccggcgctggggttggcggtgaggccggagaaggcgtcggagccgccgcactgcatgccgatgagcagctcgctgaggggcagctcctcccggcggcgctcgttgagccgtttcagcttccactcggccatctccatcagggcctgcatcatggcgtcgtggccccggtagtcctggagggtgagggtgttctccggggtgatgtcctccggggggagcaccatgtcgtaggtgagcttttcacagcccaggcccaccaccatcaattcgccgccgaagttggggtggcggatgaggttggtgaccgcccggatggggatatgggcctcccgggccttaatggccacgccgcagccgtaggggtggttcactgccaccacggcgtccacattggggtacttgggcagcagctcccgcttgatgcgctccaccgccacgttgaccacaccggcggcgcactggacggtggtgacaatgcccagcaggttgcgggtgccggcggggccggttttgttgcggtagcccatccaggttctgcggggcggatcgggcagctcttccatggggacgaggctggtcccgtagggcatgtcgtccaggccgggggactgaggcaggtccagcatgtgctcgttgatccaggccccaacggggatgggagccttggcgcagcccagcaccacgccgtagcggatcacctccctccccttggggatgtcagtcagggcgatcttgtgggcctgggggatgtcctcacgggtgacgacgccgggcatgatctcggtgccgcgggggatatcgtggaccgcgatggccacgttatccgcgtccttgaccttgatgtaaagtggtgcactcatagacgaatactcccttttgactcgatgttattccaccgggcgcggggcgcgccggacggaatgacatcgaggcgttatgatgattactgcttgccggagagctccttctcctggcgcttggctttgcggttgtccagaacggcgtagaccacggacaggatgatcagcgcccagataacccagctcatggggcgcacgaacaggccggtcagggagccgttataagcggtgagcacctgaatgaaatagtcctccaggtcgccgcccagaatgaagccgatgaggaagcaggacacggggaagtggaacttcttgatcagaaggcccacaatgccgaagagcagcaggcaccacacgtcgaacatgcggccgttgagggtggcgtaggcgcccacggtgcacatcatgagcaccacggggtacaggcgctcctggggaatgaggacgatcttcgccagcagctttaccgggaagaacatgaccaggtacatcaggatattgcagcacagcagggccaccagaatggtgttccagatcaccggattgttggtgatgaacagggggcccacctgaatgccctggagcatgaaggcgccgatcaggacggcggtggtggagtcgccgggaatacccaggctcagcaggggcaccagggcgccgccggtcaggccgttgttggaagtctcagaagcgatcaggccctcgggtacgccggtgcccagcagctcggggtgcttggaccagctcttggcctgggagtaggcgatcagggaggccgcggagccgcccacaccgggcaggatgcccatgaaggtgcccagcagggcggagcggaacacattgatgatctgccccttgaagtcgtggagaaggctgaacttgacgttgttcttgacctccagcgtgtcatccttgctgtaggaggcgtgcatgccagtctcacactgctggagcatctcggagacggcgaacaggccgatgagcacggggaagagctggaagccgctctgcatctggctctccaggaactcagggaccatgcggtattcattgttgacggagaactggttcatcatggctaccagcacgcccagcataccgatccacaggccgcggagcatctggccccgggacagggcggcgatgacggtgagggcgaagaggatgatgaggaacttctccacggcagagaacttgatggcccagccggccaggatgggggtgaagagggccagcaccaccagggagatcatgccgcccatgaaggaggaggtgacgccgattttcagggcgcgttctccctcgctccgcaaggccattgggtgtccgtcgaaggtcgtacacaccgacgacggggtgccgggaatgttgatgaggatggcggggaccaggccgccggagatgccgcccacatagaggcccagcagcagatagagggccatctccatggagtaggcgtaggtcagggggaggaacacggccacggccatggtggccgtcatgccggggatggcgccgaagatgatgccgatgacgacgccgaacagggccacggcgatgtactccgggccgatcacgaagggcagttcaaatcccatgaatcacaccagcctttctttagtagagaatgaagcccagggacggaatctcaatggtgaggagaccggagggcagggtgatggcgaacgcggtgccgaacacaacgctgataatcaggcaggccaccacggagatgatcaggctggtgatgtggtacctcgggtttttcaactgcgccttgttggcaaacagggtgttgaacaggaacaggcagatgatggaccagaaggtgaagcccagcttgtccagcaggaagaagtagaccaccatcagggcgatcgtaccccagaatttgaacttgtcgtagtgttccacgaagaagcggccgggcttgacaaaaaagcccttgcccgccttgatccgggcccgcccctccagggcgatcagcagggcgcccagaatcaccagaattccaatggtgatgatggggaaaatccagtgctgggttgaatactccacattgatatgcatcttattacctctctttcgcagggtggtatcacagaatatcaccccgctgaagcgccaaccgccggctgggcttcaacggggtgacactccaacagatattaggtcagctcgtccaggccgggggccacgtcgatgatctcctggccgatgtcccgcttgtcgctgatgaactggcgggaagcctccagatccgcctcctcggcggtgacggcgctgtagagcaggccggccatctcagcctggaaatcggggttctcacagaccttctgcatggcggcggcgatctcattcagaatgccctcgtccatgtccttggggaagagcatgaagaagtccttgttgaagtcgaagggcttgccgttgaaggtgatgccgtcgccggccatggagataacgccgctgccctccaggttgccgcaggtgtcaaagagcttcatggccagctgggcgtccacgccctccttggtgaactccacgcaggaggagtagtcggcgtagatgatgtcggtgttgccgtcccagaggcgctgcttcttctcgtcggtggtgccgcccaccagggccttgatgcggctggccacctcgtcgccgtactgctcctgaacccacatataccacaccacaaagtccaggtgggaggcggagccggactcaatgttcacccgcagctcctcgccggggttatcggccagccactgggcggcctcattcaggttgttgtagggggcgtcggccttggccacaaagcagccgccggggttgacgccgatgcgggggccgacggtcaggttctccagggcgtagtcctcactgaccgcgccgaagagtacgctcaggaacgccatgtcgtggaacatcatgatggtggtgccgtcgcccttggccttggagatggtgtccagcgcctgggcgttgccgatggcgtccaccttgccgttgaagcccatctcctcgcccagatagcgggtgaccatgtcggcgatcatgtaggagtcgccgccggtggaggtggagccgatgaccacgcggacacgcttgcccttcaggctgctctcgccggaggcggcgctgccggtcgcctcggtgccgggatcgccggtggagggggtgccggtttccgtgttagagggggtgccgccgcagccggccagcaggccgactgccatggaggcggaaaggagcagagccgtcaatttcctgaacttcattgttcaattccttcctttcgttcggttcattcactggggatgttccgtgcttgcttgcgggggatgggggcgcttcactaccgtggcactatgatagcaggccgcggcgcgggttttccattcgcaaaaggcaatgaaatgggagagcaaatttgtaaactctgtgtgggtttcagaaaaatgaatttaagatttcaaaaatacccgttctgcgtttcaaatatggaagatttgtttcgctttgaactgtaaatttatagaaaacatcggttgatttttatagtttgtcagaaaaaaacaagtaaaatttgtgcaaaacagataagagtaggcgcggtttaccctccgactgctgctccttgtgcggaacaaaaatctctgttacactgaacatgaatacaaagtttttgtaccgttctggtcaaaaggagtgtcacaccatgaaatcagaatctgcggagctggtaagcggcctcatccgccaataccgccgcctgcgcctgctctacctgggttatctggcggcggccgtcctggcgttggtcttcttctttgtggacaagcgcgttaccctggcgctggtggcggccagcctggtctaccacctggtggtggtacggagggcggggaaggcctaccagcgggcctttgtccacgcctgcggccagtgtaccctggcccggcgccttcaggacgcccgccacaccgaagcgcccaccctggaggagggggagctgcgccgcgcccgcctggtcgccgccaacgacgccaagggctctgtcctggtgcgggagggcggctccggtacctaccacggccgccgtgtgcgcctgggtgacgccgggtttacccattccttctccatggaggggaaaacccaccacgagttcgtggtgggcacctgggtgacggtggagctagggaaggacaccgggctgaactggcggctcatccacgagcgggtgatgatgaagccgtcccgggacgccatgctgcgccgggagagcgggctgcggcgggcggtgggcttcggccccggctggatggaggacggcacctggtttgccctccggccggagggcaaacccgacgtgcccggtgacgccttcctcgccgccctgtgccggctgtccgccgccaccgacaagcccctggccgtctgcgtccagggagaccgtctccatgtctttgtcaccaaccgtatcctgggccagaaggtatccagccgcgtcccgccgagcgccgccgtggccgaggtggattttctccccgagctggacggaattctcaaggcctcggacgccctggtataaaacttcatgcgccaagagcgcaccacgaaaacgggcaaaggcttgtggcgcatgaagtttatgcgcatatgggccgtccaggcccatgcgctttgatttcatggccgtgccgctgaaagcggcacatggccaattttgctatgcttttgcatagcaaacagcagacagggtgcgccccccggtatcgccggggggcgcaccctgtctgctgttcggtcagccctcgaatcggtcgcggatgccatactgcttcatccgccgccagagggtggttttgctgatgccaagctcggcggcggccgcggcccggctgccgccgttgcgggagagcacctccgccagccgggcggcctcgggggagacggcggcggggagggcctgcccctgggcgcggaccaccgggaggggatataactcctccagcagggagcgcacatagccgtcgtttaccgtgcgggcgggggcggtgagcaccatgcgctccagaaaggcgcggagctggatatagttgcccggccaggggtagtccatgagcagccgccgggcctccctggtgagcaccacatagcggttgaacttcaccacgcagtcgtccaggcacatgtcgatggcctggttcagatcgtccgggcgggtgcgcaggggcggcaggctcagccgcaggggggtgagcagatagtagagctcgggctgaaagacgccggcctccagcttgggggccaggtccccggtcagggaaccgatgacccgcgccgccaccggggtgggggtgttctcgccctgcacatgcaccacgccctcgcggagcagacggcagagcacccgctgcccgccgggcgtgagctggtccaggttgtccagatagagcgttccggtgtccgccgccttgcccgcccgggacagggcggcttcctgctcaggggagtgggccgcgcagtcgaaggtcacgaaggggcccttggaacaggggctggcgttgtggatgctctgggcaaagagggacttgccgctgcccacctcgccgtagaccaggatgggctgcccggtttcggcaaaggtgcgggccagctttaccaggcgggacatctcccggctggtgtggttcacgtcttcaaaccggccgtgggccagatagcgctgaagccggtagcgttcccgcagagcccgctctccctggcgctccatcttctgcatctcatagaaggaaaataccatgccctccccggcgtcccagtccgccacgggggcggcattggccaccacgtgcacccccgccacgttgagcacggagaagtagagctcccgccgctgggccagcgcgtcggcccagaactcggcgtcctcccggggcatcagcgtggaaagagggagtcccaccagcttctcccgctcctgctccaggatcttacaggccacgtcgttgctctggacgatgattccccgggcgtccagctccagaatcccgttgaaggagtagtccagcagaacttgcaggtgggccgtgttgcggcgctcggcgtcggcgacctgccccacgttgcgggcgtggagcaggctggtgcgcagggagtcctccgtcccgtcgaaaaagagggtgcgcttgcccagccggcggcagtaggcattgacaaagtcgccgcccagaatgacatccatcccgtcggccaccgcctgctccgccccgcgctccatctccgacaggccggagataaaataggtgtgcagctctatgtcgaaaatctcctcaaagccctgaatattccccaccatgttggggatggtcaccacgccgatcttcggccgctccagatgggagaccaggctgcgggcccggtggagcagccgggcgatctccaggccggtgagctggatctccaccaccgggaagtcggtgtgctccttgagaatggacgcctggcggcctcgggccaccaggatgtcggcgcctgtgcgccgacaatcctccatgaggtctagaatccgctcggtggggacggactggttgagcaccacatccatctccagctcccgggcgatccgcccggcgggctccaccatctcctcacgggggagcaggagcgcaaatctcgccatgtcgattcctccttctgcttcgttctcatcttaccccaaggaaaggccggttgtaaagattgtaaagcgggagatggcgcggctgaaaaatctcatgccagagggttcagagagaaggagcgtgtgaagggagctgccagggttccctttggcatgaaatcaaacggcgcggccgggacagagaaaatccgtcccggccgcgccgtgtctctgaaacgatatgtggaatcgcagggaaaccggaaatcagcggaccaggcaggggcgcttgggatcgaaggtccagccggggatcaggtactgcatgccaacggcgtcgtcccggccgcccagacagttgtccaggtagagctggtgggccttctggagctgctcccggtccagctccacgcccaggccgggccgctccggcagattgatgcagccgtccacgatctgcagcggcgccctggtcaggcgctccagcccctcctgccagatccagtgggtgtcgatgccgttgagcttgccgggcaccgccgcggcgcactgggtcatcatggccagggagatatcgaagtggttgttggagtggcagccccacatcaggccgaaatcattgcacatctggcccacccggacggagcccgccatggtccagaagtgagggtcggccagggggatatccacactgcgcagggcgatgcagtggcgcatctcccgccagtcggtgtcaatcatgttggtggcggtgggcatgccgctctcctggcggaactccgccataatttcgcggccggagaagcggccttcggcgccgcaggggtcctcgcagtaggccagaaccttcttcagctcaggggcaagggccagcgcgtccttcagcagccagccgccgttggggtccagggtgatgcgggccttggggaaggcctccttcagagcctggacggccttcagctcctccctgccctccagcacgccgcccttgagcttgaagtcctcgaaaccgtacttctcataggtggccctggccagcgccacgatggcgtcgggggtcagcgcctcctcatggcgcaggcggtaccagtcgcagtcggagtcgggctcggagtggtagggcagatcggtctttttgcggtcgcccacgtagaacagatagctcagaaagcgaaccctgtccctctggatgccgtcgcccagcagggcggccatgggcacctccagatattggcccagcaggtccagcaggggagtctccaccgcggtgaccacgtgcacgccggtgcgcaggtcaaaggtctgctggccccgcacgtcgtccttaatattggccgtgagccactcgttgagcctccgcagggtcatcttgtagtcggccacgctggtgccctccaccaggtgcttcacgttctccagggcgcgggtgattttctggccgccggggacctcgccaatgccggtattgccccggtcgtcagtgagcaccacaatgttgcgggtgaagtagggggcgtgggcgccggagaggttgagctccatacagtccttgccggccacgggatagacctccatggcggccactttgggggtattggccattacaatgcactcctttgttccaattcaggtgagttggcggatacgcctcggtagtgagcggcccggccctcccttcaggacggaatacattcctgacactgtggctgcattttatcacggccctcccaagaaggcaaacggattaaactgatcgctcaattaggaaaactaatttattttgatattttgccatagtgtttctaatcctgctgtccctgcggcatcgaaccccaccacaggcgcgcttatccgctttttctgttaaagtgattaaaaaaacgaatttgagtgccggatagtttggtggtaagatccaaatgtgctgctggtgtttccactgctttagcttcacgaccgaacgccatccacaagaaaaaaggaggaatctctgtatgaagcaccgcattcaaatgagagccgctgtctcggcgctggccgcatgcatatgcctgtcggctctgcccggcgcgctggccgcagaacccggacgggtcaaggcccccggcaggacggagatggagcacgggccagtgagcaccgagtttgccagtactcgccttgcttttgcggtctctgatccggtgaccaacgccgacgataccgttacgctggacgtagcctacgccgacagccagggcaccaagcacgagagggtcacccccaccggcatgaccgagaccgacgtggcgctcattacggtggcggacaatccggtggctgccggctccaccattgaactgtgctacaacgaacagggtgagctgatcaacatcaaaaatatctactcggcgtacatgtccgacctgggcaccgtctatttcgataccatgaagtacggcgccgagctctccccggtgaacggcgaacccggcgccatgctggccaccggctggctcaccgccaagtcgggcaatcagatcaccgtgggcgacctggatctctttgacgagacctgcaccctggccccggacgtgaaggtctacgagttcaacaccgacaccagcaccctcacggctaggcggctcagcgacgtacccgtcactcagaaaaccgacggcgaattctacaagaccgccaaccgtcagcaggtcatggtggtctttgaccagaactaccgcaacgctgaccaggccgaggtggtggaactgtactacatcaccccccagcccaccattgacgagaagtacctgtaccccgctgaccacatgcccatcgacagctttatgaccgagaacgacggcaaaactgtggccaagcccacggcggccgcatggctcaccgccacggagtccttcgccatcatccctgaccggctgtactacgtgggcgacaacgaggtggccatctatctgacccaggccgacgacggtaccctcatcctcctggacgcgggctggcccgccagtgggtaccagtactggcggaacatagaggccatgggcttcgaccccagagacattgactatatcctcctgactcacggccacggcgatcagtacggcaccggcgccgagctggacaccatgatcaaaaacgccggcggagaccccgtggtctacgagtgctacgaggacacctacggttacgatatctacggcttccctgagatcaccggtatcattaaggataccccggtactcaacgccgtggacaagttctacatcaatgatacgtggatggagtttgacggcagcgtgcgcatcaaacccgttcttaccgccggccacaccaacggtactgactcatttatcttcgagctgaccgaccctgccaccaacgagacgctcactatctcctacctgggcggctacggggttaacggcaataccaagtacgatcccgacaacgaccccaccggccggggctacctgcgcctggccttccagtacggcctgcgctacctgcagcagaccgtggagccggactacatgctgccccagcacaccaaccagtaccccatgctggagatcaacaaggccgccgaggagaagggaattcccttcctggaggccgtgaaccgcggcagctatgagtgggtaaacttcctggaaaagcgccaggcggttatcacctacgaggattactaccagaactggaaggcagatcccaaggacgagtttggcacggaaattaccgtcaccgacgcagagctccagaccattgaggctgcaggcccctaccgccgcgagggaggcacctaccagattaccctcaccgacggcggcaagatcatccagggctttaaccgctatatgaaccagaccgacaagctctccggcgtggaaaacgcccagggccaggacgtgggcgacggcatcttcatcctgaaggattcctttacccacgatcccgacgcctggtatgtccaggtgggcgcccgcgtcagcgacggctatgatggaagctgcgccggaggacccattgagagcgtccatgacaattggtttgagatcctccgtaccgagcgcctggacagccgggaggaggccgaggctctgctggcccagcttcagtccggcgctacctacactgtgaccctggaccagtccagtgagattcagctggctgacaatctgaccgataccttccagcctgccgccggcggaaccttcaccgatgtgccggccacccattgggcggccggggccgtggagttcgtcaccagccaggggctgctgcagggcaccggcgcctccaccttcgcccccgggcagcccatgacccgcgccatgctggtcaccgccctgtggcgggaggcgggctcccccgtggtgaactatgccatggactttgacgacgtggacgaggaccagtggtacaccgaggcggtgcgctgggcggtatccaagggcatcgtcgccggcaccggcaagggcttctctcctgatgccgccctcacccgcgaatctctggccgccattctcttccgctacgccggcggacaggtgagcgcggacgacctgagcggctatgccgacggggccagcgttagcgcctgggccagagaggccatgaactgggcggtggcacagggcctgatcaccggtaaatcgggcggccggctggatcccggcggcacggccagccgcgctgaggtgtccgccatcctcatgcgctacgtgcagagcgcccaggcctaacgcctttttcggggattctccccagctgcgtgccggggtgaattcctgacatgggaggatgttcaggccattgacttagcctttctgccgagcggttcaattttatgaagctgcgggacgcggcgagggatggtcctatgatgtgtaagtatccgccgctgcgtcttgcgcggtgaaaaacgcctctgagggaggagaaggttcatggaatccatcattttaaatctgcttaacctgaccggggaggagcgggcggcctttgccgtcctggccccccagcggttccaccccgacggggacggactgacggtggaggactggcagtccgcccaggtaattctgggcaacccgccgccggagtgcctgcgggggagcaccgccctgcgctggctccacacccgcagtgccggggtggacccctataccgcccccggcgtcctgccctcggaggcggcgctgacctgctccaccggggcttacggccattcggtgtcggaacacctgttcgcactgctgctggcgcttatgaagcgcctgcccaattaccgggaccagcagaacagggcgctttggagggacctgggccctgtcaagactctgctgggcgctcaggtgctggtggtgggcaccggagacctgggcagctccttcgcccggttgtgccagaccctgggggcccgcaccagcggcgtgcggcgggacccggccaagcccgccgcgggcatcgagcgcatgtacggcttcgaggcgctggatacgctgctccccgcggcggacgtggtggccctcacgctgcctcaaacccccggcaccgtccgcctctttgacaaggcacggctgctgcgcatgaagggggacgccatcttactcaacggcggccgggggagctgcgtggacggccaggccctggcggaggtgctggcggatggccgcctgtggggcgcgggcctggatgtcaccgacccggagccccttccgccggagcatccgctgtggcggcagcccagggcgctcatcacaccccacaccgccggaggaaaccacctggcggacaccgagcgccgcatcgcccgcatcgcgctggacaacctgcgccgctatctggcgggggaggcgctgcgcaaccgcgtccgctgaaacgccccctacagaagctgtcggcgcagctcctccggcgacaggggagagagggcagccgggggaatgtcaaacacggttttacagcccgcctgtcccgcccggcccaggcgaaaggcggctcgggcaaaggcggtcaggacacaggcggtgaactccgggttggagtccagcgtcagtctgaattccaccagggcccggttctgttcctgccggcccgtgcggccgccgcggaagacaaagccgccgtggggcaggccgccgtggtcccggagcagctcctcctcagagagaaagtgcaccgtggtgtcgtagtcggcaaagtagtggggcatggtgatgatcgcctgctcgatgcgggcccggtcggccccctcctccgccaccacaaagcactcccgcgtgtgcttctgccgggtggtcagcgccggattggcgccgctgcgcaccgcatccagggcggcggggaccgggatggtgtactgccgcgcgtcccggacgccggggatacggcggacggcgtcggagtggccctggctgaccccccggccccagaaggtgtagctctccccgcagggcagcaccgccgcggccagggcccgcaccagggaaaagaggccgggatcccaccccgcggagatgatggccgtcttcccgccggccctggccgcggcgtccacggcggcaaagtgggcgggaatgttcgcgtgggtgtcgaagctgtccaccaggtgaaagcgtccggcgtacctggggctctgctccggaaggtcggcggcgctgccgccgcagagcagcagcacgtcgacggcgccctccatcccgtccagggcgtccagcggatacacgggtacgccgggcgtctggagtgtgaggctggagggcgggcgtcgggtaaacacgcccaccagcgccatgtccgggttctgccgcagcgcgtattccacgccgcgccccaggttgccgtagcccacgataccgattcggatctgatccatatgctctcctcccccggcggcggccagcgccggtttgatttggcggcgggaaccgtccggcttccgccattctatcctatgcgcgacaggggccaaaaacgagggctaccggggagaaacggaaaaaacagactgcgcgcgccgcctgtctctcaggcggcgcgcgcagtcatttttggaagggaagctcaaccgaggtatctttggagcatgacggcgacctcagcccgggaggcagtgccgccggggtccagaaggttccccttcttgccggtgatgacgccctgctccacggcccagctcatggcctccgcggcccaggaggagaccgccttgctgtcggcaaaggcgctcagctccgcagagccggcgtcagcgccggacgcgcggtagagcatgacggccagctgctcgcgggtgatggagccgttgggggcgcttccgtcggagatgccgttttccttggcccaggccatgcccttttcataccaggtgccgccgccggaggtgctcacgccgtcctggcgggccagaatggtcatcatcataccccgggtggttggggcggcgggggcaaatgtggtgcgggaggtgccggtcatgaggccgttctccaccgcataggcaatgccgccggcggcccaatggcttgcggggacatcggtgaacccggtgccgccggtgctcattttggcgtagatggcattggtcacatagcggtagtcgtcctgctggtgggcgcggttgttgacggagttggcaaagatggtgagatccatgccgtcccgctccagggcgatggcctccacaaagccgtcaatgggagtcccgttctcgttgaggcagcaaccggcgataaagctgtcctgctccgcggcctggatgagcaccgtggccccggcggggacggaggtgagcacgccgcagctataggtatacagcacatggtcgccgtcggcggcgtagctggcggtgatcaggctgtcggtgggataggtgacggtatggagggcctccatgcccagggtggtgtaggtcaggtcggtgaccaggtttttggagatgtactccagcgggtcggagccggtggcgatgtagggggtgccggccttgacagcggccacggcggccgcgcccttctccccctgatccagggctacgttgcccacgatgatgtccgccttggcgggatcgtcggtgacggtgaagcccagctggtcgatgtaggtctctatgtcgtagttggaggtgccgttgctgtagacgttgcggtagttccggaagccgtagccgtcgcggaaccactgggcgaagtagccctccgtgagcttggcaccggagaatgcgtcatagcggcctgcgaggaagagcgtgggcttccggatggcgctggccgcgggggactcggccgtccgggtggcggagagcacaaagtcgtccgcaaccgtctcgtagctggcaagggagagagcaaagtcgcccttgtggtcgccggaggtgatgaggcttacggtgcggccggcatccagcagggcgttgaccgcgcgaaccgcctcgctgccgttgttggagaggatgaccacgtcgcccgccgtgccggtgagctgggatctgccggtcaccgtgctcacctcggtgagcttgccgtcaaaggtgccctctgcggcgatggggatgcagtcaaagccgcgcatggcggggaagttggtaaccgactcggagtacagatcggggaagccggaggcggaggcgtcggcgccctcccacaggacggcgttggcgtagttccgcttggcctgatgcatgtccaccaccagggaaccggccctgtaggtgacgccgcccacggcggtgtccgtgtccagcgaggatacccttacgccgttgcgcagcaggaaccggcccatcgcataggcgtcggcgggatcgcgctgggaggcggcgtccacggggatgacatagtactcggggaaataattgtcgttctcctcgtaggggacgcgccaggtatcggactgcaactgcttgttgttcacatccacataccacttttccatgctgtcccggtgatcttcgttctcgatgccccggcggaagaactccagttggttgtggtagatgtcgtccttgtgctccatgacgtagtcgatcaggccgtagacgccgtactcgaacaggtcggtggatgcctcgttgttatagggggtctcaatggtgtagcccagggagccgcagttgagcatggcgtagctggggccgtagttggtacacaggtcgtcccaagcggaccagtgcatggtggaggggtcgtagtcatcccgcagaggcatgtaataggaccagtacagggtgtcgggatgctcctcccgggtggccgacatggtgcccagggcagccgtgccgaaggcctcggagcccagcgcaaagttcttcaccagcaggtcgtattccaggttgggctcgtggggcggggtgcagggctccaccaggaattcggtcatgtagccgtgcagctcggcgaataccaccgggttccagtcgttgatcacctggaccagattggtagtctcgttctgggtctggttggaggcgtcccggttcagatcaaagccgttgtcgttgcggcgggtattgtaggtgcgcccgtccgggttctcattggggcagatgacaaagatgatgtcgtccagaatgtcgtccaccttcagcgtgatgtcgccgctgatggtatagagctcactggcatcgttgacgccggtgttgtcctgaatgttgccctccgcatccctggtgaacttctgggagcccaggccggtgatgcccaggtccagcacgtcgggggcgaacatctccgagatgtccacactcttgtccttgaagccggtgagggtgttgtaggtaacggtctcctgtgtagccagggcgcgcaggacgttgagctgggcgtccacgccggggtcctcgtcggggtggacgttgttgaggaagaagggcacacggtagtcgcccatggagcccttctccagcttgtcctggagggaggcggggtcggtctcggcgatggcgttcatggcctggaaggcgtccactgacgccttgctgtcggacagggtgacgtaatactgatcccggccgccctcgctctggccgaaggtggtgacggtgatgtaccggccggggagcgcctcgtcgatgatgtcctggatggactcgtcaatgtcgtcgtagcgggtatagctgtcataggcattcaccgtcatgtccgtctccgccactacggtatcaccgctccgggcggacagggtgtacgtgccgatgaaactgggccaggcgttccggtttttggaggagtcgccgttgatgccggtaaaggaaccggcggtaaagggcagggtcacggtgaccttgccgccgctggacgacgcggctgcatcgcccagggtgaacagtgcgtcgcctccttcgccgttgttccagacctgccagcggtccaggcggtcgcctgggtagtaatagggatagagcgtcccgtcctggaagccctcctcccgggtgaggtaccaggtaaggccggcggcccaggcatcgggagaggcgtcccccagtaccgaggcgtctacggtgagggtggcggtaaaggcttgatcccggtcaaccaaagcgagcgtagaatccgaaacggtgagtacggaaggggcgggcgtttcggccgcggaggaaatggcgctgacggaaagcagcatgctcagagccaggagaagggagagggtccggactgcgcggtggatacgcatggtcatggtcgaggcctccttcatgaaatgtggttctcaagcttcctccatggaagaaatcttactgctgttgctgcaccggaatcgatcccccttcctgtaacagtactatgacaataggatagcatggggtggaaaaaacgtcaatataggaaaggtgtagatgcaatttcttgtatatattttacaatggcctgctgtcaaaagcatgcggagagagaaacagagtgaaatccagattttgctggaaagcagtttgaaaatacggtaaaatatcccccaaagggctggccgtgacacccgcggagccggagcacaacggaaaggacggaagggacatgctgtatgagacaatcgcgtttcccgacaatgcgccgctgcagtgcagtatcgtggaggtggaggaatacccctttcatatgcacgacgacgttctggagatcatgtttgccctggagggctcctttgagctcacagtggtcaacaacgtgctggacatgaaggccggggatatttacgtgagctgtccgcgggagctgcaccggctctgcgcctatccccacacccgggggacggtgatgctgctgcacatcaatgtggaggcataccgggcggagtttccggacctgcggacctaccagtttgccaacagtgccctggagaacaataccgcgggaatccaaatgctgggcagctatctgaaaaagcagctccccaggctgctggaccggacggggacggagacggctgcctacagggaggtgggggagaagattctcaacactctcatcaaggagttccagtgctattatctgggcagcggctttcccgagttcaacaacgcctacaagggaaacgagctccagctccggcgcatccgccggatcacggactacatctaccgcaactacaacaagcctatccgcattgaggatgtggcggccatggagcacatcagcgccaaccacctgaccaacattctcaagaatggctgcggcgtgggcttccggaccttcctgaacatggcccgtgtggagaagtcggcggccatgctgctggaggggggcaaggggctccagaccatcgcctacgaatgcggcttttccaagtacaaatatttcagcgacagctttgaaaagagctttcgcaccacgccacagcagtaccggcgcaggtaccagagccgcaccattgcggtgcaggcatatagctgcagggcactggaggggcaggagctggagctcctgctgcaaaaattctgccggaagtcggaggagatctcgctggactggggcggacggtatgaggagaagcccctccggaggccccggtgcgtcagcctggcgggtgccgcctacgaccacatcacctgctttccggagctgcggcggctgcgggaggagctggggctggacaccgttgcgcttgatctggactttctgcgccgttaccggaacagccccagagtgctgaactatatcctgaatgatctgtggtcgctgagaatgaggctgcgggtctgtgtgccgccgggggagccgctccgggggctgagggaggagttggagcccctgcgggagcggtttctgcggcccggcggtgaactggaggtgatcgttccggcggctcccggggaggaggagcgtgccaggactctggcggaggccctgtccgccggccggcttccggtgcgcgtcaccggggcagagcaccggccggaagccaatgcgctgtatggctccggctatatgccgggctacctcctccacaccatggcttcaagccgggggagccgtatgccccggctcacgctgctggacggggattcgggtgtggccctgctgaccccggaggggctcaagcgcccggtctaccacctgctctccctgctggagcagttgggcgacacggtaatcgcccagggcgatatgtacctggccgccaagcagtccgggagggaggacatccaggtgctgctctaccactatgacgcgtgcttcgacacgctgttcgagggtggctcccgggtcgaggaacaggccccctttgtggagttgatgaaggatcacgactacaaccgggaggtcacactgagcgtccggggcatgacggggcggttcgccatccggaagtaccggcttacctctgaggaatacgcatccaggtaccgggatttccccctgccgctggcggatagactttccgcagagacgctgcgggtactcaacggaacactggcccctgaaatgtccctgaatcttctggagctggacggcgcctaccatctgaccctcaagctggccccctttgagatcctgctgctgtgctttgaaaaactataacgttttcggattgcccgtcctaatcctgtggaattctttttatagcaaaaattgtgggttttcatcacattgtttgaaaaattccagtgattttcctcgtttgaaaacctatacaatataaacagaagtacagccaactggtcgtcagttggctgtactttttgttgtatttttccgggatgcagccggttttattttagcagaacccccaaaatatccgcagggaaggggctatttttctgtatcaagttttctatacttaacatatgaagattgcaatcggaataaaaaataggtcgagtctggtctaatttaaagggaaaggagccttttgccgagggagaaggaaaacagatgtaacccatggatttcgaatatgcgcttgaggctgcgggggcactgccgtcctgcggcttgaacgaaaggcctgtggcgtttccggtccccgcgggtcggaggagggactccggtttgtgtgcaggcggagtcccggacagggaacggtcggcacaggccgaccaataagtagaggaggattgtccatggaaaacaaagaaaagaaaatgctgacaacagaggatctgaaccggacgctggggaaaaaggagctgtactccatcgccttcggccatgtgatcggctccggcgtgttttcgctgatcgggatcggcatcgggtacacgggcaagtcggcgtggatcgggattctgctctccgccgtcttcattctgctccaggccctgcccttcatcgtgatggcgggtaccgcccgcttccgcggcggctattactccatgatgggcaccctgtggggtcccaagttcgccggcttctacatcgtcatcttctttgcctccaacgtctccctggccatgtacgccatcagcttcgcccagtatctccagggcgtgctgccgcaggtgcccattgtccccgtggcggtggcctgcctgaccgtattcttcattaccaacctgctgggcattgagggcgcggccaagctggagatcgtcatggatatcgtgctggctctggccatgacctgcttcatcgtgttcggactgcccaaggtggactacagcaccctgtttacagtggactttgcccccgccggccccatgggcatcatcacctgcgctgtgctgctgacctgggccaccgccggcggcatcgacatggtcaacctgagtgcagaggccaagaaccccaccaaggatctgccccaggtcatcctggcggctaccattgccatcgcaatcttctatgccctgattgccatggtggccggcggcgtgctccccgtctccgagacggccaaccagcctctggacctggtggccagggcgatcatgccaactcccgtgttcctgttcttcgtcatcggcggcgccctgttggccctgactacgactctgaacgccaccttcgcatggatcaccaagcccatcctacaggcctgcaacgacggctggctgccccataagatcggctacattcaccccaagttcaagacccccgtcattatcctggtgggcttctacatcgtgggcctcattcccatcctgaccggcctgcagatcagcatgatcgccgacaccgccgtggtgctcagcaacattctgttcgccttcatctgcttcggcaccgtatttatcccccagcgcatgccggagctgtgggaggtctccgccttccgctgcagcaagagcaagctctacctgaagtccattctgggcggcgtatcctgcgtggtcatggtgctggtgctcttcttccagatgagcatgccccaggcggtcattctggtcatcatcaccattgtggggattctcttcgcccagctccgctacagaagcggcgccgtcaagcccgtcaagagctatgaaaagctgtaatgcagggatcgactattttattcagaaggagttcttattgtatggacagaacatatcagcacatatttacccctctgaccatccggggaatcaccctgaaaaaccgcattgagatcgcgcccatctccgtgttcgacctggataccaccccggagcgccacccctccgagcgggatatgcagttcttccgcatgcgggccatgggcggcgccgccgtagtcaccctgggcgactgtattgtcgaccccagcggcgaggactccggcaagctggcctccccaaagatcctggcggggcacgaggacaacctgcccttcctgacccgcatcgccgacgagatccaccgctacggcgccgttgccagcattgagctcaaccacgccggcatgctgcgggccagcgcgggcgtccaggcctggggccctgactacatcaactttgacgagaccaagaccatcgcccccctgtccgaccagtccgcctccgatgagccggtctaccgcaagggcgaggtgctcttcatgaccgaggagatgatcgagaccgtggtggacgcctttggccgcgccgccgagcaggccaagacctgcggcttcgagatggccatgatccacgccggccacggctggctcatccaccagttcctctccccgctgaccaaccaccgcaccgaccgcttcggcggcagcctggagaaccgggcccgcctgctgctcatgatcatcgaccgtatccgccagtactgcggcgaggacttcctcatcgaggtgcgcttcagcggcaccgagtacgtggagggcggctacaccctgaaggagggcgtggagtttgccaagctgatggacggcaaggccgatctgctgcatgtctccgcctgcaacttctacttcccggagaccgagtgcctgatggtgcccggcatgttcaaggaggagggccacaacctctacctggccgagaagatcaagaagcacgtgaagcactcccatgtggtgagcgtgggcgcccaccgggatcccaagaagatcgaggatatcctggccgccgggaaggtggacatgatcgccgtctgccgcgcggtcaacgccgacccccagtttgtcaacaagctcaagaggaatcaggaggaggagatccgcccctgcctgcgctgcaacgcctgcatcgccaactaccagacccgcatcaccaagtgcgccatcaaccccaccctggaccggccggaggacgaggtgttccccttcctgcccaccacgcccaagcgggtgctcatcgccggcggaggccccgccggactggaggcggccattgtcgccaaggaccgggggcatgaggtcatcctctgcgagaaaaccggcacgctgggcggcctgctccgctacgcccggaaggtgcccttcaagcgggagacccagcagtatgtggattatatgattgccaaggccgtccgcgtgggcgtggatatccggctgaacaccgaggtcacccccgagctggtaaaggtcatcgcccccgacttctgtatcgccgccgtgggctccaaggccctgattccccccatccccggtgtggagaaggcccatcccatcatggacatgtatgacggcaaggtacaggtcgggcagaaggtggtcatcgtgggcggcggcctggctggtaccgaggccgctctggagctggccatgcagggcaagcaggtcaccatggtggagatgggcattgacgtggcccgcgacgccaactccatccacaagcccgccctgatgatggagctcaaggatcacgccgagcaggtcacgatcctgcgcaggaccacctgtaccgggatccatgaccacggcatcgtgtgcagagacgcggacggcagggagctcacgcttgacgccgacaccgtcatcctggccgccggtatggcgcccctccgggcggaggccctggccctggagccggtctccagcgagttccgcatggtgggcgactgcaagcggccccgccagatcctggaggcggtccgcgagggctatgacgcggccatggaggtctgagacggcatcctgacgccccaatgagagaagatcccattccggggcccggcacatgtgccgggccccggaacttatttctggaggagaaccgcgcaggcaaacaagaccgcctccgctcataggcggaggcggtcttgcagtgtatccggcggaacgccgccgctatccggtcccgggcaaagcaaagcctggcgcggcggactcaccagcactccagctcggccagcaccgccggggagtcggtgaggatttctaccggctgggaaaagtccagagcgaacaggcccatggacgatttggcgtcgatagcgatggcgccgtccagggagcggacctgaacctcgtcaggaacggagtaggccaggcggtgaaggcgctccagcgcctccaccgaagggactttcttctgcacaaccacggcgtgtcctcctgtcgtcagttcatcagtgagcacaccagctcagtgtagccggcggggtcctccagaggcaggccggcgatgagctgagcctgggcgtagaggagcttcgcgtaccgggcggccttgtcccggtcgctctccaccgcccggctgagggcggcgaaggccgccgagtcggggttgagctccagcacccgctgggccttcatgtttttggcgttctcggggtccacccgctggaaatacttctccatctccagggtgatggggccgtcggcggtgaggcacaccgcgccgctcttcaggattttggacacccgggcctccttgatggcgccgcccagggtctccttgaggaagtccagcacgggcttgctctcctcggccttctgctccagggcggccttctcctcgtcggtctcggggagggcgtcggcgtcgtccaccgacttgaaggccacctcgtccaccgcgcccagggcgtcgatgacgaactgatcgggctcgtcggtgaggtagaggatctcatagcccttgtcccggatgcgttcggcctgggggagcttggcaagctgcccggcgtcctcgccgcaggcgtagtagatgtacttctgctcctccggcatgcgggccctgtactcggccagggaggtgagcttgccctccttggaggagaagaagagcagcagatccttcaaaagctccttatgggcgccgtagtcgctcaccacgcccaccttgatctgggtgccgaaggccttccagaaggtctcgtacttctcccggtcgtccttttgaagccgcagcagctcggccttgatcttcttctccaggttgcccgcgatcaccttgagctggcgggtgtgctggagcatctcacgggagatgttgagggagaagtcctgggagtccaccacgcccttgacgaagcggaagtgctcgggcagcagatcggcgcacttgtccatgatgagcacgccggaggagtagagctggaggcccttctggtactcccgggagtggaagtcatagggggcgtgggaagggatatagagcatggccttgtactccaccgcgccctcggcggacacgtgcaccacgctcaggggatcctcccagtcgccgtacttctccttataaaactggttgtactcctccgccgtgacctcgctcttgggccgctgccacagggggaccatggagttgagggtctcccactcgtcgaagtcctcccactcgggcttgtagtcgtcgccggcgtcctcggggcggggcttctggcgggacttgtgcatgagcatgacgatggggtagtggatgtagtcggagtattttttgaccagctcggccaggcggtactgctccaggtactcgtcgtagtggtcgtcctcggtgttctgcttgatgtggagcacgatgtcggtgccagcgctctccttcccgcagggggtgagggtgtacccgtccgcgccgtcggaggcccactgccacgcctcgtcggagccgtaggccctggaggtgacggtgacgtggtcggccaccatgaaggcggagtagaagcccacgccgaactggccgatgatgtcggtggtgtgctccccgccgttctcctgcttggccagctcctgcttgaactggagggagccgctgcgggcgatggtgcccaggttctgctccagctcctccttcgtcatgccgatgccgttgtcggagatggtcagggtgcgggcaatctggtcgggggtgagggtgattttgaagtcggagcggttcagccccacctggtcgtcggtgagggccttgtaggccagcttgtccaccgcgtcgctggcgttggagatcagctcccgcaggaaaatctccttgtgggtgtagatggagttgatcatcagatccagcagccgcttggactcggccttgaactgtttctttgccatgacaatgcctcctgtatctcaaacagttttgtaaacaaagagcgttagcactcaaactctatgagtgctaacgctatcataatccttcgcatgaaaaattgcaagagggttcaaggattgtttacaattcggtgggagcggatgtgccaggacgcgccgtcccgttgacccggccgatctcctccggggtgaatgcgtgcggctccgccgccggggcggagggctggggagcagggtcagccggacagagctccgggaaggcgctgctgagcagcccccggaggcgatccagggggatggggcgctccagggtggcggtgggggaggtagcgccgtccgcatagaccgggaagaggagcacaaggtggtcttccgtaaggtagaaggcgttgacatcccagtagctctcaaaatatgcccggccgtacgggccgtcctccagaccgtccagagcatccagaagagcgtccatccccttctcggccggaacccgcagtaaggagtccagggtaagggctttgccggtggacaggtcaaagaggctgccggagacagtgaccgcgggctcacccgccagcgcctcggtgcgctggtagcggacgctcaggaagcggtcgcaccgctggatggtgtagacgctctccacggaatagtccccgccgggctccaggcctggagtgctccagtactcccggcccttttccagccacccctctcccagtatggagaagtcttcgtttagactctgccagacggggttctccccggcgttttcgatgcagggcatgacaaagcgcagggagaccaccaccccctccggcgcgtccgcgttggattcctcgccggcatagtcccgctgaaagacctgctcgccccacaccggggcgggcgtctccggccggatcgaaccggcctccggcggcggggcggtctccgccggggccttcggtgtgcaggcggccagacagagggccagcagcagaacgagcgccaggtatcgtttcacatcaatcccgcccatctaagtcaagattcttctcccggaatacgatgcggaaggaggggatgttgtcgaagcccaggttggaggtctccactgtgaagcggtaggcgcgctccgtcaggacggcggtcaccaccacgtcctccccgtcctcggcgatggtgacatcccgcaggaagtggctgtcccggcccagggagcccgccgggaaggaatagggatagaggtcctttggatatgtcccctcaccgatccattcctctatctcatcagtttccgcgccgccgctctccaggcaggtgttgtggaggcggagggtgaacacccggcggtctggatcaaagctggtctcgaagctggggatgctagtggccgccgggaagaagctcccgaagcgctccatgctgtccccgttggggatgaaggagaaggagaggccgtcggcgtcgatgcgggcgtcgtacacctgctcaaaccgggtgctttcagtatcggggcggccgttctcccaccagcccatgtagaagggctccgccgggtccagccaggtttccacagtatccagcgtggtctgaacggcgtcctccggcacccggccgtaggcgtccaccagcacccgcacggtacccgactcgggcagccctttccagggggtggaggagctgacaccgccggtggtaaagcgcacctcgccggggccggtgatctgataggaagcatcggcgtccagacccgtcaggtacacccggcggccggtttccccgaacacccagtccagaaggcggggttcactgccgccgtaggtgtattccaccacaaagtcgtccagatagccgcgtacctccgtcaccgtatagccctcggcctcatagagggcgggcagttcctcctccgtgaccggggtgggcagctcggcggtgggggcggggctggccgcgccgggagaaggggcgggctcagcgggggcggccggggcgcaggcggccagcagcgcggccagggccagggcggccaggccggaaaaaaggcgcagtttcataaaaaaatcctccttggcgtctcctatcataccataggggacggaaaaaagggttacgggggcggtttcaatccggttacaagaaactacgattgcccttttgcaaaaaatcacatataatagaggctgctgattatgagagggaggcaagttatgattctgaacgtgctggccgtaggcgacgtcgtgggggacagcggcgtggagtacctgtcccgccatctccgggggctgaagaagctcaagggcgtgcatttcacggtggtcaacggggagaacgcgtccggcgtggggattctgccccggcaggcccgggagatctttgacgccggtgcggatgtggtcaccctgggcaaccacacctggaaccgcatccagatcgccgactttctggaggatgaccggtataccctccgccccgccaactacaccagccgggtgcccggccggggctggggcgtgtacgacggccccggcggcgtgcgcatcggcgtcatgaacctgattggccggtgcgagatggacagcaacttcgacaaccccttcaccaccgccgaccgggtgctcaggcggatggaggggaccgatgtggtgctggtggacttccacgccgaggccaccagcgagaagggggccatggggtattacctggacggccgggctcaggccgtgtggggcacccacacccatgtccccaccgccgacgggcaaattctccccaaggggctgggctttgtcaccgacctgggtatgaccggcccggccgagagcgtgctgggcatccggccggagcaggccgtcaaccgctttctgggcgggctgccccgccgctttgagcccgccccgggcccctgcaagctggagagcgtactcttctccatcgacaccgaccagcggcggtgcgtgagcgtcgagcgggtggacatccgcgcgtaatatcccctgcgagaaaggaaccgagacatctatgctgacaatcatccacggggcggatttccacctggacgccccgtttgccgccctgcccccggacaaggccagggcccgccgggccgagcagcgggagctgctggaccggctggccgggctggcggaggagcggcgggcggacgtggtgctgctctccggcgacctgctggacggcggccagacctaccaggagaccgtacaggccctggcccggaccctggggggcatccccgccccggtgttcatcgccccgggcaaccatgactgctacggcccccgttcggtgtacgccggcacggcgtggccggacaacgtacatatcttttccaccgtggcggtggagggggtggagctgcccggcctcaactgcgtggtgcacggcgcggccttcaccaccccccaggccgaccgctctcccctgatgggctttgccgccccccgggacgggcgcatccacctgatggccctccacggggacgtggaggggaaggggcgctacggtcccatcgccctggaggacatcgccgccagcggcctgacctacctggccctgggacacatccacgcctgctccggactgcagaaggcgggggacacgtactgggcctaccccggctgtcccgagggccggggctttgacgagctgggcgacaagggcgtgctggtggtgacggtggacgacggcggggccgtgtccgccgagttcgtccccctggcccggcggcgctatgagatcctgaccgtggacgtgaccggggcggagagcccggccgccgccctggcggcggccctgcccgcggacgccggggaggactgctatcgcatcgtgctcaccggagagcggggggaggagccgccggagctggccgccctcgccgccctggccgagccccgcttttacagcgtgaccctccgggaccagacccgggagcggcgggcgctgtgggcccggtcgggggaggacagcctcaccggcctcttcctgcgcaccctgcggagcggggcgctggagggggacgggttggagctggccgcccgcttcgggctggcggccctggagaatggggaggatccctgcctatgaagattttgaagatgcgcgccactttcggcaagctccagggcgcggagctggcgctgggggaggggctgaatgtcattgaggcccccaacgaggggggtaagtccacctggtcggccttcctgcgggccatgctctacgggatcaacaccaaggagcgggaccgtcagggctacctcgcggagaagaaccgctaccagccctggagcggcgcggccatggaggggagcgtggagctgctctggcaggggcggtccgtcaccctccgccgggggcccaaggggagcaccccctttggccgctttgaggcggtgtataccggcacggcggagctggtgcccggcctcaccggggacaacgcgggggagaccctcaccggcgtgccccgggaggtattcgagcgctccgccttcgtgggccaggggggcgcggccatcgacggcgcccccgccctggaggcccgcatcgccgccctggcctccagcggggaggaggatgtgtcctactcccaggtagagcgccgcctgcgggactggctcaaccgccggaagcacaacaagaccggcctgatcccccggctggaggaggagctggccgacgtggaggagaccctggcccgccagtccaaggccttccgtctggcccaggaggccaggcgggagctggagcggctccaggccgagcacagacttctggagtccgagcgggacgcccacctcagccgggccatggcccagcgcagggcccggtgggaggcggcccaggccgcccttgccgaggcccaggcccaggtggacggcctggaggccgagcgtacccgccacggcgcgcctcccgaccgggataccctgaaaagggcccaggaggagctcaacgccctcaataccctccacgccaaccgcaagctggcggagagccagctggaggaggcccgggcggcggaggcggaggcccgggcctccgcagaggatcccctgttccccggcctgacccccgacgaggcctgggagcgggccggcgccgacgcggaggcggcgggcagccggcccaaaacagcggggctgtacgcgggcggcatcctgctgctggcagtgggcgcggtggggctcatagccaccctctgcgggacgctgcccttgcccctgggggggagccttccggccgttttgacgacggccggggtgtccgctgctctggctatcgggggggcagccctgctgatcgccgccgggctgtggaaaagacgatttgccgccggagcggcagagctgctggcacgctacggggcggagcggcccgaggatattctgggccgggccagcgcctaccgggaggcgtgtgtggtggcggcggaggcggccaaaaagcgggaggcggtggagcaggccctggccggacacatcgcccgggacgaggaaacccgccggaggctgctggagctggtgcaccccttcgcccccacggtgacggacaccttcggcgtatccgccgccctctcccgggcgctgaacctggacgagcgcctgtccaccgcccgggtaaagctggagggggccagaaccctggccgacagcctgccccggcccgaggaggtctccggcgggacggacgtggagccccgctttgaccctgccgagaccgcggcccgcctgagcgcggcggagggagagctctcccggctgcgcagcggcctggccatggcccagggggagctgaataccctgggcgaccgggaggcccttcagacccggcgggaggccatccaggaggagctggaccgccgccgggcggagtacgacgccctgggagcggccctggccgccctggagcaggcccacagcgggctccaggcccggttctccccggccctcaaccgccgggcgggggagctgctggcggagctcaccggcgggaaatacgacaaggtggcccttacccagcagtttgaggccctggcggaggagcgcgacggcctccagccccggcgggcgctgaccctctcccagggcaccgccgaccagctctacctggcggtgcgtctggcggtgtgcgagctggtgctccctgcggaggagccctgtcccctggtgctggacgacgccctggccaacttcgatgacggccgctgcgccctggccctggaggccctggcccggctgggagaggagcggcagatcctcctgttcacctgccacagccgggaggcgcggctggcggagggccgggagggggccgccgttctgcgcttgcaatcgtgagcagggcggggtataatagaacgatcttttttccattcggatggagctgatacctttggcaaagaagcaaacacaagacggggaggagcaggaggagctctccagcggcgactccctcaagctggatctctacttctggctccaggccctggtgctggctctggtggcgctgatccttctcttcaccttcgtggggcgcatcatcggcgtggacggcagctccatgtatcccacgctgcaccacggggacatgctgctgctccagagcgtcggctatgagcccaagcagggggatgtggtggtgctcaccaaggccttccgcgatgtggacgggcccatcgtcaagcgggtcatcgccgtgggcggacagacggtgggcatcgactacgacgcgggcaccgtcgcagtggacggacaggtgctggacgagccctacatccatgaggccatgctgtgtcccacctatgagaaccagacccatattgaggtgccggagggctccatcttcgtcatgggcgacaaccgcaaccactccagtgacagccgggacgtgaccctgggcaccgtggacgagcggtatgtgctggggcgggcggtgtgcgtcctgctgcccttccaaaacttcggcatgatccccgaaggggagcagaccagatagcatgcaaaacgcgggccgcgtatccaagagatacgcggcccgcgttttaattcaggacaggcggaaacgctccagcttttgatagagggcggtgcgggagatgcccagcacccgggcggccagcgcccggttgccccgggcataggccagggcctgctccagggcggcgcgctcctggtcggccagggtggggggcggcgcggaggcggggccggacggcgacgccgtccccgccagggggtcggtgacgccgaaggcctcgttgtagctgcgctggccgatggtcagctcgtccaccacgtgccgtccggtgatctgcaccccgtcgtagaacaccagccagcggcccaccagattcttgagctggcggacgttacccggccaggtgtaccgctgaaggtactccatggcctgggaggtgaggcggagccgcccgcccttttgggcgcagaggcggtcgatgagcaggggaatgtcctccggccgggcccgcaggggcggcaggtagagttcgatggtggacaggcggtagtagagatccgcccggaaagcccgccgctcgctcatggccagcaggttttggttggtcgaggcgatgatccccgcacgcagggggatgatctcacgaccgcccacccgctcaaactcccgggactccagcacccgcagcagcttggactgcatctgcagatccatgtccccgatctcgtccagcaggatatccccgtcccccgccagttgaaacttgcccatccgggcctcggtggcgccggtgaaagcccccttctcgtggccgaagagttcggattccaggagctgctctgggatggcggtacagttgatggtcacataggggagggggcggcccccgtggcgctcggcatggatgccgctggcgatgatctccttgccggtgccggtctcccccagaatgagtacgctctcaccgctgtgagcggccttccgggccttgtccagcaggtcggccacccgggggctctcccctacaaaatcctccaagcggtagccgctgtccacccgggccagatcctggtagaggccccggaagccggcggcctggtcgctgagctgggagagcacctttttcaaccggcccaggttgcgcaccgtgatggtgcccaccacgccgatgacccgctccccgtccaggacgggaaacaggctggagatacagggccggccatggagctccagaaagagatcgggccggggttggccggtgcgcagtacctcctcgaagggggagagctggtccagcactgagatatgctgccccaccaccgctgcccgctgggacgggtcggggaaggagctggcgctgatgtagaggatgcggcagtcggtgtccaccagaatggcggtgtcgaacaggctgtccagcatccggtccaggacgccgccccgggtgtgcagctcctggcggctgatgtgcagagtctgcatgtcctcaccacctgttcataatctgaacactattatacaatatgtacggaaaaaagacaagacagccgggcggaatggggggagaaggagggcagaagtcccctgtggggcgggggttccgggccgtgcggcgcatttggcacggggattgcttatgaaaatagacgtggatacaaaacacagaaggagtgtttatcatgagcaagagacccgaactgaccgctgctgagcgcgccctgccctacgctaagttttacgacctgcctatcacccccattccggaggagaagctggccgtgctggcggctggccccatcgatcccagcctggcgctgaagatcgaggaccgcaacgacctgttcaagcccggctatctgccctgcgagatcggttactgcgtcatgcccaacggcaccggcttcctggccaaccgcaccgagatgcccggcgtgactcctgagatgttcgagtggtggttcgcctggcacagcctggaggatctccgctaccgcatctgggacccggaggatcactactatgcccgccagcagatgcgggagaagaccctggaccagagcctgcccatgcgggagcgcacctggggcaccgtccaccatgtgctggaggatatcggccccggccccgacgagctggttttggagttccgctatccccacgagctgggctatgaggaggagaaagtgggcaccgacgcctgcgccgccctcatctgcgccaacggccacggccccgtccccggccagggcgtggcggccatcatgacccacttcgtccgcgagatccccggcggcatcgagctgcgctcccgcttctggatcggctacggcctggtggacggcaggctggtcaagctggtgcccgacggcgtgtccgtcccggaggaggtacccatgggcctgttcgcccacaacctgaaggagttcggccacctggccgccatcctgcctcaggtctacgccgagaacaaggacaactggtaaggaggagccgtcatgtgcaagaagagcaaattccctctggtatttaacattttcctggccttcttcatcactttggtggtgaccatcttcgtcaaggccggcgagggcgcgctcaccccggagagctttatcatcggtatgattcagggcttctgcctcaacatgaccctggagaccatcatcgatctgcccgccatgggcaacaagttcgtccgcgccctgggcgtgaagaagatggaaggccccgccgcctacttcctgcgcctgctggccatcgtgttcgtgattgtgctgctcatgagcttcctgctgatgttctgcgagatcggcttcgccatgggcgcgggcttcttcggcttctggatcaccaaggtgcccgccatctttgtggtggcctacatcaccgccgccatcgtcttcatcccctccatgaaggcgactgccgtcatctgttccagggaggactgaatcggatgacacaggaggatgtctataaaccctcctgccgtcgaaaggaccttttcgataggcggtaaaacatacccccgcgtgctatggcacgcgggggtatgttttacccggtggcggcatcccggcgggagagccgccgtacggccagcagagagaagagcagaaggtagaacccgcagcccgccagaaaggaggggaggggcagggccatctgggggttgttggcccgcatacccaggcagagcagggaatagggaaaggcggcgccgaagccctggctggtaaggagcaggccgaagattccacccaccagggcgatggctaccggcggggcgaaggcgcggatggccagactgaggtagagctgtacggcgcacaccgccgtacagcccagggcgccgaaggccagccagccgggcagctccgggggcaggggggcggagatacctgccagcctgccgctgaggagaaagagcaggccgatgagggccatggccagggcggacacccccacgtccagcagcagcttgcccaggtagagcgcacgcactggcaccggggcggtgagggcagcgttccagttgtggtcggcgtgctccagccgccactgccaggcgcagaacacgccgaactgggcggggaggaagaacatggaggcaaacagggtgtgctgggtccacaggctgtaccagccggcgtccagcacctccaggttgcccaggtagttgaaggtgcccagcaccgcgggaaagagggggagcaccaggaaggccagccacaccggggcgcggcggcacttcatcagctccgcccggagacagcgcagtaccatgcctcatacctcctttcggacgaacagagtccgtcccacagtgagaaagagggccgcccacaggcacaggagggccagatccaggggctccggccgccgccaaaagaaagcggtccagcgggtggcctcatcccattccatccgcaccagagagagcaggccgtaatacccccaggggacgcaccgctgtacccacacggggaagagcagggccatgagtcccacgaagctgccgaagatgccgcataccagagccacggcctggttggcgaagcggagggacagcccctgctggagggcgtagagggtcatggacaccgcccaggacagggcggtaaaaaccacgaaccgcccccagggcgtcccgccggggaagcccatggcaaggcccagggccagaaagagggcgccgcgcgccaggagcaggccggccagcaccagggcgccccaggccagcttggcggcgtagagacgaccgggggtgacggcagtctccagcagcttgagggtatgccccctgtgctccagctcacagctccggctggcaatcaccgccacgccgatagggagcataatggcgtccaccattgccaggttgtagagcagaagcatccacccctgagccagcgcctccgcatcctgccgggtcaggtaggccccgaaccacaggagctgggcggccagcaggccggcgcagaccagggtgagcttgcgccggcggcacttgcagaactccagggccagcagcttcacaggctctcctcccttccggtgagctccagaaagaggtcttccaggctcttctgccgctcctccatgcgcagaagatccacccggtgggaggccagaaagcgggagagactggctgcatcggcgtcggagagcaggggaagggtgagccagccgtcctccagggtgcaggggacacggttctcccccagcaggcgggccgccccggcgttgtcggtggtgcgcagggccaggcgggggcaactgcgggcgtggagcgcggacagggtgtcctgaaacaccagcctcccctcccggatgatgcccacgtggtcggccatctggtcgatctcgctgagcaggtggctggacaccaccaccgtcatgccgaaccggccgggcagggagcggatgagctcccgcatctcctggatgcccgccggatccaggccgttggtgggctcgtccaggatcagcagcctggggaagcccagcagggcggcggccaggcccagccgctgcttcatgcccagggagtagtgggccgtccgcttgcccttctggccgtccagccggacgatgcgcagcacctccccgatgtcccgctccggcgccccgcgcagggtttggacgatgtgcaggttctccgcgccggtcaggtggccgtagtagctggggctctcgatcaggctgcccacctgactgagagtctccatgcgggtgcggggacccatgggccgcccaaagacggcgatctcccctgccgtgggcctggccagccccagaagcagcttgagggtggtggatttgcccgccccgttggggcccagaaatccatagaccgccccctccggcacggtgagatccagatggttgacccgcagagccgggccgtactgtttgcacagcccgcgggtttccacaacagcgttcatgtgaggacacctccttgttacaccgcaaggatagcgcccctcccttacatcccgatgaagccatccttacgcttaccttacgttttccggccggggcgtgcaaaggggaagccagttgttgtataatagaaaaacagcgggaacagggcgcggggccatgtgctttctgccctgcgcaagtcggcaggggcggcccttctggccgcccgcgggcgaccacgagggtcgtccctacggggcatttgctccgatcagaaaggactgggaagcaaggatggcctatcacattttactggtggacgacgcgccggagctgcggcgcatggtgggagagctgctggagggggcgggctatgccgtcaccctggcagccgactgtgcccaggcccgccgggcgtggacagagtcgcagcccgacgcggcgctgctggacgtgatgctccccgatggggacgggttttccctgctggaggagctgcggcgggtggggaacggcgtgccggtgctgttcctctccgcacgggacgaggatgaggctcgcctgcgggggctgggcctgggggcggacgactacatcaccaagcccttcctgcctcaggagctgctgctgcgcctggcggcggtgctccgccgggtgtacggcgctggggcgggggaggtgctgcgcctcggggcagcggaggtgcactggggcaccggcacggtgcgccgccccggcggcggtgaggctgccctcaccgccaaggagtacgccctgctcaaaaagctggcggccaaccggggaaacatcgtcaccatcgacgccctgtgccaggccctgtgggaggggcccatggtgggctatgagaacaccctcatggttcatatacgccgcctgcgggagaagctggagaccgacccctcccacccgcagtacctgctcaccgtccgggggctgggctaccgcctggcccgggaggagcggtcgtgagggggcgcaatctccgccgtaccctggtggcggccggcctggtggcggcctcggcggtgctggtgctggttctggcggtggcggggctgctggcctttattgtcacctctgccggggcgggcagctcgtggaacgcctccatggacgagctctccgccgccctggtgcggacggaggggggctatgcctttaccggcggggagtacctggcggagaaggagctgtgggccatgctggtggacgagggcggcgccgtggtgtggcagcagggcaaacccgccgatgtgcccgaccgctactcccttaccgatgtggccgcctttacccgctggtatctgagcgactacccggtacaggtacgggtacgggaggacggtctgctggtggcgggcggcccgaaggggagcacctggaagcaccccttcgccttggatatggatgtgctgaagaccatccctttctggttcgcggggctgtttctgctggccctgctgggggtgctgggcctcaccgccctggtgctgggccgccagttccggcgggaacagcaggagcgggactttgcccgctccgactggatcaacggcatctcccatgacatccgcacccctctgtccatggtcatgggctacgccgggcagttggaggcggacccggtcctcccgccccggcggagggcccaggccgccatcatccgccgccagagccagaccatccgggatctgatcaatgacctcaacctgaccatgcgcctggactacgccatgcagcccctgcggcgggggagcctccaccccgccgccctggtgcggcaggtggcggccgacgtgctcaacggcgggctggaggagcggtacgccctggcggtggaggtgccgccggaggccgaaacccttacgttggagggggacgcgtccctgctgcggcgggccctgcttaacctggtgaacaactgcgtgcgccacaacccggagggctgcgccatcaccctgactgcggcagccgagggggaagtatgcaccctgagggtggaggacgacgggggtggtggtctgccggtcggactggcggaggtcggactggccccggacggcggggccgcccacggcaccggcctcaggctggtggagcagatcgccagggcccatggcggcgcactggagctgcaccgggcggcgcggggcgtcttggccgtcctccgcctgcccctgtgagcgcgcagagcccccggacgccaacggcatccgggggctctgcatgagaaaggggaggtatgggaagaaaacgctactgttggggcggcatgaccgtggccatgccctgtaaaaccacctcgcccgcctggttggtgcacaccgtatccagcttgacgatgttcttctccgcgcggatttcgctcactgtgcaggtggcggtgacggtgtccccgaagcggacgggcctggtgaacttcagctcctggcccaggtagatggtgccggggccgggcagctgcatggccaggacggcggaaatgaggccggcgctgaggatgccgtgggcaatccgtccgccgaaccgggaggcactggccacggactcgttgacatgggcggggttcagatcgccggtgataccggcgaaaaggtacacgtcggtctcgctgatggtcttggagtggctggcgctgtcgcccagcttcaattgctgaatggtcatgatgcggcctccttcttgtatgcgctgacggggatcagaggaacaggccccagatcagggccagccccagagaggataccagcggaatgatacaggtcgtgatacagatgtcgatgtaggactccttgtgggtacagttggacacggccagcagggtgagcaccgcgccgttgtggggcagggtgtccaggccgccggaggagatggaggcgatgcggtgcagggcctccagaacgccggtgttgcccgcagccatttcggcgtacttgggccccagggcggacagggcgatggacatgccgccggaggccgagccggtggcgccggccagcagattgacggccaccgcctcggagaagaggatggagccgggcatgttcagggcgatgctggtgagggaggcaaagccggggaccaccttgaccacggagccgaagccaacggcgcaggcggtgttcatgatggcgcccatagagccgttggcgccctcgttgatggcgggcagcagggtcttggcctggttcaggttcagcaggcaggccaccagaatgccgcacaccagggcgatgacgatggcgtagttggaggccagctcaatgccggcaaagcgattgagcagccaggggaacaggttgagcatgagcacaaccaccaccagggggacgatgccggtgacccagtgccaggagggcagagccttggagtcgtgatccacttccttgtgcttggggtcggggacaaagtgcaggcccttgcggcgggactggcgcacccgccactccaggtagatataggcgggcagcagcataacggcgcaggccacaagggacaggagcggagccgccatggtggtggtgccgtagtagtcggtggggatcaggttctgaatctggggggtgccgggcacggcggtcatggtgatgccgaaggcgccggtggcaatggcgccgggcagcagggtgcggggcaggtcggcggcccggtagatggaatagcccatgggatagatgacgaacaccacgacgaacagggagatgccgccataggtcatcagcaggcaggggataaccactgctgccaccgcgaagcgggggccgatcagcttgaccagggcgttgcccaggctgcgggcggagccggtcagatccatgaccttgccgtacaccgcgcccaggaagaaggcggggaaccattggagcacgtagtcggccatgcccttcatatagtcgccaatgtaggcgtccaggatggcatagccgctgagcacggccaccaccacggcgcagacaggggcgacccagatgatggaatagcccttgtaggccaggaacatcagcaggaccaggcccaaaataatgccgaacagggatagtgacatttggattcctcctctacagatacagaataaacgtcccctctcagatcaaggcagggtgagccccataggttccgggcggaagatgcggggatccatcgcccggaccttgcggatgatgggctggaagtccatctggtccagaatatcccgctgtaggtccacgccgggggcgatctctttcagctccaccccctccggagtgagggcgaagacggcccgctccgtgacgtagagcacgtgctggccgcgtctggccgcataggcgccggagaaggtgatctgctccacctggcgcagcagcttgcgcacggacccctcccggcggatggccagcctgccgtcctccaccgccacgtccagcccgccggcggtgaaggtgccgcagtacaccactcgtttggcgttctgggtgatgttgatgaagccgccgcagccggcgatcttggggccgaatttggagacattgatgtttcctgcggtgtccatctgggccaggcccaggaaggccacgtccagcccgccgccgtcatagaaatcgaactgggcgggctggtccagaatgcagtcggcgttgatggctgcgccgaagtccttgccgccggcggggatgccgccgatggcccctacctcggtggtcagcacaagcccctccaggccctcctccgccgccacggcggccaccccctccggcattccgatgcccaggttggtgactgcgtgggggagcagctccatggcggcccggcgggcgatgattttccgctctcccatgggcagcgggggcagggagtgcagagggacgcgcacctcgccggagaaggccgggttataacgggtgccgaaggtctgcatgtgctcctccggcggggcctccaccagcacgtccacgtagatgccgggcaggcgcaccaggcgggtgtccagggagccgtattccacaatgcgctccacctggacgatgaccgttccgccggaattccgggcggcctgtgcctgggccagggcctcggcgtatacgccctcccgctggaaggtgcagttgcccctggtatcggcatagctggcccggagaatagccacctgaatgggaatggcagggtagaacagcttttcctccccctccagctcaatgagctttaccacgtccccggccgcccgggcggcgtcgttgagcttgcccccctccaggcgggggtctacaaaggtgcccaggcccacatgggtaattacgccgggctttcccgcggcaatgtcccggaaaagctgggcgatcaccccctggggcaggttgtagccggccagcttgttttccgcgcacagccggcccagcttgggggagagcccccagtggccgccgatcaccctgcggcaaaggccctccacccccaggtggttcaggccgcggctgtcgctgtcgccctgaccggcggcgtacaaggcggtcaggccgtggggcccctcgccgtttcgcgcccgctcctccagcgctctgagaatggactccggatgcatcaggccgctggcgaagccgccgaaggtgacggtgtctccgtcgtggatgtactggcgcacggcatcgtgcgccgacaggattttgggcatatttgcactccctttccgctcaccattcctccccgaaaggaggcggcacgggttcggctggtctgcggcccgcgccgttgcagaaagtatacggcataggaagtacatctgtaaaatgaacaatttgataggctgcattccaaaatcagaatagattgcacattattgtagaacttttattgctatatttgtggcatatccacagtatcatgccttttgcgtatggacgaatgcgcggggggaatgctgtgtttcatttttaacaatttcacagtagaaactttgtgcggctttttctggaaatttttttattattcgattatgatagggacagcatcaccgaggacgtggaggtagctatggatattcagcacttgaaatattttgttgaagtggtccggcaggagagctttacccgcgcagccgcccagctttttgtgacacagcccatgctgacccgttccatcaagcagctggaggaatcgctgaatgttctgctcattgaacgcaccagcaagagctttcacctgaccgatgcgggacggatcctgtacgagcgggcccaggagtttctcatgcagtatgaggcgatcttccagaccatggcggacgtgcgctcggtcaagaccggagaggtacggctgagtattcccggggtgctgctggacatgtattttcccgagctgtttgccagctttcaccggcaataccccggcattgacatcagcctggtggaggagggctccaagctcaccgccgcctcggtgggattgggaaaggcggatctgggactggtcatgctcccggtggaggagccgtcccgctttgaaagccaccttctggtcagcgatgtgtgtcagcttgtggtgagccgggagcatccctttgcccagatgcccggcgtacatatccgtgagctgagaggggagaccattctgaccttcagtgaaacggccaccctgcacgacacctttattcagatgtgcggcgagcagggctttgccccccgcattgcctataaaagcctgatgcctggcttcagtttcaagatggtggccatgcagcagtgcatcgccttgctgcccctgccgctgatcctccacgggatgtgcgacaagcttgtcaccgtgcccctggagccgcgcatcgtgtgggatattgccatcatccgcaggagacagggctatcactcctttgccgccgcacagttgttcgaccatattcgcgcccactttgcagagcggaagcccttaatggaaaaggccggcccgtcgtgagacgggccggcctttaggcggttattaagccttccctctaaggttttcgaagggaaggatagtgtgaaagggaaccgtcagggttccctttc

SEQ ID NO: 4230 - DNA, 857 bp, Unknown
  gut microbiota DNA sequence
tgaggctgaaaaacctcagaaaagtttgaaaaaagttcttgacaagcgaaagtgtgagtgctaaaataaatagcacgtcagcagaaaagctgacaggggcgtgtaccttgtaaattaaacaacgtgagagaaacacgaagcaccagaaaggacgagaagtccttctgagcaagcgcaagcttgatgaagaaggctcttgaatagatttctttgaagctatgaattgagcttcgataagatgatttgaggaacggagacgttctttagataccattttattgagagtttgatcctggctcaggatgaacgctggcggcgtgcttaacacatgcaagtcgaacggggtgctcatgacggaggattcgtccaacggattgagttacctagtggcggacgggtgagtaacgcgtgaggaacctgccttggagaggggaataacactccgaaaggagtgctaataccgcatgatgcagttgggtcgcatggctctgactgccaaagatttatcgctctgagatggcctcgcgtctgattagctagtaggcggggtaacggcccacctaggcgacgatcagtagccggactgagaggttgaccggccacattgggactgagacacggcccagactcctacgggaggcagcagtggggaatattgggcaatgggcgcaagcctgacccagcaacgccgcgtgaaggaagaaggctttcgggttgtaaacttcttttgtcggggacgaaacaaatgacggtacccgacgaataagccacggctaactacgtgccagcagccgcggtaatacgtaggtggcaagcgttatccggatttactgggtgtaaagggcgtgtaggcggga

SEQ ID NO: 4231 - DNA, 206 bp, Unknown
  gut microbiota DNA sequence
gccagcagccgcggtaatacgtaggtggcaagcgttatccggatttactgggtgtaaagggcgtgtaggcgggattgcaagtcagatgtgaaaactgggggctcaacctccagcctgcatttgaaactgtagttcttgagtgctggagaggcaatcggaattccgtgtgtagcggtgaaatgcgtagatatacggaggaacaccag

SEQ ID NO: 4232 - DNA, 5889 bp, Unknown
  gut microbiota DNA sequence
ctggacgtgaaagacaaccctgacggttttctttcacactatttttccctccgagatcttcggcgggagggtttatcgacagcctcgggggccgccgaaggcggcccccttctgaaaaggaggatattatgggacgcatcatcgcggtcaactccaactgctaccacggctattccattgagcaggccatcgacggcatcgccgccgccgggttccgctacatcgagctcaccgccaccaagggctggacggagcatgtgttccccgaccagagcttcgagcggctgtggcaggtgaaggagcggctggccgaaaagggcctcacccccttctccatgagcggccactgcaacctgatggacaccgggcgcatccacgactttgtcagcaatatccgcctggccgccttcttcggctgcggctacatcgtctcctccatcggggaggcccatctggcggatcaggccgtggcctccaacgaggtggtggcggagcacatccgcgccctagtgcccgagctggagaaatacggcctcaccctggtgctggagacccacggcgaccacgggagcggcaagatcctgaaggaaatcgtggatcgggtgggctcccccagggtgggcatcaactacgacaccgccaacgcccttttctacggcaacgtggacttgggggcggatctggacgccagcatggacgccatccgctacatgcacctcaaggacaagggcggcgagcggacggtatgggacttccccgccctgggcaagggctggctggacttccccctggtcttcgacaagctggcaaaggcgggcaacgactgccccttcagcattgaaatcgagtttacccaggccggagcaaaggatctggccgagatcaatcaggccgtgaaggactcggcggagtacctcacagcccacggcttcgtcctgtgaggtggcggccatgatcaacatcggaatcgtgggcgcgggcggcatgggcaccgtgcaccacagcaactatctccacctggacggctgcgccgtgacgggcgtggtagacccctcccccgccgggcgggagcaggccgcccagtggggcgtgccctgctatgagagcattaccgacatggtggaagccggcggcgtggacgtggtggacatctgcacccccaccttcctccaccgagacaacgtgatggagagcctctccctgggcaagaccaccatcgtggaaaagccctgcgccctcacccgggcggatgccggggccatgttcgccttggcggaggagaagggggtaaacctctatgtggcccaggtgctccagttcacccgggaggtggaggtgctgcggaagctggtgcgggagggcacctacggcaggcccctggacgcggtgttccagcggctgtccgcccgtccggagtgggcccagggcggctggctctttgacaagagcaagagcgggctggtccccttcgatctgcacatccacgatctggatgtgatcgtctccctcttcggcgtccccgaccgggcggagtgccgcccctgcggcggcccggccatggactccccggagctgtaccgctgggagtaccgctgcggcggggtcaacgtcatggccgaggcgggctggctcaacgcctccatccccttcaccgccgtctggcgggtctactttgagaacgccatggtgatctatgacggcaataccgtcaccgcctacccccacggctcagagccggtggtcttcgacacggaggaggccgtcaaaatccccaccggcatcaacgtcccccccaccggctggtactacgccgagctggggcacttcctgtcctgcattcgggcgggaaagccctcccccctggtgccccgggagcgcatcctggcggtgctgggcctgctggagaccgccctggaggcggacggatcaaactgaaaaacgctccccgcgcgtcaaccgcgcggggagcgttcagcctgtcgaaaaagtcttttcgacaggcttccggactttttgaccctttaaaaaggttcaaaaagtgatttgatccaacgcgaaagggaaccctgacggttccctttcacactatccctccctccgaaccatccggctgggagttttttcagtttcaacgctccccgcgcgccagccgcgcggggagcgttttatcttttctttattcgtgtttgctccgggctcagccgatcgcggccttctgtcccggatgatcggttcccatggtggatttgaggttgtagcgcacatcctccatgtgctcctccatgcactggcgcgccccctccgcatccccctcgatgaccttgctgaacagggcctcgtgggccacaatggagctatacgagatgccgctgttgttgatggtgaactgccgggagatatccagcagctcatagaggtactcgtagacgctggagagcacagcgttgtgggcggccctgaccagggcctggtggaagccgtgggagagcttgcgcaggttctgcaccgactcctcggtgccgtcgttgaccttcttggcctcccgcatgtcccggagcagcttctggatggaggcgatatcctcgtcggtgcgccgctgggcggcgtgataggccgcgaaggtctccagcacgatacgcagctccagcagatcccggatggtgtccgccgtggcgtcgaaggaaaaatccatcttgctgaccaggctctgcgcggaggtgttcttcacataggtgccgtcgccggggctgctgtccagcacccccatatactccaggatcttgagcgcctcacggatggggacacggctgacgttgaacttctcggccagctcccgctcggagggcagcttctggcccgcctgaagctctccatcggcaatcatctggcggatgttgtcaatcacgtactcgtagaagcggccgctgccgtccgcctgcttggttgggagattcatcggactcctccttttatcctcaagtactttttccttattttatcataatctgaggtcaaatagaagggatctctcaaaaaatccccctgccggagtcaaaggcggatgatgccatgcttggccttgctctgggcgtaggcctgctccacatactcccgcagctctggacggaacttggggtgggcgcagttctcaatcaggacatgggcccgctcgtaggccgtcaggccccgcagatccgccaggccctgctcggtgacgatgatctcggtgtcgtgctccgtgtgatccacgtgggccacgtggggcacaatacaggagatggcgccgtccttggcggtggaggcggtggagaaaatggcgatacccgagttgcgggcgtagtcgccggagccgccgatgccgttcatgacggccccctcgccgatgtgggtggagttgacgttgcccgccagatccacctcgatggcggtgttcatggcgatgatgctcaggcggcggatcacctcgggggcgttgctgagctcctggggccggaggatgatcttgcccttgtagtcgtcgatatgggcatagaaccgctcccgggcggagggggagatggtgagggccgtgccgctggcgcaggccaccttgcccgcgtcgatgagctccaccaccgcgtcctgcatgacctcggtatagacgctcaggtgctccagctcggagcgggccagggcggagagcaccgcgttggccacgccgcccacaccggactgcatggggggcagagggttaggcaggcggccggccgccacctcgctctgtaggaatttgacaatatggctggcaatggcctccatatccggggtgggggcagggagatcctggttggtgtcctcgcagttggtgaggatgaccgcggcgaccttgtccgggtcgcaggccagatagggggagcccacccggtcgtcgggcttgaagatctcaatggcctgggtgtggggcgcccgctccagggtcaggatgtcgtgcatgccctccacctccagggggatggcctcgttgacctccaggatgagcttttcggcatacttcaccagggtatcgtcaatgcccaccgagaaggggagcaccagactgccgtcggcccggatggcggccacctcgatgacggccacgtcgatcttccccaggtagccgtttttgatcaggtaggggccgtggctcacatgggtgtccacatattgaatccggtcggcgttggccagggcgcggagatcccggttgccctgaaagccataccgccgcttcatcacgccggagcgggccagcactccgtccaactggtcgcccacgttgcccccggtgattacggtgatgcccagctcctcgccctcctcggcgcgccgggccagctcaaccggaagcaccttgggatagccgatgaccgtaaagccgctgaagcccacggtcatgccgtttttgatatgcgccgccgccgccctgggagtggtcaccttgcgtagcagcgcctcgttgcaaatgcggtccattcggaataccgatcctttcttttttctctaattggtataccattttgaggaaaaaaagcccggcggagccttgcggttccccgccgggcctcaaacgagggctcttgttcagtccgccagctccagaagcgtggcgccgccctggccgccgcccatgcacagggtggcaatgccgtaccgggtgcgggtgcgcttcatgccgtgaaccagggtggtcaggatgcgcccgccggtggcgcccagagggtgccccatggcgatggcgccgccgctgacgtttaccttggccatatccagccccagctcgcggatcaccgccagggactgggccgcgaaggcctcgttcagctcgatcatgccgatatcgtccagtgtgagtcccgccttctccagcaccttgcggacggcgggcaccgggccgatgcccatgatgcggggatccacgcctacgatggcgtgggccacgatgcgggccatgggcttgacgcccagttccttcaccttctcgccgctcatcagcagcagggcggcgcccgcgtcgctgcgcccgcaggagttgcccgcagtgaccttgcccttgccgtcggtgcggaacacgggcttgagcttggccaggccctccatggtggtggccctgggctgctcgtcggtgtcaaacacgatgggctcctttttccgctgggggatcaccacggggacaatctcatccttgaacacgccggcggccaccgcctcggcggccttgcgctggctgtggaaggcaaactcgtccatatcctcccgcgagatatggaactgctcggccacgttctcggcggtatcacccattccgaacacgccgtaggtctcctggggctgggcccgcttggccccctccacgatgggatccaccagcacgttgttgccagtgccgtagccgtaccgggcgttccacagctcgaagtgggtggcgctcatggcctccacgccgccggccaccgccacgtctacgtcgccgcagcggatgtcgttggccgcgcagttgaccgactggagggaggagccgcactgcatcatcagcgtataggccggaatctcctcccggaagcccgccatcagggcgcacacccgggcgatgttggaggccacggcgttctgcttcacctgggcgatgaccacctcctccaccagctcgggggccaagccggtgcgctccatcagggccttgcacaccagcccccccatctcgtgggcctgggtgttcttcagcgtgccgcccatgcggcccacgggagtgcggacggcgtctacaatataaacctcgcgcataaaagcgtcctcctttttgtgttcaggcgcgtgcaatgccctgctctctggcctcctgtgcgacggcatgggccacggtgtcggccacgg

SEQ ID NO: 4233 - DNA, 183744 bp, Unknown
  gut microbiota DNA sequence
ctgcgcatccccaccaccgacctgcccgccgagcaccgggccggcatcccctacggcacggagatcaactttgctttccgccccgagctgatccacctctttgaccctgagaccgagaagaacctgatgtactaagggcattgctctccgccgatttgtagaaccgcccggacaaaccgcacccagaggaggtgagcgatggaactctgaagcagactgttttaccgaaagaaaaagggagggttgcgcattgaaaaagatttttcgagtctgtatagcattgcttctatgtttttctttggttaccccggcattcgccctggacggaatatggcacaatccctatggcattgatgatctctatgaccatgaacccaccgagatataccctctgactcccatcgccggtgagatgatctatatcaagagcacaacatggcctatcgaaccggggcagtctgtatggcttacctataccaaaaacggagagccacagcaggatgtcggcgcggaatggaagtacaacgatgggaataacagctattgggaagctgccatcggcccctttgcacagggcgatgttatagagtacaccgtttatgcagacaaagacgggcagaacacgcagtctatcggccccttctctttccacgtagtggaatgggaaagcgcgcagtctgtagaactcggttcgcaggaagagggtctcgttgttctgaatgtaacgtctgaccaaggagattccacgcctaagctgggactcagcttcccatctgctgatgtcctgcgcttccagttttccccgctgggagatgtggccttcgaggcaggggctgctgactacagtattgaagaggacagcaatagcattattatttccaccagcgcacttgaagtgacggttacaaagtcgccctacggcgtggaagtgcgggatttggataccggcaaacttctgacgcagaacggaggcactggcagcgagctatcctggctgacggatggcgctggcctcgtgaaaaatttccgtgacaggtatgaatcgccttccagtgaaaagttttacggatttggggagcgttataacggaattgaaaagcgtggagaaacggtggatatttacgtttataaccagtaccagaatcagggcgaaagaagctatctggccgtaccgtttttctattccagcaagggatacggcttgtatcttgattccacctattacgctcagttcgatatggcagacagcgatccgaaccagtatacctttaccgtgaatacctctggtgatgatcctgtgctggattattatattatcagtggaacgccggaagaggtgattggcggctattccgagcttagtgggaagccccaggatatgcccaaatgggcatttgggctttggatgtccgccaatgagtgggatagacagtccgaggtgctttcggccgtggagaatgcagaggcctatgacattccggcctctgtagtggtcttggaacagtggagcgacgaaaacaccttctatatcttcaatgacagcacctatacggcaaggccgggcggagaggcgttttccggcagtgactttacctacagcgagaaatggcctgatcccacctctatggtggataccatccatgacaatgggatgaaggtgctgctgtggcagattcctgtgctcaaatacaccgattatgcctgggagcagaaggacaatgacgaggcatacatgattgagcaaggctacgccgtcggagacggcgagggaggccaataccgtatcccatcctccgggtggttcggcaatagcctgcttttggacttcaccaatccggacgcggtggactggtggatgtctaagcgtgcttacctgttcgatgatattggaattgatggcttcaagaccgatggcggcgaaatggtctggggccgcaacacctccttctacgacggaagcgatggcctggaaatgcgcaatgagtatccgaatgcctatatcgaagcgtattacgactttacagaggaaaacaccggtaccggtatgaccttcagccgcgccggcaccgcaggcgtccagtccaccggcgtattctgggctggcgaccagtcttccacctttgatgcgcttcaagattcgatcagcgccggtttaagtgctggtatctctggcatcccattctggggatgggatctggctggattcaccggcgatttccccaccgcagagctgtacaagcgcagcacccaggcagcggcgtttgcgcctatcatgcagttccatagcgagaaggcaaatcccagccccagcgaggaacgtagcccctggaacgtgcaggagcgcaccggagatgataccatcatccccacgttccggtattatgtgaataccagaatgaacattctgccctatatttatagtgaggcacagcagtgcacagaggatggcaccccgctgatgcgtgccatgatgatcgacttcccggaggatccggaagcctacgacctggaagagcagtatatgtttggccggtcgcttcttgtggcacctgtcctcgaagaggggcagaccgtaaaggaaatctatctgcccgagggcgagtggattgatttcttccacaacgctcttaccgccggaggcggcacaaagaattactactgcgatgtggattccatccctgtctacgttcgcaatgggagcattattcccctgaatctcaatgaagattatgaattgggtggctccatcggtaacgatgtggacaactacacgaatctgaccttccgggtatacccgaagggtgatagcagctatacgcttgtccacagcgaccggtctacgatcaccgtaaacgcaagcgaggactttaagaacggctcggtatccgtctctatccccgctgccgctattccggtcactacgcaggtgttcggcacggagccgactggtgtcacggtcaacgggcaggccatccagcccgctgctaccttggatgaattccaagctgctcagacggcctattactacagcagcagcgagaagctggtctatatcaagaccgccgccggtgacgcttctgaaattgagattgaggggatctatcaggctccctatgaagcggaacatgcggagcaggccaatgtagccgtaaacacagatcacgaaggctattatggtgaggggtttgtggaccagtttgcctctgaaggctgtgcggtcacgtttactgtgtactctgacagcgacaccgctctgctggacgtccgctactctgcagggactgaggcggcccagcggactctgcttgtaaacggagagtccatactgcttgatctgccgaaaacgcaagactgggatagctggaacaaagtatctgttcccgtcgaattgctgccgggacaaaatacaattacaatttcctatcaggcggggaacttcgctggaatcaacctagactgtatctcacttcggaatcagtgacgacttgaaccaacacagggaggtgcatggggcttccctatgcacctccctgttgtcttattaaggaggaactgtatgcgaacgataagaaaacggctgcttgccctcttgctgacggccgctatgctgggtaccctgtttgcgggtcttccgattgcttcggccgcatcggaggcgctcggaaatgtgacggacgccgcagtagatggaaatacgcttttactgacgattgacagcggcgggagcgcgtcagatctgcttacgttggaagtatgccaagacaatatccttcgggtagattaccagccagagtctgtggaacccagcccagacaccccgattattgaccctgagcttacttgggataccactacggcaacggaaatcgacattaccggcgatcccattgtgatccagaccgatggcatgcgcattgaaatcagccgtacaccatgccgcatgacggtgatgcaggccgacggaactacgctgttctgggaaccagagagcggaggcatctaccacgacggggtgcgcttcgtacgcgctgaatccagcaatatgtatggtattcatggatttgactgcttcagcgataatgggaaccttctgcggaacgacaacagctctacggccgcagcagggcagcagggaaattccggcggcccgtttatgtggtcaactgccggatatggtattctggtggactctgacggcggctatccctatacaaactccaccgaccgcaagatggaattctattatgggggaacgccggcggagggccgccgctacgagaaagaagacgtagaatatttcatcatgctgggagagccgaaggagattatggccggcttctccaaaatcacagggacatctcccatgatgccaaagtggtctttgggattctccaactttgagtgggatatcgacgaagacgagttctatgaaatggtagagctgtaccgggccaagaatattccgattgatggctatgcttttgattacgactggaaacgttatggcgatgataattacggggaattcacctggaatacggataacttcccctctgcggcctccacgcagctgaaggaggatatggaatccaagggtattaagatgattggcatcaccaagccccgtgtggtgaccaagctctctgacggaacaccgactgaacaaggtgtggacgcagaggccggagactacttctatccgggccactatgaatacacagactacttcctgcctgtgaccgtgcgcagcattgatccctacaaagcagcggaacggaactggtggtggctccactctcaggatgctttcgatcggggcatcgttggatggtggaacgatgagacggacaaggtctcctcaaatggtgcagattactggtttggcaactttaccaccgcctttatttctcaggccatgtatgaagggcagcgggaatataccgatgacagcgtccgtgtttggcagactgcacgcaattactatcctggtacgcagaggtatgccaccagcatctggtccggtgacgtggcaacccagttctacaagggagaacgggtatcttgggcggctggactaaatgagcaaaaggttgcgatgctgtccaccatcaataacgggcagcccaagtggggcagcgatggcggcggcttcaaccagaactccgggaacattgaaaaccccagtccggagctctacaccagatggctgcaattcgcttctatgagtccggttttccgcgtccatggaacaaatcatcaacagcgccagccttggtactttggtacaacggcggaagaagtgaccaagtccgccattcagcagcggtattccctgatcccgtacatgtattcttatgagcgggaggcctatgactccggtttggggctggtgtatcccctgctgttcgactatcccgacgacgaaaacgtggctgactactccgatgcctggatgtttggagagtggctgctcgttgcccctatcacagaacgtggtcaatccgtgaagtggatctatctgccggaaggcacctggattgactataatcgcggcactgtttatgagggcggccagtatattccctacagcctcaatagcgagtcttggaccgacattccgatgtttatcaaagaaggcgccattattccgaagcaggacgtgcaggactatgtcggacaggaaactgtggatcatgtgacggtagacatcttcccgagcggccgggagaccagcttccgctattatgatgacgatggagaaaactatgactatgaggacggcgtgtatttcacacaggaaatctccgcgcaaggtaccggaaataccgaagtgaagatcggtgcagtcgatggaagccacaactccggattggactactattacttggccgtccatggccaggcggctaccgaggttaccagcaacgggagcctgccctattatgatgactataatgcgctgttagcggcgcctggagaaggctggacagtgggcaaggatgtgtatggggatgtaacctatatcaaggcctatgccgcttctgacagcaacagcacttacacgctcgaaggcagcagccccgtcgatgcggatggccagacctacgaagcggagtatgcttccctttttggcgcttctacagacacgcaggcctctgtgaaccagaatcactccggctactccggagcggggtttgtcgacaagctggaagccgctggcgccggcgttaccttctatgctaaggtggccaatgcgggtgattatgacgtcaccttccggtacgccaatggcgatgcagcagagcggtctctgtcggtctatgtcaatggggcttatatcggcaaaaccataatgccctccaccggacactgggacacctgggcggattgcctgatgcagcttccgctggcggcaggaaacaacatcatcactcttaagcatgaggatgccagcggagacaccggctatgtcaacttggattcttgcaccgtgccgttctatccggaagtgatcaccgcagaggccgagaacgccgcgctctacggcaccgccggcacaaatcaggatcactggaattacagcggaagcggctttgttgacgggatgacttccgccggtgcgggcgctgagtttgagattacggttccgaaggacggaagctatgaggcctctatccgttactgcaatggcacccaggccacgaaagacctgaatctgtatgtcaacggttcctatatagagacaatctcttttggaagtatcggcggaaactggaacgagtggcaggagcttacccagacgctggagcttgatgaaggccggaatgtcgttgcgctgcgttacgacagcagcaactccggcaatgtaaatctggacaagctgtcagtgaagacagagccagacgccacaatttcgatccccttggtagacaatggcggattcgagcgggacacctcacagagcagcgcctggacagagtggcaccctgatggtcaggcagtggcctatggagtagactccggatccggtaccaacccgccggaatccccatacgctggcgacaagcgcgcctatttctacagcggcagtgcgtaccagcagagtatccaccagggaatcaacctcccgaatggaacctataccgttcaagcctggataaaggtttccaatacggctccagacattggacgcatggaggtcactggttatggaggcgacagcatctatgttgatatgccttatgcaggaaccgggtggaggctggttgagacggatatcaccgttacaacaggctatctggacattgggttctactgctccagcctaggcggtacaactgtgcatatagacaatgtgaagattttgaataaatagcggaatttaatgagttaactaaaagattattatctaaatatacttaaatcgaagaatatacccgaagagggacgggcctccgcaaaagcggaggcccgtccctctctatcggattcgcatgtcaggagggggaaagctagacaaatgcaagagagagcgctggaacaaaggacaaaatcaacagcaatacacaggagaccaggaaaaatggtacgacccatttgagcatgctctccatcttgattttggctacggccgcacccacgaagaggttgcagccataaggaggcgtacacagaccaacagctaggtttaccgacatgacaacaccgaagtgaatgggattgatgttgaacgcctggatggtaggcagcagcataggcgcgatgatgatgatggcgggcacggtatccagaaaacagcccacgatcagcagaaacacattgatgaccagcaacaacactacagggctgtcggacagattggccatgaagttggtgatcatctgggggacctgttcgaaggtcatgaaggtggagaacactgtggaggtgcccagcaggaaggaagtaacgccgttgaggacagcggcggacacaaaagttttatacaggtccttccaagtcatgtcgtggtacacgaacagggacacgatgatggagtacacaacggagacagcggcggcctcagtgggagtgaagaagccagagtagatgccacctaggataataaagggagagagcagagcccagaacccgtccttggtggccttgcctacccggtgtagccgttctttccagaactggatcatgggaatcctttctccgccgggcccaagctcgggtttgtggacctcggtgccagtgcgcttgcagatgatgatgttcaccatcagaaacaccaggccgatcataacgccggggatgataccggccttgaagagatcaggcacggaggttttggttgaagctccgtagagcacaaaggacagggagggcggaatgatgggccccacgataccgccgaagcagaccagagtggcggcgtaggaggaatcataacccttgcgcttcatttcggggatcatcatgccgccgatggcagaggtggtggccatgccggagccggtaagggcgccgaagaacatgcaggccagcatggaaacgcaccccagggcgccggtcacaaaatcgatcagcgcagaggcaaagtccacgatccgccgggcgatgccgccagtggacatgatggtgccggccagcatgaaataggggatggccatgaccgtaaacgagaaaatacctgaatagcagtattgtgcgttgaccaccatgttcagatccgagaagaaaaacatggagatcatggttgcgccgccaatggcgaaccccacaggtacaccgatcgccagcaggacaaacagcaaaatcaacaggacaatgactgcatccatgcttaatcccccccttcccgggccttggtgtcagcgggtaatttgccattgatgagggtgagggcagagcgcttgatgctcaccagtgtgcggagaatcatcagtccgcagcccagcaccaccgccaagtagccccaggaggtgctgatcttgatgccagcatagggcacattgccctgagcgaccaccagttccacgccatagtagaagatgacggcgcagatgataatcacgacgatatcggaaatgatgttgacgatctgggccaagcggaaaggcagccgatccgtgagcatagtgattttaatatgctcgccttcccgctgacctagactgatgcccatccaggagatccatacgaacaggaatttccccagctcttccgaccaggacagagaattgccggccttccgcatgatgacctggacgaaaatgatgatgaccatcaaggcaaacatggagacgatgatgacttcttcaatgtgatttaggattgaaaaaaatctgctttttgctgaattcatagacaaattagatgtatcactgaaatacaccttttccccctctctctacagcatattataggttcccaaccaggccgtaccgatggcttaggcgggcctatatatagtttcctctagggtcagctctggggaacggtggctagccagcggtccatcagatcgtcgccgatctgcgcacgcagatcgtcatacacaggctgcaccgcctccttgaaagcagcgacctcttcatcggtgagctcctccacagtggcgccttcctccttgaagcgctcaatatactccatttcgttggcgcgctcctcctcgcgctgctgctcgcaggccaaggccacgccctcctcgatcagcgcccggtcctcaggatccagggactcgatccattccagggagcacacaatggggaagggggagcttgcgtggttggtaatggtgatgtagggcgcgatctcatggatgttgaagtcattgaacacacccaaggagtggtcaagtgcctcgatggtgcctgtggagagggaggtcagcacttcgttccaggacatgggggtaggactaccgcccatagcgtcccaggtcttgatgtccagatcgttctgcgccacgcggatcttctggccatgcagatcctcggaattgtggtaggtactggtgcggctgatcacctgacgcattccattatagaacatgccaacgcagtaatagccggagggtgccaaggtctcgttaaacagctccagaccgccattttcaaaggtgccctgcacccagtcctcataggtggggtacaggtagggtaggtctaccgcgctagtcgcgggtccggacacggaacttaccacggaggataggtcgaactccatggtgagagtgcccagctttacaccggccaccatgtcgggggagtcgcccaactggccattggggtaaacctccactttgaaacggccgggcgcctgctcttccagccactcgcctagccaaacgctccacttgtgagtggaacgcgtatcagagtcggtatggccaattttgatcacaatgggttcctcagaactagtgctgccagtgttgttggcagaggggttatcattaccgccactgctggcactcgggcggctacagccggagaaaagagccaggctcatggctgccgcgagagtaagcgctaaaaattttttccgtttcatagttctctccttcctgttcattgcagatggttctatctttcagcggataggccgcagacattcgccgtttaggccagggacaggatcctgcgggcctcgccggggttggcgatctcgcggcccagctccttggagaggcggaccaccttggccaccagctcaccgttggaggcggctttgtggcccttgcccaagtagatgttgtcctcaaagccaacgcggacgttgccgcccattacgatgccggcggcggccatgtcccaggcgctgcggccgatgccggtgacggtccaggtggagccggaggggatttgcttgactaagtaattcaggttgcccaccgtggcgggggtgcagccggacacccccagcacgaagttgaactgcaggggggcgccgggcaccaggcctttcttggccatgttcaggatggtgtccagatggccgatctcaaagcactcatactcgggcttgatgcggttctcgatcatccgctgaccaaaggcccgcatggtaggcatatcgttgacgaagatgtcgtcgccgaagttgcaggtgccgcagtccagggtggccatctcggggaagagctcggtgggctgaaggcgctcctccggggtcatgccggtggcgccgccagtggaggggatcaggatgacgccaggacaggccgccttgatggcttccagcactacgcggaaccgttcccggtcctgggtgggggtgccgtcgtcccaacggacatgcacatgaatgaccgccgcgcccgcatcatacgcgctcttggcctctcgtaccatctcctccacggtgtaggggatagcggggctgttttccttggtgacctccgcgccgcatatggctgcggtaatgatgagtttttccatcattctcacttcctttcttaaacaaattttatttgcagtagcgttttgtgaagtaatctcgtagcttctcctcccttcgcacagcgtcaaagacaatttctgcatggccggggtaatatccatttccgataagcatgggcacatatttcttgatgccctcggcccccagagacgctttggcaaaatcagtactcatgctgaaaaagtagaccattcccgtatctttagttacaagcaccgtggccaattccgtgttaggtacactcacggtgttgaccgtgaagtccgccagttggtcacccaatgcattctggtaaatatccagggcctccagaggcttcttggcatcggcttccagcacaacgtccgcaatgcccaggctacgcacaatctcacactgccggggggaatattccatgcagatcaccttgccagtgggagctacccgttttttagcctccgccaggcagagaagcccggccttgccggcacccaccactaccacggtatctcccgccttgacgtggactgcgacttgggccggggcaccggccacatccatcaacgccaggctaagctggtcgccaaggtccttcggaagcttggtgtaaatgccgctctcgaacagtatggcgctggccttacagaagacctgttcggtgtccacgtcaatggacgtgatctcattaatttttagaggagtgagtgacagggacactaaagtggcgatcttatcgcccacctgggcgtctgtagagacagccagatcggcgccaatctccttgatgcgaccgatcagaataccgccagattttgttaccgggtcttggaactttccgcgctcgtccacgatcttctggatctcctgggcgatccggttcacatcgccgccacactcttgcttgatgcggccaaaggctgtggccgttggctggagcgcgatgacgtcgatcagaatctcattggaacaaatagtgggggagttgtccacccgttctgctgcctgcggaagcaatcctttgggggaaatgacacgatggcttccgtatggatctcctcgcatggtagagtctcctttctgtagcgaaatactatatttttgaactgcaagctgcgtgccaactcattttttgatatttttactagttttatctttagtgaaacgggaattcgaagtccattaacagaagagcgaaccataaattgatcgaacgatcaatttatggttcgcttgtgattcaaaaaaggttcacttgtcttccgattgaagaccgtacagatttaattttcggactacagaggattgactaatccccagcatgttggcaatctttcgagtggacttgtaccgttgctggtataactggaggatttcccgttcccgctggctcaacatttccttcagagaaccgccggtggtctgcttgtgaaaatccggagatggaacggctgctgctacagaaggcggctccacgctgtccatggagaggacttggagcacgtcccgcgcctcaatgatccggttatttgtcataatcatcaaccgctggatcagattttgcaactcgcggatatttccgcgaaaggactggttctccagaaattccagtgcttttgcgcctagcgacttttgaagcccgaattccaggttgtatcgctctacaaagtatttggctaaggggatgatgtctgcccggcgcatgcgcagaggcaaaacagtgatgggatagacgttcagccggtagtaaagatcctctcggaattccccggcctgcaccatgcgagctagatttcggttggtggcagcgatgatccgtacatccaccttgatgggagttagcccaccgacacgaacaatttctttttcttggatcacgcgcagcaacttggcctggaaagtaaggggaagctcgcccacctcgtccaagaatagagtgccgttctgtgcagcttcccagaggccgattttccccttgatgtttgctccggtaaaggaacccttttcgtagccaaacagttccgactccagcagatgctccggaatcgcggcacagttgattttgaccattgggaagctttttcgctcgctgttctgatgaataattctggcaataatttcctttccaacaccggattcgccatagatcatgacgttggaggtatagcgggcaactttaagcgcctggcgcagagtggccttggcctccaggctatggaagatatatccgctcgcacagtcctcgtccgcttcactctttgcgtgcggtgtttcgtccgagttcgggatagagatagtctccggcacaccgcatatcccgcgctggatgtctgtctgcatttgcgggaacctgcgcattagacccaaagtgtagtctgcgtgtccctccaaaaagcctgtgtaagggatgacctgaatctctttgccgatactttctgcggtcagcgccacgaatttatagtcgcagcatatggtggcaaagtatatggttccatggtttttgactgccaataggcttgcagcctcagtgtctgctgtgttgatacagttgatgactacatcaaagcgctggatgatctccgcgtgtggagtgccgcataaagcgctcaagttggtggcatccagttccaacacctcgtcgaacacgctgcatggttccatttgaatacggctttcctgatctcgcacgatacctacaagccgtccgctggagcccatcttatccttggcggcatagccacacatcagaccgatgcggccgctggcaccgagtatcagtacatcctgcccaggttgcacgatctgataggagcgagtaggggcgccagcctcatccatagctgcaatcacggctcgcaggggcaagtccggcggttttttgacgactggagagttggtatataggatggcctgaccctctacctccagttgggcgctttcgcagtcaatgcggaggatctgcgtaatgtgcagaggggttaccgtgagggaggacagagatatgatctcgtcctttggccggatatggtaaatatttgggtagctgggacctaactccaccacggtgccatataacattcctccactgttggttaccggattgtgaagttttccccgctcgcggacaatttctaaaacgcgttgacacagcaaggctctgtcctcgcctgtttcgtccagaatttcattgaagctggccaaattgatattgatgattttgacgtcgatgagaacctcgtccgaccgaagcgtcatcgtattatctattttccacgcctgttgggccagggcgtgccgcggctctatagatcgttctagcccaaagctatccattatagatgccctcttctgtcgcttaatttgatagaaagcggacgggccccattggggacccgtccggcaactgtttatttccgcttgcagttctttgggaccacacaggtgccgctggctcggcagaccagaaccggctcatccagaacgtcggccgctgaagcgcttacgtccggcctagctgtaatgaccttgtacgcggtaaaggtcatcttgcgggacgtatttccgatataagtgatctcgcccttcgcttcgatgtagtctccggcgtaaacaggagccagaaactctatattgtcgtatgcgcaaaacaacccctcatcgccgtcgcagcggatcagcagttcggtagccacatcgccaaagaggtgcagcatatgtgcgccatctaccagatttccaccatagtgtgcatctttggcagacattcttacgcgcagttcagaaacaaacttttccataaacttagtctcctttcttttgagggacaacgccccctctggaaataatgtatagcaattttaataccaactgttactcaatgtgtcctctgcttggtgctggaagtatgtcacaggggattatagcacaaaaaacaatatatttttagatgcataatacggctgatataatctaacggattctgagatttttacagaaaataaaggcctggatgaattactgcagagttggaaatattcaccgcaaagacattccgttatgagactgcaaagcccagagactatgttgtgggagccatggtggacgaagcgataaattgttggcctttctctcgagtgcatgcgcataaatggggggggccatagtcatcgggaagacccgaaaaccagtcggtggcgtgcgagctacgttactttcgagcgatgccgcgatatgcccggcatctggaaataccgcgggcattgctttcggggtgagacggtggagcgtggccaggatccggtctgctgctgaaagatttgtactttgaaatatggggggccagagttttgccggccgcctgttttatggagtaaaggtaacgtgaagcggctgccggaactggacaggctggtgcagtccgcttacggggataaggtcatgggacgcgtcccggaaaacctgtgtgtccagctcttgaatggctatgaagtagagcgagccgcaaagcaggagcggcgtaaggtactttgcgaactgctgtctgccaggcgggaaaaagaacagtccgtagacgagtggctgaacatgatgcaggattatgctcagctggaagaagtggatcgccccacactggttcggctcattcagacgcaaggtaaaatcagcgttcaaggccaaatttgccaaaggacaaaggattttcgcctatgtgcccattggctgccgcaaggacccggaggaaaaatgccatttgctgattgctgaggatacccgctggataattgaaaaaatttatgcccttgcggtgcgtggggtgggagccgctaaaacctccaaggtactgacgcaagagaagggatccacccccggctggctgaactatcagcgcaaagggacatttgcaaacatctacgccaacgccccggagggaaaagcctacgcctggaccatagcccaggtcaaaagcattttggaggatgaaacctacatcgaaaattcggtccattaccgggaaacaaatatctccaacaaaaataagaagcgtatccgcaaggacctcagcgagtgggtacgtgtcgaggggactcatgaggtgatcatttcgaaagatgtttttgaccgtgtgcaagaacaggtcgccacacgccgccgttatatgaaggaccagacaacacaaattttctccaggcctctcaaatgcgccggttgtggctggtctatgcgtttcaggacaaaacgccagatcaagaaaccatacaggcattacgattgcagccgctatggacaactcggcaatcagtgttccgcacattatgtccgctatgatgttctttatccctatgttctctcccgtttgcagttctggattaaggcggtccatcagaatgagaaagccatagccgcccgccttttgaagccctccaacagtggacaggaggcaaagcacagacgggcggcggcggataaaaagcgggcggaaaaacgtcttgccgagctggacagcctgatagcccggatatatgaggacagaaccgcggaggtcatgaccgcccggaacttctctatgctctcccaaaagttccagcaggagcagaaggcgctggagactaagatcctggccttgaatacacagcttgaagccgcacgggaacagacggaaacattgaaaaatggcttgttttggtaaagcaatatgccgacctgtctgagctgaccgcagaagtatgattaccttgattgaaaaatccttatccatgaggtgataaaggacagcgagggaaaacgggtacagaaaatcgagattttctatcgcttcattggcaacatcgaccaagccgttgacaccatctttttaactgcgtgaaacggaccagagtttaccggacagtgaaaaaataattcggctgagtgagatcttcggagtaacaacggattatttgttcaaaggcaaagagtcagaccctatggacatctatgtccagcatacttcaaaaggcgggggcggatatgtctgcgaaggtgacggagcgcttggaaggggtacgccgcatgagcaccgccagcggcccttctgctggcggccgccgcggttattgctggacgcatttgctgctcaagtgttgaccggcggacggcctgcactaaggcaaacagcaggcggagcaaagaggcgcggggcaatgccccgcgcctcttttatcgggatttgggtttaggtttgaagatcagagccaccagccagccgaagaagatggcggcggcgatgccgcccgccgcggcggtgacgccgccggtgagggcgcccagtatgcccatctcatccacggccttggcggcccccttggccagcagatagccaaagccggtcagggggacggtagcccccgctccgccgaactccaccacgtacttgtagagccccagcccgcccagcaccacgccggacaccacatagagcaccagaatacgggccggagtgagcttggtcttgtcaatgagcagctgcccgatcaggcagagcaccccgccgcagaggaaggcgcgggcgtattcccaaaagacttccatgattttccctcactgttccgttgagatggccaccgcgtggcagatggacggaatgctctccccctggagcgtggaggtgggggagagcagggcgccggtgccgcagaagagcaggcgcctccagcggccctgcttcataccgttgagcagaaagccggtgagcaccgcggcggagcagccgcagcccgagccgccgcagtggacgtcctgggtctgggcgtcgtagatgagcacgccgcagtcctccagatttttgaattcaatgccgtcccggtggaagagatccagcagaatctccttgcccaggctgcccagatcgccggtgacaatcagatcatagtccgagggcctgcggcctgtgtcccgaaaatgggcctgaatggtatcataggcggcgggggccatggcggctcccatattgttggcgtcctggatgcccttgtccacaatcttgcctgtggtcacatgggtgatataggggcccggcccctcccgggagaggatgacgcagcccgcccccgtcaccgtccactgggcggtgggggtgcgctggccgccgtactccaggggcgtgcggtactgccgctcggcggagcagaaatgggaggaggtcatggcggcggcgtgggcggcgaaaccgccgtccaccagcagggcggccagagacaggctctccgccatggtggagcaggcgccgtacagcccgaagaaggggacgtcctgcccccggacggcgaagccagagccaatgcactggttgagcaggtcgccggccagaatatagtccagggcggaggcgctcagccccgccttgtccagcgcggaggagagggccagcttctgcatggcggtctccgccttctcccaggtcttttccccaaaagaatcgtcctgattgatctggtcgaagctgtcggccagcgggccctccccttcttttttccccaccacattggcgtggcccgcgacggagggcgggtgggcaagggcgaccgtctgccggcccagcttttttgtggtcatagcgccaaccttctttccttcagataatgctattttgaacgaaaagccgggaaaatatgaggctggattttgtggcgggacatgctggtcaaaaagagggctttgcggtataataaacagcagaaaccggattcattgaaatggaggcatatcatggtcgaggaagccaagcgtactctggcctatctctgtcccgcctgccgccagagcgtggcggtggagcgcagcgtattccagctggcggcgtccgccaacgaactgccctgcccctgcggcaaatcctccctccgggtggagctgatgggcgaccgggtgaagctcaccgtcccctgcctgttctgcggcaaggatcacaccgtcacctgctcctcccacgcctttctccacgagaaggtgctggccttctcctgcgccgcctcggggctggactgctgctacgtgggggaggaggggccggtgtttgccgccctccagcgcctggaggaagcggtggacaagctggaggccgcttcaggggagaagggggccttcctggacgagctggtgatgcaggaggtgctctccgagctcaaggagatcgcccagcgggacggcatctcctgcacctgcggctcccaccgctggaagctccaggtcaatttcagctccatcgacctgttctgcgccgactgcggcggggccatgcgcattccggcggccaccgccagcgacatcgacgacatctgctgtaaaaacaagctggtcatccacggccaggactgaggaggcggaagcatggtggtatacgagtgcgagtacacggtggactccagggacatcgacccctggtaccgctgccgcccctccgggctgatggggatgctccaggaggccgccacccaggcggcctgtgcccttcacgtctcccgggacgagatgctggagcggtacaacagcttctggatgctggcccggctgtggtaccggctggatgtccctctgagctggggggacacggtacacatccgcacctggcaccggggcgggaggggagcctccacctaccgggacttcgacctgtttgtgaatggaaggcaggtgggggaggcggtgtccacctgggtgctggccgacgccgctacccacaggctggcccgcatgagccggatcacggagttccaggataccgacggcggccctctctgcaaggagcgcaccctgtcccgggtccgcctgcccgaaactatggagcacgcggacagccgcgccatgcactacagtgataccgacgtcaacggccacgtcaacaacgtgcgctatgtggacttcctctgcgacgccctccacatggagcgcctggggcccagccgcttcgtctcctccctccaggtgggctacctggcggagtgtatggcgggggagaccatcgagctctacaccggccaggccggcggcctgtggtacgtccacggggcggatcaggcgggcaagagccggtttgacggcgcggtggagctggcggagctcaccccttgacagcggcggaaccatcgagtaaaatagaaaaaatttaacctctgagagagcaaaaagataaaaggagatgcaccatggtcaacactgacgagcgccagaagttcacccggcagggcctcaccttcgacgacgtgctgctcatccccgccgagagcgacgtcctgcccgcagacatcgatctgcatacccagctcacccgcaggatcaggcttaacatccccctgatgagcgccgccatggataccgtcaccgagtaccgcatggccatcgccatcgcccgtgagggcggcatcggcatcattcataaaaatatgtccatcggcgcccaggccgagcaggtggacatggtcaagcgcagcgagaacggcgtcatcaccaaccccttctggctggcccccggccatacgctggcggaggccgacgagctcatggccaagtaccgcatctccggcgtgcccatctgcaaggacggcaagctcatcggtattattaccaaccgggacatgaagtttgagaccgacatgagccagttggtggacaacgtgatgaccaaggacaacctggtcaccgccagggagggcgtcacgctggaggaggccaaggagatcctgcgccgccacaagattgagaagctgcccatcgtggacgatgagaaccacctcaagggcctcatcaccatcaaggacatcgagaaggccaccgtataccccaactccgcccgcgacgagaagggccgcctgctggtgggcgccgccatcggcgccacccccgacgtgctggaccgggtccacgcgctggtggaggccggcgtggacgtgctctgcctggactccgcccacggccactccaacaacattctggagtgcgtccgccgcatcaaggccctctaccccgacgtgcagctcatcgccggcaacgtggccaccgcggagggcacccgcgccctcattgaggcgggcgccgactgcgtgaagatcggcatcggccccggctccatctgcaccacccgcgtggtggccggcatcggcgtgccccagatcaccgccgtctatgacgccgcctgcgtggccgccgagtacggcgtgcccatcatcgccgacggcggcgtgaagtactccggcgatctggccaaggccctggccgccggcgccaacgtggtcatgctgggctccctgctggcgggctgcgaggagtcccccggcgacaccgaggtgtaccagggccgccagttcaaggtctaccgcggcatgggctccctgggcgccatggcctgcggctccaaggaccgctacttccagcagaacaacaagaagctggtgcccgagggcgtagagggccgcgtgccctacaagggccccaccggcgacaccatctaccagctcatgggcggcctgcgggccggtatgggctacaccggctgccacaacgtggaggagttgcacaccaaggcccagttcatgcagatcacctccgccggactcaaggagtcccacccccacgacatctatatcaccaaggaagcgcccaactacaccctcaatccccagtaagcggtggagcgcatcacggtacccggcccggacggcggattttccgtgcccgccgggctggaacaagaggcagcggagcggctgggccgctacgaggacgcccatgggcgcctgctggcccgccaggaggagctggccgggcggatggaggccctcaaggcccagggaaagcagaagaccgcccagttccgggagctgttcgccgagaagctcaccattcagaataccctgacgctgtgggagacctacggcattcactgaaaaggttcaaaagacggccgccgcccaaatgggcggcggccgtctcgcgcgcatggagactagcgggggacatagaccagctcggtcatgccgttgtggacggcggtatggagcagatggagcttccgctcctccgccagcaccccgaacagcgaaacgccgctcccctttgaaaactagttccgcctagccggccttacggccatgacaagctgtacagccccatacaggccgcagagcaggagaattgtgtcctcataggcgtgaaaaaagatcgatttaatcccagtcagcccccaaagagtcagaagagcaaggagaagcctgttcttgtaccggtaacccgcacagaccgtgatgctcagactgacaatgggacagggcataatatgtgtcaccatttgcggaaaggcgtttcccagaaggagggagacgagggggtaaagcagccagagcagcagaagcagggcctgcacggcggtgggtttttggagcgtatccgctccgttgtgcctgctctcatacaggaacagaatgccgaagagcagatagagcggaagcacaaaatacttctggataggttctgatccataacgggcgaaaaaagcgagaccgatccacaagtttgcgattccgagggcaaactttgccgcccatggtgccttttgggtgtaggacagcgcgaacataaccaggagaacgagcaagaggacgatttgcaggccccatgtatccatattataggccccgattaccttccagaagatctgtgcgtccaatttgcctcacctccaaattgcgatattgtttattgtagcatatcggagggacgtgctcaacggggaagtccccgctgtccaagattgcgcggcggggcgggatatgatataatttaatatctgaccaaagaatggggggagagacatactcaagctgctgctgggccgggcggggacgggaaagacccgcgccttgctggaggccatggccgccggggacgggcggccccagattctgatcgtccccgagcagcactcccacagcatggagcgccagctctgcgccatcggaggcagccgggtgtccctcttcgccgaggtgctctccttcacccggctggccaaccgggtgttctccgtgtacggcggtttagccgccccggcgctggacgggggcggccgcctgctgctgctgtgcgccgccctcaggtcggtggccccggagctgcgggtgtaccagcgcccctcccgcaagcccgccttcctctctggcctgctggccacggtggacgagctcaagacctgccgcatcaccccggagcagctctggacggccggggaggagagcggcggcggggagggggacaagctgcgggatctctccctcatctacggtgcctacgaggccatgaccgcccgccagggggccgacccccgggaccggctgacccggctggcggaggcactcacccgggaggcctgggcggcggggaaggacttctacctggacgccttcaccgacttcaccccccaggagcgggcggtgctctccgccctgctggggaaggccaattccgtcaccgtggccctcacctgcgacaagctggaggaggacgaggggggcgcggggatcttttcccccgcccgccgcaccgcccgccagctcctccggctggcccaggagcggggcgtttcccgggaaattgaggtgcgcgccggtggggccggacccaagacggcggccctggcccatctggagggccagctcttcgccccccggcccgccccctatgagggcgcggtggaggagctcaccctgctgaaggccaacagcccctactccgaggtggagtggacggcggcggagattctgcgcctggtgcgggaggagggctaccgcttccgggacattgccgtgtgcgcccgcagcctggagggatgcggctccctcgtcgagaccatcttcgcccggtacggggtgcccgtgttcctcagccggatgagcgacattctgcaaaagcccattctggccctcatcacctccgccctggaggccgcgtcggggggctaccgctatgacgacgtgttccgctatctgaaaaccgggctcaccggcctgtcggcggaggacgtggatctgctggagaactacgtgctcaagtggagcctggaggggagcgcctggacgggggcgcgggactgggcgaaccaccccagagggtacggcctgcccttctccgagggggaccgggccctgctggcccggctcaacacgctgcggcgtcaggtagcccagaccctggagggcctgcggaagaacccggacaagacgggccgggggcaggcggccgccctctacgcctttctggaggcggcgggggtgccggagcggctggcccagcgcaccgaggagctgaaccgccgggggcaggccgcgctggcggaggagtatgcccagctctgggagatcctctgcggcggcctggagcagtgcgcccagattctgggggacgcccccatggagctggacgagttctccaagctctttgccctggtgctctcccagtacgacgtgggctccatccccgtgtccctggaccgggtgaatgtgggcgacatgccccgcctggcccaccgggcctgcccggtggtgttcctgctgggggcggacgacggggccatccccgccgccgcgccgtcgccgggcctgctcaacgacgacgaccggagcctgctggcctcctacgggctggagctggccccccggctgtccgacaagctgtaccgggagatgaccatcgtctacgagacctgcgccctaccccagcggcgcttttatgtgagctgggcggcggctgggccggacggggaggagcggcggccctccttcctccagtccaagctgaattttctgttcccccaggcccggcgggtggaggaggggcggctggacggctccttccggctggcggccccccggcccgccctggagctggcggggcggttcccccaggccggggcggccctgcgcgccctgccggaatacgcccccctggtggagcggatggagcgggccgcccggatggagcgggggcggctcacccgcccggcggtggacgccctctatgggaggcgggtgcccatgtccgcctcccggatggacaagtacaagtcctgccacttctcctactttatgcagtacggcctgaaggccgagccccggcgggccgccgggttccaggccccggagtacggcaccttcgtccactatgtgctggagcacgtgctgcgggcctgccgggagcgggggggcgtgaaggaggttccggaggaggagctgcgcaccctggcccaggcggcggtggagcggtacgtcagcgaggagctgggcgggctggagcacgagaccgcccgcttccgctatctgttccggcggctgctcaaatcggtgtacgccgtggtggacaacgtggcggaggagctgcgctcctcccagttccagcctatttccttcgagctgggcttcggcgcggggaaggacctgcccccggtggagctgagtgtggacggcatgacggtcagcatctccggcttcgtggaccgggtggacggctgggagcacgacgggcggctctatctgcgggtcgtggactacaagacggggcgcaaaacctttgatctgacggatatctggaacggcatgggccttcaaatgctgctctacctgttcaccctggagcgagagggggaagcgctttacaaccgggagatcatcccggccggcgtgctctacctgcccgcccgggacgcggtggtcgcgggcagccgggccatgagcgaggccgagcgccggagaaaggtggacgccgagctgcggcggcgcggcatcgtgctggacgagccggaggtgctcgccgccatggaggagccgggggaggcgggcatccgtttcctgcccgtgaaggtgaacaaggccggggccatcaccggcgaggcgctggtctccgctgagcggctgggcaagctggcccggcacaccgggcggattctggaggagattggccgggagctggccgccggcaacatcgccgccgaccccttctggcgggggccggatcacaatgcctgccagtggtgcgagtacgccgccgcctgtcacttcgaggagggtcggggcggcgaccgacggcgcttcctgcctgccgtcaggggcgaggaattctggcaggcggttgcgaaagagcaagtatgagttgggaacccagatacagcccggagcggaactgttcgtcgctctcgatggcggagagcttgcacagctccgaccagaagtcgtccaggaacgcggcggaggagccctttccaaggcgggtcatgtaagtatcgacaacggcaagctgcttgcggtattctggagaagtctcatggatcatcaactgctgtcattctaagagaccaaacatgatagaacctccttttgttgagaataactctatactcgttgtagtgagaataactccacatgtcaagagaggagcggaaaatggccacttttgaggagcggcttacaaagctgcgtacgaaagcaggggtgtcacaacaggcgatcggggatgccttgaacgtgtcccgctgggcagttcacaattatgaggcggggaaaaaccggccggattttgatggcctgatcgccctggccgactatttcgacgtctccctggattatctggttggacgctccgaccgccgggagcgcaacccgtaggggcggcccttgtggccgcccgcagtcaggagcaggcccggccctgttggaattgcaatcggtcaaacatagcaatagatacctctgaacaggaacaaattgagcctgttgataaattgtgggaatcattatgacgtttggacagagactgggcatgctgcggaaagaaagaggttatacgcaaaagacctttgcacaggagctgagcgtaacagagcggtgtattcgggcttatgaaaatgagacgcgccatcctgattactttggcctgatcgccctggccgattatttcaatgtctccctggactatctggtcggacgctccgaccgccgggagcgcaacccgtaggggcggcctttatggccgcccgcgggcgaccacaagggtcgcccctacgccgttatgtactggggcgggccgcctgctggatgtacccctgtagatgggggctgactctaggccttgtttgaaaaatagcaatatgaccagcggcgaggaattttgcccgctggcaagcaattttttcgcaggaatcctggcggatttcaaggaaaaattgggccgtccagagggcaaaaggcccggtgattgggcgtgttgactattttcaaacaaggcctaggcacagaatagtaaaaagcaaagaaatgaaaagagaggaatatctgcgcatgatcaattttggagcgctcttgagcaacaccagcaactttctgtatacctacattctcatcgccctgctgatttttgcggggatctacttcaccgtgcgcacccgcggggtgcagttccggctgttccccgaggccctgcgggtgctgggggagaagaaaaaggacggcaaggacatctcctccttccaggctttgatgatctccaccgcctcccgggtgggcacgggcaacatcgccggggtggccaacgccatcatcgccgccacggtcatcggcggctacggcgcggtgttctggatgtggctgctggccctcatcggcgcggcctccgccttcattgagagcaccctggcccagtgctacaaggagaagcacagggacaactgggtgggcggcccggcctactacattcagaaggccttgggcagccggttcttcggcgtggtgttcgcggtgctgctcatcgcctgcttcgcctacggcttcaacgccctccaggcctacaacgccggctccgccctccagtactacctgcccggctattccgagagcatctggcccgcggtggtgggcgcggtgctggccctgctcaccggcctgtgcatcttcggcggcgtacgccgcatcagcgccatcacctccggcatcgtcccggtcatggcggccatctatatcgccctgggcctcttcatcaccgtcaagaacatcggccaggtgccctatatgctctccatgatcgtctcccaggcctttgatccaaaggccatgttcgcgggcatcggcgcgtcctgtatcatgcagggcatcaagcgtggcctctactccaatgaggcgggcatgggctccgcccccaacgcggcggcggccgccgacgtgtcccacccggtgaagcaggggctggtgcagatgctctccgtgttcatcgacaccattctcatctgctccaccaccgccttcatgctgctcctctccggcgtacccatcgacgcctactccgagggcatgaactttgtccaggcggcggtgcacagccaggtgggccccttcggtcccctgttcatcaccgtctccatcttcctgttcgccttcagctccctggtgggcaactactactacaccgagtccaacttccgtttcatccgggactccaagaccgggctgctggtgttccggctgacctgtgtggccgccattttcattggcgcgcagatgagcttctccatggtgtgggatctggccgatgtgctgatgggcctgatggccctggtcaacctggtggccatcctgctgctgggcggaaaggccatccgggtgctcagggactaccagaagcagcgcagggcggggaagaaccccgtctaccgctacgacgaggtgggcgtgggcagcccggagatctggaacgaagcccacgccaaaaagtgggaggactgaaccgaacccatccccgctgagctgaaaggagcgccctatggccttttccctgacaagtgaacagcaggctgcggtggacaaccggggcggcgggctgctggtgtccgccgccgccggctccggcaagacccgggtactggtggagcggctcctggcccgggtggagggggaggggctggacatcgaccgcttcctggtcattacctacaccaaggccgccgccgccgagctacggggccgcatcgtggaggagctgtccgcccggctggcggagcgccccaccgacgcccacctgcggcggcaggccaccctggtctataaggcccagatctccaccgtccacgccttctgcgcccagcttttgcgggagtgcggccacctgctggagctggatccggacttccgcctgtgcgacgagggggaggcgggcatcctcatgctccgcgccctcaacgatgtgctggaccggcgctatgaggacatcgccgaggggagtgatttcgcccggctggtggacaccatgtccgccgggcgggacgacagccggctcatgcagatcgtgctggacatccgggggcgggtgcaggcccaccccaatcccgccgcctggctggacgggcaggagcgggcctttgccctggagggggtagacgacccgggggagaccccctggggccgcctgctgctggacgacgcggggcggcagggggcctactggcgggacaagattgcccaggccctggagctgtgcccctgcgacgccaacctggacgccaactacgcccccagtctctccgccaccctggcggccctggacgcctttgtggaggggacgcggcgggggtgggacgcggcccgggccgccctgcccatccccttcccggcggcggggcgcaagaagattgtggactgccccgacgcggcggagcaggtgaaggccatccggagcacctgcaaaaagcggatggagaagctgggggagtggttcgaggactgcggggcggatctcctggaggatctccgggcggtgcacccggcggtgcgggggctgttcgccctggtgaaggacttcgagggggcctacgccgccgagaaggcccgccggggcatggtggacttcgccgatctggagcacatggcggtgcgcctgctggtgggggaggacggcgcccccaccgagctggcccgccagtggtccgcccggtacgacgagatcatggtggacgagtaccaggacaccaacgaggtgcagaacgccatcttcaccgccctgtctcggaacggcaccaacctcttcctggtgggggacgtgaagcagtccatctaccgcttccgcctggccgatcccaccatcttcctgggcaagtaccgcgctttcgccgactacacccaggcggcggagggggaggagcggcggctcatcctgtcacggaacttccgctcccggccggaggtgctggagggggccaactttgtgttccgcaacgtcatgtccgccgacttcggcgagatggactacaccgccgacgaggccctctatcccggcgcgcccttcccgcccgacggccgctacgccgtggagctggacgcggtggacgcctccgccgagggggaggaggagaagaccgcccgggatctcatcgaggcccgctttgcggccaagcgcatccgggcgctggtggacgggggctttcctgtctccgacggcgagggcggcgagcggcccgtccgcccggcagacatcgtgattttactccgctcccccaacacggtgctccaccactacgcccgcgccctgggggagcgggacatcccctgggaggcggagggcggcggcgacttcttcgccgccaccgaggtgaacgtggccctctccctgctccaaatcgtggacaacccccggcaggacgtgcccctcatctccgtcctccgctccccggtgtacggcttctccgccgaccggctggcggagctccgggctgccagccccgataccgacttctacgccgccctgaccgccgacggcggggaggacagccgggcctttctgaccgagctggacgagctgcgcttcggcgcgggggagctgagcagccacgagctgctctggcagctctacgaccgcaccaatctgctgggggtgttcggtgccatggagcggggggaggagcggcagtccaacctgctcaccctggcggagctggcccgccgcttcgagggggcgggccacaagggcctgttcggctttttgtcctacctgacccggctgcgggagaacggggccaagctggccctgcccgcccccggccgggaggggggcggcgtgcgcatcctgagcatccacaagtcgaaggggctggagttccccgtggtgctcctctgcgggctggcgcggaggctcaaccgggaggacatgagccggcccatcctgttccaccccaagctgggggtgggtcccaagcggctggacgtggagcgggggatggagtatcccaccctggcccgccgggcggtggcccggaagctggagctggagatgatggccgaggagctgcggctgctctatgtggccatgacccgggccaaggagaagctgattttgtcggtggccctcaccggcggggcgcgggatctggagaagctggcccccgacgcggcctgtccggtggagccccaggtgctggccgggtgccagagcgtggggcagtgggtgctgctgcccgccctggcccggcccgacggggaggtcctccgccgggccgcgggggtgcaggtgcccgtcccggcggcggacttcggtccggcctgggatatccgctttgtggacggggcggagttccaggcggagccggaggagagcgccatttccccatccggtcccccggacggcgagatgatttccgcgggggcgggggaggagaccgccgccctggcggcccggctggcctggcattatccccacggggcggaggtggagctgccctccaagctcaccgccacccagctcaaggggcgggcgctggacgaggaggtggccgaggcggcggtccggcccccccggcccatccgcctggggcggccccggttcgccgccgaggagttcggcctcaccccggcccagaagggcaccgccctccacctggtcatgcagtacatcgacttcgagcggacggagcgcgtggagcaggtgcgggccgagatcgcccggctggtggagcgggccttcctcaccccccagcagggggaggcggtggacccggccaaaatcgcggcctttttcgcctctcccctggggcgggagctgatggcctccacctccctgcggagggagttcaagttctccatcctggttccggcggcggactactacccccaggccggggcggaggagcaggtgctcctccagggcgtggtggactgctgctttgagactctggagggcatcaccgtggtggacttcaagaccgaccgggtggaccggcgctctgtagcggcccgggcggaggagtaccggccccagctcgcggcctacagccgggcgctggaggagatcaccgggaagccggtgatccgccggtgcctgtggtttttcgccctggatcaggcggtggatgtgtgaagggccgctggcaacttgaaaaatttctcgaaaaaacagttgcaattccggttttcctgtgctatactatcctagcgtttataaggcgtggaggtttgctgcgccgcctcatccagaacgagaaagaggtgaacacaccatgaaggaaggcatccatcccaactacgaacagaccacgatcaagtgtgcttgcggtaatgtgatcgaaaccggatctaccaagaaggacattcgcgtggaagtctgctccaagtgtcaccccttcttcaccggcaagcagaagatggtggatactggcggacgcgtcagccgcttcaacaagaagttcggcctggacaagaagtaagttcgtatgtaagagcccgtaccggtttcggtacgggctcttttgcatcggaaggataccagccgccggagcggcataagaataaggagggagacggccatgcgcaagtgcctgcgctgcgggacagagatggtggagggctggaacgtcaaggaggatgggcataaacatgaaattatcatcgacaatgggggaagcttcgtgcgcggcgacggacggatgggaattctgaaggccgcggtctgcccccagtgcggcgaggtttcggtctatgtggacgatccggacacggtgatcaacggatggaggtaagagcgatgtttggcagaattgaccccaaggagctgaaccagaatgtcttttccatgatcggcgagcagtggatgctggtcaccgccgggacggcggagcggtgcaataccatgacggccagctggggcggcctgggcgtgctgtgggggaagccggtggccacggtctacatccgcccccagcggtacaccctggagttcgtggagcgggaggactgcttcaccctctccttcttcggggaggagtaccggaaggccctggccctgtgcggctccaagagcggccgggacgtggataaggtcaaggagtgcggcttcacggtggccggggcggcgtgcggcgcgccctactttgaggaggccgggctggtgctggtgtgtaaaaaggcgtactggcaggacatggacccgacccacttcctggacggagagctggacgggaagtggtaccccgaaaaggattaccaccgcatcttcatcggggagattgtggaagtgctgaagaaaaactgacgccggggctgcggcccgcggcgcggaggacggtatgacggaaaacgagacaaagcaagcgaaaaaccgggcggtgctggtgggcctgaacgcccactgcctgtcggccgaggaaaacgccgacgacacctccatggaggagctggccgatctgctggagactgcggggggcgtgtgcgtgggcaccgtgttccagaacaaggacgcccccgatccccgcaccttcatcggcgagggcaaggcggctgaggtgaaggagctggtgggggccatgggggcggacatggtggtggtggataaccccctgtccccctcccagcagcgggtgctgtcggaggagctgggcgtccaggtgctggaccgggcggccctgatcctggatatcttcgcccagcgggcccgcacccgggagggacggctccaggtggagctggcccagtaccagtatctgctgccccggctgctgggcatgtggacccacctggagcgccaggagggcgccatcggcacccgcggccccggcgagacccagttggagaccgaccggcggcacatccgccgcaagatccagaagctgcgggaggagctggagcaggtgcggcgggtgcgggccacccagcgcacccgccgggagaagaacgaggtgccggtggtggccatcgtgggctataccaacgcgggcaagtccaccctgctcaaccggctgaccggggcggacatccccgccaacaaccggctgttcgacaccctggacaccaccacccggacgctggagatcagcgacacctgcaccgtgctgctcagcgacaccgtgggcttcatccgcaagctgccccaccatctggtggaggcctttaaggccacgctggaggagctgagctacgccgacctgctcctccacgtcatcgacgcctccaatcccctgtggcgggagcaggcggcggtggtggagcagctcatcgtggagctgggggcggagcagaccccccgcatcgacgtgttcaacaagtgcgacagatttaccggcgacatccttccccacggggcggacatcgtgtccatctcggccaagaccggccaggggctggacgagctgctgaagaaaatcggcggccgcctggacaccggcgcctgccgggtggtgctccgcctgccctacgaccagggcggcgtggtggacatgctccaccggcaggccaaggtggagcgggtggactacggcgaggccatcgaggtggaggcggtgtgtacccccgtccagcttggccgcctgaaggactatatcgtgtcgggctggacgccccccaaggagccctgggaggactgagaggcgccgtaaacggcgcgataccccctccgcgctccgagggggttcaatgcttgcgatataaggaggaaccgccatgcagttactggagactgaccgcctgctcctgcgccccttcaccctggacgatgcggaggggctgtacgcctacgccagccacccggaggtgggccccccggcggggtggcgcccccaccggagcgtggaggagagccgacaggtcatcgagaacatcttcgtcccctcggatgccctggcggtgctccgcaagtccgacggccgcctgatcggttcggcgggctttgtggaccggcaccgcacggagctggggacgcccagcgaggagatcggctattccctggcccgggactgctggggccaggggctgatccccgaggcggtgaaggagattatccgccacgccttcgccgacctgggctaccaggccctgtgggcggcctactacgacggcaaccgcaagtccaagcgggtcatgcagaagtgcggcatgacctaccgcctctcccgtatcgaagcggtggagcagctgggcgagacccggctggcccactactttgccgtcacccgaagggagtgggagcgatgaccgagtattttgtccccaccggagcgtccgagactgagctggtggagaaacgctcccgctttctcggccgcgtctggccggtggagagcgaggaggaggccagggcccgcattgaggagatccgaaaaaagcactacgacgcgcgccaccactgctggtgctaccgcatccgggaggggggcgtggagcgatactccgacgacggggagcctcagggcaccgcgggccagcccatgctcaacgtcttccagcgggagggggtcaccaacgtctgctgcgtggtgacccgctactttggcggtatcctgctgggggcgggggggctggtgcgggcctacacccagtccgccaaggacgccctggacgcggcgggcatctccgtggtgcgccgctgggtggaggtggccgtgccctgcccctactccttctttgagcggctcaagctggagctggaggcccacggcggggtgctgggggaggtggagtacgccgccgacgtcacggtgcacgccctgctgcccgaggagcgggcagaggccttctccgcccggctcaccgagctggccgccggcggagtggccgcccaggtgtgcggcgagtccttccaggcggtgccccggacacaagtatgaacaaatcatgaatcttttgcaaaaaagaaggatttttccgaggaaagaagtatatagttacagagactgctgagaggtaggtggtatctgtgaccctgcgcgaacagaccgaggcgctggagcgggagatgctctccccctttgcatgcctgtcgtcccaatcccgggggcggcagacgccgctggagccctgtcccacccgcacctgcttccagcgggacatcgaccggatcatccactccaaggccttccggcggctcaagcacaagacccaggtctttctggagccggagggggaccactaccgcacccgcatgacccacaccatcgaggtcagccgcatcgcccgcaccattgcccggggcctgcggctcaacgaggatctggcggaggcggcggcctacggccacgatctgggccacacccccttcggccacgccggggagcgggtgctcaatgaaatcctgcccggcggcttcgcccacaacgagcagtccctgcgggtggtggaccggctggaaaaggagggggagggcctcaacctgacctatgaggtgcggcggggcatcctctgccacaccggccccgaccgggcggagaccctggaaggccagctcctccggctggccgacaagatcgcctacatcaaccacgacattgacgacgccatccggggcaggatcatctaccccatggacatacccctgtccatctcccaggtgctgggcttcacccactcggagcggatcaacaccctgacggtggacatcatcacccagagcgccgggcgggacgcaattctccagtcccccgcctgccgggacgctatgggcgagctgcgggcgttcatgttcgagtttgtctaccgcaatccggtggccaagggggaggaggggaaggctcaggagctgctccgccgcctgttcgactactaccggcgggagccggacaagctgccaccggagtttcaggacatcaggatggaggagggcgtggagcgggccgtctgcgactatattgcgggcatgaccgacgtctacgcggtggagtgcttcaacgcggcgttcattccgaaatcctggagcgtgaagtaggcgcggacaggcaggccgcgcgggagggtataagcctggtatattgtggaaaacatagtcggaaggagggcgcggcgtgccgattcccgaacaattcatcgacgagctggtggcccggagcgagatctccgacgtggtttcctcctatgtccacctgacccggaagggaaacaacctgtgggggctgtgcccctttcacaacgaaaagacgccctccttctcggtttcgccggataaacagatttaccactgcttcggctgcggcaaagggggcggggtgatctccttcatcatggagatcgagaacctgccctttcccgacgcggtgcgcctgctggcccagcgggcggggctggaggtgcctgacacaggcgccgatgacgccgggcgcaaaaagcgggcccgggccctcgcggccaaccgggacgcggcccggttttaccacgactacctcaagggccccggcggtgcgcgggtgcgggactatctggcccagcggcagattgcgccgcgcaccgccacccgcttcggcctgggggcggctccggagcagtgggacgcgctgaccagggcgctgaccgccaagggatacagcaagatggagctcatcgacgccgggctggccgtggcgggcaagaacggcggcgtgtacgacaagtttcgcgcccgtctcatgctccccgtcatcgacgtgcggggggaggtggccggcttcaccagccgcatcctgccgggggaggagggggccaagtacctcaacaccccggagactattgccttcaagaaggggcggctgatctacgccctcaactttgccaagagcaccaagcggcccaatctggtgctggtggagggcaacatcgacgtcatcaccctccaccaggcggggtttgacaacgtggtggccaccatgggcaccgccctcaccgaggagcacgcccggatactggcccgctacaccaaagagctggtgctctgctacgacaacgatacggcgggtaagcagtccaccgaccgggtgctcaacattctgaaaaacgccaacctgaacgtccgggtgctccagctccccaacgcctacgacgcggagggaaagcccatcaagcaggatccggacgactttgtgaagaaattcggcccggcggcctttgagaagtgcctgaatggcagcgcgggccagaacgactaccggctggagaccctccagcagaagcacagcctggccgacgaggaggggcgcatggcctttctcaaggaggcggtagagacggtggcggcgctccagagccccatcgagcgggagatctacggcaacaaggccgcggccgccgcgggcatttcggccggggcctttgcccaggaggtggagcggttccgcaagaaccgggcatggcaggcccgcaagaagcaggcccgccgggagctgacgccggaggcccagctccagccccgggagcgggagctgcggtatgagaacctccgctcggcccgggcggaggagggggtggtgaggctgctgctgctggagcccgacctgttcccccaggtggaggggctggggccggagcagttttccgccccggtgctggccaagatctacgccctgctgtgccagcgccaccgggaggggcgctctacccagttggccgccctcgccggggcgctctccccggaggagatgagccacctggtgaacgtgatggatcagccggaggccctggcgcacagcgcccaggccctgcgggattacatagagatcattgagaccgaggccctcaagcggggcggggcgggcgcaagcgaccccctgctggcggcacgggagaagttcagagaaagaaaagcgtatggaggataaccgcatgagtgaaaagaagaccaccagcaagaaggtacacaccctgaccctggaggatcagaccaagctggcccaggccaatgtgaagaaaatggagcagggcaagatcgaggtcatgaaggtcgtcgagggcgtccagggggcggaaaagctggcggagctgatcgagcggggcaagaaaaacggcaagctctcgtccagtgagctcatggatgtgctggagaacctggatctggagagcgaccagatggacaagatctacgataccctggagaacctgggcatcgacaccgtgggcgatgactatctgcccgagctggccgatgatatcatgccccccctggaggagctcaacgagattgaggagctccccgaggaggagatggtggaccccaatacgctggtggactccttcggcatcgacgaccctgtgcggatgtacctcaaggagatcggcaaggtgaatctgctcactcccgatgaggagatccagctggcccaggatatgggggccggcgacgcggccaaggagcagatggaggagctggagcaggcccggaaaaacggcgaggaagtctccctcaccgaggaggaggagaaggaactgcgccgcctggtgaagcggggcgaggccgccaagcagcgcctggccgaggccaacctccgtctggtggtgtccatcgccaagcggtatgtgggccgcggcatgctctttctggatctgattcaggagggcaacctgggcctcatcaaggcggtggagaagttcgactacaccaagggctacaagttctccacctatgccacttggtggatccgccaggccatcacccgggccatcgccgaccaggcccgcaccatccgcatccccgtccacatggtggagaccatcaacaaggtcatccgcgtctcccgccagctcctccaggagctgggccacgacccctcccccgaggagatcgccgaggagatgagcatgcccgtggacaaggtgcgggagattctgaaaattgcccaggagccggtgagcctggagacccccatcggcgaggaggaggactcccacctgggcgacttcatccccgacgaggacgcctccgagccgtcggaggccgcctccttcaccctgctcaaggagcagctggtggacgtgctgggcaccctgacccccagggaggagaaggtgctcaagctgcgcttcggcattgaggacggtcgcacccgcaccctggaagaggtgggcaaggagttcaacgtcacccgtgagcgcatccgccagatcgaggccaaggccctgagaaaactgcgccaccccagccgctccaagaagctgaaggacttcctgaactgattctttttttgatgccgtcaggcattgggcgcagtttcggggtccccgcgggagcccagcgcaagcgggtcccgtggggagaggaggagcggcggagcgagggagccttcgccgtccggcggaggcgaggaatgcgcagcccgcgacgacggcgcgccaccccagtcgctccaagaagcggaaggacttcctgaactgagacagtacagcgacgagacgaggcccggaaccgtatggttccgggcctctggcctgtcaaagacctcccgcaaaggaaagccgcgcagagttcctgcggccgcagccgcaggaataaagcaaaaatccgtcgtttccggggacatgtgcctcggaaatgacccctctcatggcggaagtggcgactattttgctggaaatcgagtcccttccgccatgctgtctttctcgaaaaagtggcgctgccactttttcgacacgctggcggggcccggaaccgtatggttccgggccccgctgcgtctcctatgcctcggctccggggagcgggccgcgctccccgtcctggtaggggttgacgtaatccggcgggcagaggtgcgtttcgctccacagcagcatgtggttcagcacaggcagaaagctctcgcccatggccgtgagggtgtactccacccggggcggaacctcgggatagacctcccggtggagaaagccgtcggcctccagctcacggagctgccgggtcagggtggactgggtgatgccgtccaggcggcgcagcagcgttccgaagcgctgtacccggtagaaggccacataccacaggatcaggattttccacttcccgctgagcaccgcctgcaggcggctcatgggaaggcagcgggccagcgcctccggcgtctggaatttgttgtctgccattgcgttccctccctgtcctgacattatagcgggaaaccggaaaaaagcaagacaggatcaaaaaagataccggggcgcaaaaaagaccgtacttgaagaacgggcgggggcaggctatgctgaacgggacaaaccacaaggaggcaaactgccatgcactacacaggcaccatctggcgtccgccctatgaatccggctccctgctgctggaggcggccgccggctgcacccaccaccgctgcaagttctgcacgctttacgacgagctgcccttccgcttccggctctctcccctggaggacattgaggcggatctggccgaggcccaggagctgctccggggacagctcgtccagcgggtctttctggtgggggcaaacccctttgcgcttcagacggagcggctgaaggccatcgcggggcgcatccgcaagtacttcccggagtgccggaccatcggctgcttcgcgcgggtgaccgatgtgggacggaaaaccgatgaagcgctccgggagctccgccgcctggggtacgacggcctgaccatcggcgtggagacgggatacgatccggcgctgctcttcatggacaaaggctatcaggcgcgggacatcgtggaacaggcgcaccggctggacgaggcgggcatcgcctatcactttttctatctggctggaatcgctggggccggatgcggagaggcggcggccctggccagcgcgtcggtgttcaatcagaccagcccccgcatcctgggcagctccatgctgacggtctatccccagtcccggcttttttcggagatgcaggccggccggtggacggaggccggggaagtggagaagctggaggagctgaaaaccctggtggagcacctggagcggcccctctattttgcggccctgggagcgtccaacgcggtttcggttcacggctttctgccggaggagcgggacgccgtggccgccaagctggcgcgggcctgccgcccggagcacgaggacgccctgcgccgttaccgggccggtctgcggcatctgtagtggaaataatgcttgaaaaacatatatgaatagtataatatagaaaaggaaagaaagtgggcatactggtttccaaaggaggcatgcaggttgaataacattcagaaggcggccgtcatcggctgcggctttgtaggctccagcattgcgttcacgctgatgcagagcggcatcttttccgagctggtgctcatcgacgccaaccgggacaaggcggagggggaggccatggatctgtcccacggcctgcccttcacccaccccatggacatccgggcgggggactacgatgacgtggccgactgcgccctggtgatcgtcaccgccggtgcggggcagaagccgggggagacccggctggatctggtgcacaagaatgtggccattttcaggagtatcatcccggagatcgcccggcgcaatagggacgccatcctgctcatcgtgtccaatcccgtggacgtgctcacctgggcggcgtggaagctgtccggctacccggccaaccgggtgctgggctcgggcacggtgctggacaccgcccggctcaagtacctgctgggggagcgcctgggggtggacagccgcagcgtccacgccttcatcatcggcgagcacggggacagcgagctggcggtgtggagcggggccaacgtgtccggcatctccctggatcacttctgcgagctgcggggctactacgagcacgacaaggccgacgagtggctccagcgggaggtgcgggacagcgcctatgagatcatccgccgtaagggggccacctactatggcgtggccatggcggtggagcgcatcgtccgcgccattgtgcgggacgagcactcggtgctcccggtttccaacctgctccagggccagtacggcatcgacggcctgtgcatgagcatacccgccgtggtgggccggaacggggtggaggacaccctggagatccccctctccccggcagagcgggaggccctgcgggactccgccgccaccctgcggggcgtggtggatagcctggagctgtgagaaaatgcgaaaacggagcccggcgcacaaagcgcgccgggctccgttttttgtccgcccggctcaggggatcaccagccaggctacccgctgggcgttgtcggagggccagttgtcataggccgcgctcatggagacctgccaggcatcctcaaacacagcgtagcaggcggccagcttcccgtcctgggcggcgggggcttcaagcatctccaccggctgtccgtctaccagagcggtggtgctgcccggcgtcagaatgatggtgacgccccggtaggtcatggcggcggtctgggcctcgttgctccatacgcagtccacccccagcccttcacacagggcccggacggggacgctgtagccgccgccctccgacaggcggtccatcaacgggatctggaagggatagagggcgggatctatctctacaggctctggtctgccgccgtccaggggataggccatgccgttgaacactaccgcatccacctgggagagctccagcacagagcggagcggatgggcgtagtcgcaatggattgtgcctcgatcgttccaggaggtggggccaagcaaattgtcgcccacgatctgcccccagccgcacagggagccgtcggtcatgcggaagaaaagcagggggaaagcgtcgccgtccgcgtcggcaaaggagtattccatctgaatggagagaggagacagactcacggtttccagggtaacaggggcaccaccctcaatgtgatcaaaggtgccggaaccggtaccctcagcattaacctccacggtaacaggctctaccagttccacgggaatctccacgtaggagccctccttcataaggcccagccggagctgcacggcgtagacggcggcattcagctcatcgactctcatactgtaggtgcgggaggtctccgtgcgcagcgcctccttttccccatagctgaatccacctgccacgggcatctcgacggcagggccgtttccggtaggagtgggctccggcttgacggcctcgttctccagagcacggacagagaaggtgtccatgttctcgaagtcatccgccatgagggcggctgctgccgcgtcatttttggcctcaatggtgaccagcagataggcggagctggtgtccgccaccgagctgatcaccgacagggtgtagttgtcgtcacggatggaatatgtctcatggcttacgtagtcctcaaccggggtattgtccccctcaaagtagaagtccagcacgttccaccggctggctacggccagggcggagccggccagcagggccgcgatggcggccgccgccgcggcaaatcggagtttctgtctcatataggctctcctttccgaggggacggcgttcagcgcggcgttgacccgccgcttgaccgccgccgggtcggcctggggacagggcacgcccaccggtactgcgccgtcccacagctcctgcatccggtctctcacgcctccacccctcctttcgtcaatgtatcccgcagggtcttccgcccccggaacagccgctgcttggcggcggtctgggtcaggcccagggcacgggcgatgtccttgagcttgtcgccgcagtagtaatagcgcaggaacagggtgcggtcgggctcgtccagcccctccaccgcgtcccacagccgggccgcccactcccgccgctccgcctcggcctgggggtccgcgccgccgggggcggcggtgtcctccggcagaggggcggcctctttgtgggtgcgtagccagtccgccgccctgttccgggccaccgtccccagccagggccgcaggccctgctccgggttcagctccccggcgtgggcccacagggccaggaatacgtcggcggtcagctcctccacgtcctcccgggcgccctgcccggccagcacccgcaccacgacggcgctcacatagggggtgaagcggtcgatggcccgctccagggccaggcggctgccctgccggagcttctttgccagcgtgatctcgtccagcttgtccccctcctctccaagaaccggttctatcagtatatacgaagcgggggcggtttggttacggaacaggcaaaaaagtttccccgaggcctggcctcggggaagaaaaggagctcagtgcaagtcgggcagggcggcgagcaggccgtccacgtcctcctgggaggtctggaaacaggtgacgaagcgcaccacggtatggctcccgtcataggggcaccagtcctcgtaatcgcacaccgcgtcgagctggggcttgagggcgttgtccaccacggcgaacacctggttggtgggggagtccacccacagcgtccaccccttggccctcagcccgtcctggaggcgggcggccatttcgttggcgtggcgggccatgtggaagtagaggtcgtcggtgaacagggcctggaacatgacgccctgaatccaccccttctccattaccgcgcccatgcgcttcttcatgcggaagaagccgtcggtcagctcgggccgggtgatcaccagggcctcgccgaacatggcgccgttcttggtgccgccgatgtagaaggcgtcgcacaggcgggcgaactcaggcagggtcagatcgttggccttggaggtgagggcggcccccagacgggcgccgtccacgaagaggagcaggccgttctcccggcagaaggcgtacagggcggtcagctccgccttggtgtacaccgcgccgttctcggtggcattggagatgtagaccaggcccggcttggtcagatgggggtcctggtggagggccagcaggggaggcagcatctccggggtgatcttgccgtcgccgcccacgggcacggggaggatcttgtggccggtggcctcaaacgcgcccacctcgtggccgttcaggtggccggagtcggggcagatggccgcctcccacggcttgagcaggaaggagcaggccaccacgttggtctgggtgccgccgatgaggaactccaccatggcgtcggggcagccgcacacctcccggatgcgctccttggcccgggcggtgtacccgtcgtcgccgtagccgtggttgccctccaggttgacggcgcacaccgcctccagaaccttggggtgggcgccgaaggagtagtcgttgcggaagagatactttttcatcacgcatacctccagttgttttgcgaaaaaggcgggcggccgcaggccggggtgacctgcggtcgcccgccgccgttctgtggcttaaaatttgaaggagtccttgaggctcaccgagcggttgaacaccagatggccgggggcgctgtccttgttgtccacgcagaagtagccctggcgcaggaactggaaggaggcgggggcctccgcgccggccaggcccgcctccaccttggcgtgggggagcacctccagggagctggggttgaggcagtccaggaagttcttgtccccggcgtccggctcggcgtcggtgaacaggttgtcgtacagccgcacctcggcgtccacggcggtggcggcgtccacccagtggatggtggcccccttcaccttgcggccgtcggcgggatcgcccccccggctgtccggatcgtactcggccagaatggcggtgacgttgcccgccgcgtcggtctcatagccggtgcacttgatcacataggcgcccttgaggcggcactccggcccgtcggggtagaggcgcttgtacttgggcaccggcgcggggagaaagtcctccgcctcgatatacagctcccgagagaaggtgacctcccgcgcgccgtcctccgggcggttggggttgttctccacggagaaggtctcgctctgcccctcggggtagttggtgatgatgaggcgtaccgggcggagcaccgccatgcgccgctgggcggtctcgttcaggtcttcccgcaggcagtgctccaaaaaggcgtactccacggtggaggccgccttgctcacgccgttgcgctcggagaaattgcggatggcccggggggtgtagccccgccggcgcaggccgcagagggtgggcatgcgggggtcgtcccagccggacacccggccctcctccacaagctggcggagcttgcgcttgctcatcacggtgtagttgatacccaggcgggcgaactcgatctgccggggcttggcggggacggggcagttggcgatcacccagtcgtagagggggcggtgatcctcaaactccagggagcagagggagtgggtgatcccctccagcgcgtcctccagggggtgggcgaagtcgtacatggggtagatgcaccacttgtccccctggcggtggtggtgcatgtggttgatgcggtagagcaccgggtcgcgcatgttgaagttgccgctggccaggtcgatcttggcccgcagggtcatggccccgttggggaactcgccggcgcgcatccgggcgaagaggtccagagactcctcgatgggccggtcgcggaagggggagcgggcgggagtgttcacgtcgccgcggtactccttaaactgctcgggggtcagctcgcacacgtaggccaggccctttttgatgagctccacggcgtactcgtacatcttctcaaagtagtcggaggcgaagaagaagcggtcgccccagtcgtagcccagccagtggatgtcctcttggatggcctccacgtactccacgtcctccttggtggggttggtgtcgtccatgcgcaggttgcacaggccgccgtacttctcggcggtgccgaagtccacgaagatcgccttggcatggccgatgtgcaggtagccgttgggctccggcgggaaccgggtgtggacggtcatgccttggaactgaccaccctgggcgatgtcctcgtcaatgaaatcatggatgaagttctgcgtcatggtgggtttcagctcttctggcatgtaaattcactcctttatctcgatacgaactcttattttaccctgaacagcgggaaaaagcaagagagggaggacattccggcatattttttccagaagggcggagaaaattgcataaaagggggcgtgggaagggggagagggcccggatagttgtcacaaagtgcggaaagggaggcccaaagcccttgacagagggaggcggaacacggtatacttacgacaatcgttgtgaacaaaggcgttccgaccccaagggcggagcgccttcatttttaaagcgaaaggggcggcagaccatgggggtctacagcaaagaggacatcatccgcatcgtccgggaagaggaaatcgagttcgtgcgcttgcagtttaccgacattttcggcatgctcaaaaacgttgccatcaccgcgtcccagattgaaaaggcggtcagcaaccagtgtatgttcgacggctcctccattgagggcttcgtccgcattgacgagtctgaccagtacctctacccggatctgaagagcttccgggtgtttccctggcggcccagccacggtaaagtggcccggctgatctgcgacgtatacaacaccgatggaacccccttcgtgggcgatccccgctacgtgctcaagcgggtgatccagaaggccaacgacatgggctacgaccgcttcaatgtgggcccggaggcggagttcttcctgttcaagaccgacgaggagggcaagcccaccacccagaccaacgacgaggcgggctacttcgacctgggccccctggatcacggggagtccacccggcgggagatctgcatggcgctggagcagatggactttgagatcgaggccagccaccacgagtgcgcccagggccagcatgagatcgacttcaagtacgccgaagccctccacgccgccgacaacatcatgacctttaagctggcggtcaagaccctggcccagcgcaacggcctccacgccaccttcatgcccaagccgatcttcgggatagcgggctccggtatgcacaccaacatgtccctgttccgcaacggcaaaaacgccttctacgaccccgacgatccccgcggcctgtccaaagaggcgtacagcttcatcgccggactgctccaccatgtgcggggcatggcggcggtgaccaaccccctggtcaactcctacaagcggctggtgcccggctacgaggccccctgctacctggcctggtcggcgtccaaccgctccgccctcatccgcatccccgccagccggggccagggcacccgggtggagctgcgctcccccgacccctcctgcaacccctacctggccttcgctgtctgcctggccgccggcctggacggcatcgagaagggtatgacgcccccggcggagatcaccgagaacatctacgccatggacgccgccgcccggaaggcccacggcatcgagagcctgcccggctccctggaggaggccctccgcgccctggaggccgaccagttgattctggacaccctgggggagcacgtggccgccaactacctgacgggcaagtggcgggagtgggacgagtaccgtacccgcgtgtcctcctgggagcgggagaagtacatcatcaactattaaggccccgtggagacggtggtcgtcgcctttgagggcgagaaaaacggccggagactcaaggagctgctggagagctccgggacggccgcctgcctgctctgccgtaccgcggatcaggtcaagcgcctggtccgccagcagcggctcaccgccgtggtgtgcggctataagttcccggatgggacggcggaggagctggccggggaactgcccggcttctgcacggtgctgctgctggccccccgcggcctgctggagctggtgccggagcgccctggactcctccgcctctccgcccccgcaggcaggcgggagctgctcgccgcggtggaggagctgcttcggctgggcgaggaggccggagccctcctgccgccccggcggagccgtgaggagcgggaggtggtggagcgggccaaggagcggctgatggcgcgcaacggcatgaccgaggaggaggcccaccgggccctccggcggcggagcatggaccgccgcatccccctggcagacgcggcgcggatgctcttggacgaggagcgtcccgccccttgacaaaggggaaaaattggcgtagtatgtctttcgacaacttgatagcatggacagtgccgccctccggggcgggtaaaagggaatcgggtgcaaatcccgaacgatccggtcactgtaagcggggagccggccgcagacgccattgtggagacacgagaaggcgcggcccggcggagagccgtaagtcaggaaacctgctgtctgtgcagaaggataggtgtcttccgcagaaagtagcctgtctgtttgccgccgtgtggtccgattgtgcccatggcgataagcagtcccgctttccgtcggaaagcgggatttttctgtccacagcacaaaaaaggaggattatcatgaaaaagctcgtacccctgaccctcgccctcgccctgggcctgacggcctgcggcaccgccggccagaatccggccccggcggccagccctactcctgcgggggatgtccagggcgcggaaaccccggcaaacaccgagggatttccctttaccctgaccaccaaggacggcgcggaggtcacatttacccacgtgcccgaaaaggtcatcgccgccaacgccaacgcgggcgaccaactgatggccctggggctgggggataagatcatcgccaccgcctacaccaactccgacatcaaccccaagtgggacgcggagtacaaggccatccccgaggcggcggagacctacatctccttggagaccgttttgagcctggagccggacttcgtctacggccgctccagctcgtttaccgagaagtacaacaccgagcatgacaccctgaccaagtacggcatcatgtccctgtcctccattgagggctacaccgtgggcgccgatgtggacgtggtgtaccaggacttctacaacctgggccgcatcttccaggtggaggacaaggccgaggagatcgtcagcgggatgaagggcaagatcactgccgccgaggaggcggtggcgggccaggaggccaccccggtgttcgtctttgacatggcccaggaggagggagcctacacctgcggcaacaacttcacctcgaagctcatcgagcacgcgggcggcgtcaatatcttcaacgatctggacaccacctgggccaccgtgagctgggagacggtggtggagcgggcccccgaggtgatcgtcatcaacgactacggcgatacctctctggaggagaagattgcccagctcaaggagaaccctgccttggccacggtgccagccatccagaacgaccgcatcatctccgtcaagctgtgcgaggtgtttgccagctccatgacgggcgacacggtggagaagtttgcccgggccttccaccccgactgcttcgcgtaagagggcggtatgaagcagttttgcaggctggtgaagactcacacctttctgatctgtctggtgctggcggcggcgctcctggtgtccattgtcatcggcatcggcaccgggccggtagccatcccctttgccgaggtgtggcgggtgatgtttcaccggctgggcggcctgctgaccggctcggagctccccctggagggggtgcgggagagcacccagaacatcgtctggttcctgcgggccccgcgggtgctgctgggggccctggtgggggcggccctcaccctttccggcgtggggatgcaggcattcaccaagaatccgctggccgagccctatgtgctgggcatttcctccggcgcatcactaggcgcggtgctggccatgctgctgggggtgtccctgcctgtgctgggccgcctgtcggtgtccgccggcgcctttgccggggctctggtgtccatcctcctggtgtaccttctggcccgcacccggaatgcggtgacgccgatccggctgatcctggtgggagtggcggtatccgccatgttccaggcatttaccaactacatcgtctataccgccccggacgacgccgccgtccgggaggccaccttctggatgctgggaggactgggcagcgcggagtgggccgacgtgccactgctggccggcctggtgcctccggccctcctgctgatgctggccctggccaagcccctcaacgccatgatgatgggggatagctccgccgtcaccctgggagtcaacctgacggtggtgcgcaatgtgctcatcggcgtcaccgccctgctgaccgcctcctcggtggcggtcagcggctgcatcggctttgtggggctggtcatcccccacctggttcgctcggtggtggggccggatcaccggaagctggttcccctggccactctgttcggggccatctttctcatctgggtagacgtgggagcccggatcatcaagccgccggcggagatccccgtgggaatcctgacggcgttcctgggcgcacccctgttcctgtggatgatcaaggtgcgccgctatgaattccagtagggggtccgcgccatgatagaggcaaaacaggtccggtacggcatccgcagccgggagatcctccggggcgtggatttccgggtggagaagggggagttcgtcgggctcatcggccccaacggcagcggcaaatccacattcctcaaaaacgtctacaaggtgctccgcccccaggcgggggagctgaccctcatgggggacgatctgctggccatgagcaaccgggagatggcccagcggcttgccgtcatggtacaggagcaggaggccgccttcgatttcacggtggaggaggtggtcatgatggggcggcaggcccgcaagcggctgctggagaccgacagccgggaggaccgggcgctggtaggggagatcctggcgcgcaccgggctggcctccctgcgggagcaggggttctccaccctgtccggcggggagaagcagagggtgcttatcgcccgggccctggcccagcagacggcggtgctggtgctggacgagccgaccaaccacctggacatcaagtaccagctccagctcatggagctggtgcgggggagcggatgtaccgtagtggccgccatccacgatctcaatctggccgcggcctactgccaccggctctacgcattgaaggacggggtgatcgtgggggagggcgcgcccaaagagctccttacccccgcttttctgcgggaggtgtatgaggtggaggcggaggtgctcaccggacgggacggctccctgcgggtgttcttttacccgtcccgcatatcataaaaacggcccccgggcagcgcccgggggccgttttattctgccagccagtcgaaagccaggcggggggtgccgtcctccacatagatggtgccgcaggggagaaagccgtgcctggcgatcagatggcgcatgacggcgttgttttcgtgggtgtcgatgcgcaggtgggacatgcgtctcttacagaagtccatacaggcggtaaacaggccgtgaaccgtgccgtcgccggccacccggtggatggtgccgtagggtgcgccggagcgccaggccccctcgatgacgcggtagttgggctcatcccccaggcggaggacaaaggccccatggatgactccgtcctggtcaaagacgtacagctcaccccgctgcagatccgcctccagatcctccgggagggggtaacggtcgctccactgggtggggttgccgtgctcggccatgaagcggcgggccacgccgtagacgggacccagagcgggcagatcgtcgggccgcgccggccggatcataggtgccgcctctgcggaccccgcgcccggcccatcggcactcaagagggcttccagatggaccttttgcggcctcagaccgcaggattcgtaaaattttatggcggagggattgcagctccatacattgagcgtcagattatagcacccgcttttccgggcgaattccgccgcgtaggcatagagggccccgccgatgtgctgcccccgaagcgcctcgtccacacacagatcatcaatgtaaagagtttttacatccgtcaggatgttgtgattgacatactgctcaaattgacagaagacgtagcccagcacccgctccctgtcgtccacggccacaaaaatgggcgtattttcatcgtttattttctgactcaactgggtatccgtgtactttctgcccccggcccggaagagatccggccgcccggtgtgatgcacctgagccacctgagccaaaagttcatggatgcgggggatgtctctctcctctgctctgcgaataagcataggtacctccttcctaaccgccccagaggcgccccggcggagcggggacctctgtcctgtgttcaggagcaaatcataccacgttccgccccggctgacaaggccagagccccggctggtggtccttttcccgaacgaaccggcccgggatcgcaaaattttgattgcctttaggcgcaaagtgccgtatgatggaggctggtgatgccttttgaaaaaattgcttcgggtactggggcggctgtttctggcgctcctgtttttagccgccgctgcgctggttaccctgggcctgctgcgctggcggggcctgatccttctgcccgacgaagcggacccagacgagtgggaggtcttcggcgtggacgtgtcctcctaccagggggaggtggactggcccgtcctggcggagcagggggtggactttgcattcattaaggccacggagggctccctcctccaggacaggcggtttgccgccaactgggctggagcggcggcggccggagtgcgggcgggagcctatcacttcctcagctatgacagccccggcgagacccaggcggacaattttatcgctgcggttccggtgaccgagggggccttgcccccggtggtggatatcgagttctacggggaatatctggacacgccgccggagaaggagcgggtgcgggccattctggaccccctgctggagcggctggaggcccactacggtgtcaagcccattctctacgtgacctaccgctcttactaccgctatatcgctgggggcggctacggggactatcccatctggtgctccagccccacggtgttcccgctggtgcccggctgggacttctggcagtactcccactccgccgagctggagggctactacgggacccagcggcgcattgatctgaacatcttccggggcagccgggcggaatttgagcggtttggatagaccggacggggacaggcgagaaaaaacgcctgtcctcttctatttccgccggaattctggtataataataaaccaatgtattttgcgtgtgggaggtcgctatggaccgatttgagagactggcgggtgccctgcggcggatacccggcctggaggtgcgggaaaacgagcccatgaagaggcacaccacgttccgcatcggcggcccggcccggctgatggcgctgcccaggagccggaaggaggccgccgccgccgtgcgggctgccacagaggttggaatcgccccttttttcctgggaaacggcagcaatctgctggtggccgaccacggctatgagggctttgtgctcaaggcgtgcggcctggatcaggtgcgggaagtcaaccaccgtctgcgggcggagagcggtatcaccctggcccggctggccaacgctgccctgggccgggggctcaccggcctggagtttgcccacggtattcccggcacactgggcggggccgtggtgatgaacgccggggcctacggcggggagatggtgcaggtgctcactgccgtcacctacctggacggggcgggggaggagcacaccctgcccgccgccgcgtgcgccctgacctaccggcacagccggttctccgaccgcccggactggcttgtcctggaggcggagctggagcttcggccaggagatggagaggccatccgggcccgcatggacgaactggccgccaagcggcgggagaagcagcccctggagtggcccagcgggggcagtaccttcaagcggccggagggccacttcgccgccgcgctgatcgaggggtgcggcctcaagggcgtggggatcggtggagcccaggtgtcggaaaagcatgcgggcttcgtggtcaaccggggcggcgccacggcggacgatgtgcggcggctgatggcgctggttcaggagacggtgctgcgggagaccggcgtggcgctggagccggaggtccggctgctggggttctgacggggcgcggaaaaaggagattgcaatggaatttatcattatatccggcctgtccggtgcgggaaagagtaaggtggcctcctttctggaggatatcgggttctacgtggtggacaacatgcccgccccgctgatgcccaaatttgccgagctgtgcatggccgggccgggccgctatgaccgggtggccctggtcaccgatatccggggcggccagaccttcgatgggctgtttgacgccctccacgagctgcaccgcatgggctgtgcgtataaaatcctctttgtggaggccagcgtagagaccatcatcaagcgatacaaggagacccggcggatgcacccgctgtcctcgacctcccgctcgctggacgaggcggtgcggcaggagcgcaccgtcctggcccccgtccgccagcgggcggagtacatcattgacacctcggccctctccaccgccaagctgcggggggaggtgctgcggctgttcggggatggggggagtaccccggccatgagtgtcagcgtcatctccttcggcttcaagtacggcatccccatcgaggccgacctggtgttcgacgtgcgctttctgcccaacccctactacatcgccgagctgcgccatcagaccgggctggacgagggggtatacagctttgtctttggctatcagcagaccaaggactttatggcccacctggagagcctcatcggcttcctcctgccccagtatgtggaggagggaaaggcggcgctggtcatcggcatcggctgcaccggcgggcagcaccgctcggtggccattaccaaggccctggccgacttcatcaagcagaagggctatcaggccacggagaaccaccgggacatgacgcgggcgtaaggaggtggacactatgacggaatggaacggcggagcgggccccaggattgtggccatcggaggaggcaccgggctgtccaccatgctgcgggggctgaaaagccgcacccgcagcctgacggccatcgtcaccgtggccgacgacggcggcggctcgggcatgctgcggcaggatctgggtatgccccctccgggggacatccgccactgcatggaggccctggccaacgccgagccggtgatgcagcagcttctgacctaccgattcccggagggctcgggcaacctgacggggcagtccttcggcaacctgatcctggccgccctcaacggcatctccgactccttcgaccaggcggtggcccgcatgagcgaggtgctggccatcagcggccgggtgctgcctgtgaccaatgagaacgtggcgctggaggccaccttcgagaacggcacccgggtgctgggggagtctaagatcagcgccttcaagaaggagcaggactgccgcattgagagcgtccgcctgctgcccgagcacccaaaggccctgccggaggcggtgcgggccatcggggaggcggagctgatcctcctgggccccggcagcctttacaccagcgtcatccccaacctgctggtggacggcattgccgacgcggtgcgtgcctccgacgcgctgaagatctacatctgcaacatcatgacccaggacggggagaccgagggcatgaccgcctctgaccacgtaaaggccctgctcgaccactccgggccggggctggtggatctgtgcctgtgcaactccgcgccggtgcgccccggcctggtggagcggtacagagaggaggacgccgcccccatcgtggtggaccgggcggccatcgaggccctgggggtggaggccgtcacccggcccctggcctccgagacccttaactacgcccgccactcctttgctcgcctggccgaggcggtgatggagctttacaacgagcgggccgacaccaagattttttgagaaagggaggggggcactatgtcgttttcctctgaggtcaaggcggagctgtgccggacggccctctcccgccgctgctgcgcccaggcggaggcctacggagtgctgctctactgcaaccagttcacggcctcacaggtgcgcatcagcaccgagtccaacgcctttgccgcccggctgcccgccctgttccacagggcctttcagctctcctttgaccgcacgccggaggagggggcggccaagcagattttctccatcacagagccggacaagctgtccgccctctggtcggcgttcggccatgagccggcgggcaccctggcccatcacattaactttgccgtgctggaggaggagcactgccgcctggccttttttcggggggcctttctggcgggcggctcggtgaccgacccggccaagcgctaccacctggagctgtccaccccccatctgagtgtcagccgggagctgcgggccctcctgctggagtgtggcttcacccccaaggagaccacccgcaaggccaactccatcacctacttcaagcagagcgaggccattgaggactttctcaccgccatcggcgcgcccctggcggccatggagatcatgaacgccaaggcggagaaggacctccgggggagcatcaaccgccgggtcaactgcgacgcggccaatctggacaaggcggtggacgctgcccaggggcagatcgaggccatctacaggctggaggagcgcggcatgctggaggagctgcccgacaagctcaaggaggcggtggatctgcgggtggcccacccggagctcaccctggcccagcttgcggagctgtgcgaaccgcccgtctccaaatccgcgttcaaccaccgcctgcgcaagctgatggagatggccagggcgtagggcgggaaagaaaagaaagggtagattgccatggagaagcaagtggttcaaaagcgctggaagctgattttctggggccttacggcggcggctgttgcgctgctggttccgggcctggtgctgacgctggagccggcgctgtttctggggctgggcgttctggcggctgtggtattctgcacgggtctgtgtattgctgtgatcaagctccggtgtcctgcctgcggcggctcggtgtaccaccaggccatgcgggcgcaggagggcatcccctttgcctgcccaaagtgcggccggaagctggagatgaaatgagatgaaaaagagaagagacgcccgaaaaaccaggcgggtgctgctactgcctacggtactcgcctttgcgccccgctgtcctctctgcggggccatactgaagataggtattgaccattgccactactgcggagccatgctcaccaaatagagaaagaggaggtactcctaatgtcctttgtccacctgcatgtgcacaccgaatattccctgctggacggggcctgccgcattcccctgctggtcaagcgggtgaaggagctgggccagagcgccgtggccatcaccgaccacggcgtcatgtacggcgtggtggacttctacaaggcgtgcaaggcggagggagtcaagcccatcatcggctgcgaggtgtatgtggccccccggaagcgcaccgacaaggtacacgagtacgacgcggacatgtaccacctgattctgctgtgccgcaacgaggtgggctaccgcaacctgtgcttcctggactcggcggcctttacggagggcttttatatcaggccccgcattgacaaggaactcttgcgccagcatgccgaggggctcatcgccctgtcggcctgccagtccggcgaggtgccccgcaagcttctggccggggactacgagggggccaaggcagcggcgctggagatgcgggcgctgttcggagaggacggctactatctggagctccaggatcacaagctgcccaacgacccggccatcaaccaggggctcatccgcatccaccaggagacgggtatccccctggtggtgaccaacgacgcccactatctccgccgggaggacgcggagatgcaggacaccctcatgtgcatccagatgggcaagacggtggacgatcccaaccgcctgcggatggagaccagcgagctgtatgtcaaatccactgaggagatggccgccctgttccccgactacccggaggcggtggagaacacggtcaaaatcgcggagctgtgcaatatggacttccagttcggcgtccaccacctgcccgagttcaagttgcccgagggctacactgacggggacgcctacttccagaagctgtgcgaggagggcttcgcgcgccgctaccccggcgccccggcggagtaccgggagcggctggcctacgagatggggattatccgccagatggggtttgtggattacttcctcatcgtctccgatttcatcggctatgccaagaggcggggcatccccgtgggccccggccggggctcggcggccggctccatggtggcctactgcatggccatcaccgacgtggacccgatgaaatactccctctacttcgagcgcttcctcaaccccgagcgggtcaccatgccggatattgacatcgacttctgcatccggcggcggcaggaggtcattgagtacgtccagaataaatacggtgccgaccacgtggcccagatcgtcaccttcggcaccatggccgcccggggcgccatccgggatgtgggccgggcgctgaacataccctatgccgacgtggatgtggtggcaaagcaggtgcccagcggcccgggtgcactccatatcaccctggacgaggccctcaagctgtccaagcccctccgggacgcctatgaaggggacgagcggatcaggaccctcatcgacaccgccaaggccatcgaaggcatgccccgccacgcctccacccacgccgccggcgtggtcatcacccggaagccggtggtggactatgtgcccctggccaagaacgatgagtcggtggtcacccagtacgtcatgaccaccctggaggagctgggcctcttaaagatggacttccttggcctgcgcaacctgaccatcctggacgacacggtgcgcctggtgcagaagagccgccccggcttctctctggcagacatcccggacaacgacccggcggtgttccagatgctctccgagggcaggacctccggcgtgttccagatggagtcggcgggcatgaccggcgtctgcgtgggcctcaagccccagaacatcgaggacatcaccgccatcatcgccctctaccgccccggccccatggactccattccccgcttcatcgcctgcaagcacaacccggacaaggtgaagtacaagcaccccatgctggagcccatcctctcggtcacctacggctgcatcgtctaccaggagcaggttatcgagattttccgcaggctggcgggctacacgctgggacaggccgacatggtgcgccgggccatgagcaagaagaaggtcaaggacatcgagcgggagcggcaggccttcgtctacggcgatgccgggcgggccattgccggctgcatcgccaacggtgtcccggaggacgtggcaaaggacatctatgatgaaatctatgcctttgccaattacgccttcaacaaggcccacgcggtggcctacgccattgtgtgctaccagacggcctggttcaagtgccactacaccaaggagtatatggccgccctgctcacctccgtgctggactccagcgagaaggtggctgagtatatcgccgagtgcagggactgcggcatccatctgctgccccccgacatcaatgagtcggaggccgacttcaccgtgtccggcgagcacatccgcttcggcctggtggccgtcaagggagtgggccggggctttatcaacgctgtgctggctgagcggggcaggggagggccctttgtctccttccctgatttctgccagcggatgttcgacgcggagctgaacaagcgtgtgctggagaatctgatccgctgcggcgcctttgacagtatgggtatctaccgctcccggttactggaggcctatgagcagcttgtggactccatcgcccagaacaagcgcaagaacctggcgggccagttcgatctgttcggcggcggtggggatcagacgcagagcgccccggagctccaggtcaaaaatatccctgagtttacccgacacgagctcatgaccatggaaaaggagacgactggactctacctcaccggccaccccatggacgaataccgggacgtggtcaagcagtgcaaggcggcctctatgggggcgatcctgtcggacttcgcccaggaggggggaccggccatttaccacgacgagcagcgggtcaccctggcgggggtcatcaccgcctcccgcaccaaggccacccgcaacaacagcctgatggcctatgtgacgctggaggacgacaccgcctccatggagatgcttgtgttcgcacgggtgctgggggaggcaggcccctacctgaaggagggggtggccgtcctggctgagggacgcatctccgttcgggatgaaaaggcgccccagctcatgtgcgaccgggtacgccccttggatcaggtgaagggaaacctgcctccggtggagggggaggagagggccaagaagctctatatccgcatacccagcctggacgacccccgctgggagaggatcaagctggtgctcaccatgtttcccggcacggaacagatggtggtcaagtgtgaggataccggaaagcggctgggcacggtctgcctggtccatcccgcgctgatccaggagctgaacgagctgctgggcgcggagaatgtggtcgtgcggtgaggggagccgatgagatgaatattaaaaaactggcctccctgctctttcagcggtcggtgattgtggccctgctgatcttcctccaggctgcgatgctgctgctctatatgctctggttttccagcgacttcatttatgtgtactgggggtgtgtggtgctctccattctggcggtgctgattatcgtcagccgccagaccgacccggggtataaaatcgcctggatcatccccattctgctgttcccggcctttggatggctggtgtatctgctctgcggtggcaacaagctctccgcccgcaagcgccggaagatgcagggtatggaccgcaccatgctggagcagttggagcgggactacaaggcggaggagctgaggccctttggggccgacgcggtgaaccaggcccgctacctggagcactacgcccgctgcccggtctataccaacacctatacccactattttcccctaggggatgatgtgtttcccgccatgctggaggagctgcggaaggcggaaaagtatatcttcctggaatacttcattattagccccggcatattctgggattctatggtggagattttgaaggagaagcatgccgccggggtggatgtgcgggtgatctacgacgatgtgggctccctgaacaccctgcctatgaactacgccagaaaatttgaggcggaaaccggcatcccctgctgctgcttcaaccgcttcaagccggtgatttccatccgcatgaacaaccgggaccaccggaagttctgtattatcgacggccacaccgcctttaccggcggcatcaatctggccgacgagtatatcaaccaaaagctgcggtatggccactggaaggacacggccattctcctcaagggggaggcggtgtggagcatgaccgtcatgttcctgaccatgtgggagtacacccgggacgtggaggaggactaccgccgcttccggccggacaagctgccgccggaggccgcgcagggagcggggtactatgtccagccctacgcggataaccctctggacgaggaggcggtgggggaggcggtctacctcaaccttatcaacaaggccgagcgctatgtgtacgccatgacgccctatctgatcatcagtgacagcgtcaatacggccctgtgcaacgcggccaagtcgggggtggacgtgcgcatcatcaccccgcatatcccggacaaggcattggtttttgagctaacccgttcccactacgagtccctgttggaggcgggcgtacagatttttgagtatacgcccggctttgtccatgccaaggtcatggtcacggacgactgctgcggagtggtaggctctatcaatctggactaccgcagtatgttcctccactttgaggacgcggtgttgctctaccacgacccaacggtactcgacatcaagcgggatttcatcaacacgcagttccgcagccagccggtgacgctggagcagtgcctcggccactcctggatacgccgcctcttccgctccattctgcgggtgctggccccgctgctgtgacaaaataaggccgccccccacagggggcggccttattccgcttcaatccttctcctcgtgttccagcagtgcggagagaacctcattgtaaatccgctccggctcggccttgaagctctccgccaggcggttggcctgctcctgggagccgcagaacagctccagggtgaacagattgcccccgtcatcgtccagaaacatccgggctgagtacccgccctccggccggggctccgtctccgcacgtacttgagcattgcgccgcagaatcccgttgagttttaccaactgggcgctacagttgcgcttgaccgagtaggggaggctgctctcacaggctgcgccgttttcccggcctttttccgtgatcgaatagagcccgtcctccagtgtcagatggccgctctccaccaattcagaaaccgcctcggcaaactcaaagtagccaatgccgtcatcgcagaccgtcagctccgtcagtgtcggaaagtcgatgggcgccgcgacccgggccataaaatagaggatcaaaaatttaatgtccagcttgtcgtggataaagccgtagcgagccatctgggaactcctttccaatagacgagtcaaacataatatgtatttatttattataccgaaaggttgagaaaatcacaagaggtatttttgacttgacgctggtctaaaaatatggtattatcctatactgtcggtaacaaatatatgctggaatagctcagtcggtagagcagctgattcgtaatcagcaggtcgcgtgttcaagtcacgtttccagctccataaagccacaccaatctggatattttaagcgggacgcttagagtatcagagggtgcggcttttttattttcctgaaatttgtgttctaaaaaagatattttcgaggtattccggggcctcggagggaccttcccctggcttgccccagtttccgagcccccaacaggaatcagcgccctatttgaacacagtcagggcacaaaaatccgaaaaaatgatatacaaaaattagtgcgccggtttgttggtttcgtcaaccagcaggccggcgcttttttgctgcccggcgaattcaaaaagggcacacacttttatgtccgctttgctgaatagctttttcgtggataagatggcatgatggcgttcacaagcagcagctcaggagcggccattgaaaaagggcgttttgcacggagaaggaggtaaaagcgcatgaccaaagaaacctattttgaggagctgtccttcgccctgcggcggcgggagttgctaccccggccggtggaggaggacggcctgctcccagtggagtggaacggccgcgtcctgtgccgggtcacggaggcggcggggacgataatgaagtacatgaagctcctggagacggccccgccgctgaaggcggagagcctggcagacggctaccgggtgctggcagaattcaacggtacggtactggccgggaaaaagaccctgctgggggctcaattcgtcacctgggcctgggactatgaccgaagaggcgtcagcaacggccactactacatggaggactaccaaaccgccaaggaggacttcaccttccgctccgggctgatggccagggagcaggtttttgaccgggagcggttggaggagctgcgccaggcggcacagggcttcctatgcggcgagggccccgcctcctaccggcaggaattccggtgccagcgcattctggaccagattcgataccagttacccgaaccgaagcaaaatcaaatacaaaaagagggaccaagcattgaacagtctatgtgaaggcggcgccgacaaaggcgccgccttttactatgcccggcatttatttgcctcctgtacccacaagctgtacgccccggatcatccggcggacgctccgcccgtgccggtgtgcacccgctcagacctgtgcctgggctgcccctacccagcccatggcttcctctgctggagcaccgccggggaatgcatgcggactaggatgaaaaaatccatacgggagggaaaacggatgatgcacgcagtcctgagtaattcgcggcacccggagtacggccagctcacagtcccttttcccatctcccggggcgcctatgacgacacggtggcagccctggcctctttgggtatcggtgacccggtcggccgggactgccgggtggatgagctcaacagcagttttctcatcctgaagcggctggagaaggtagcggtcaacgtggacgagctggactatctggccaagcggctggacagctctgacatcaatgaagccgccaaattccaggcgatgacagtgaaatggggcctgttcgagatgactgacctaatcaacctgaccttctggtgtcagcaggccacgatcatcacagacttttccgatttggaggacattggccgccggcactatatgcccctgaacggcgggagctgcagcactgaggagttggaacggctggatgcccgcaaggcggcgctggatctgatcctcaacagtgaaagcacctgcgtcaccccctacggcgtggtctatgacaacgacatgaagctggaacaccactacgatggccagcacttcccatgctatctctgtcagcccgccatgctggtggtgggtattttcccgaagaatgcgccggagggatcaagcgagaccacatggctgaccctgccctgttctgagcagtagctcaagcgcggcatacagcagtccggcctggacttgggcacggccaacatccggtattaggctgtcatgcttccctgggaggtgaagcaggtgctggccccggaaagggaaagtcccgttgccctgaatatggtcattgcccaggacaccgagtatgtcctgctggacgagcccaccaacgacctggacatctaccacgccgccaatctcatgaagatcgtccggcggctgtgcgacgagctgagcaagacggtaatcctggttctccacgagatcaactaggccgccttctactccgactacatctgcgatcttcaggacggcagggtcgccaagttcggcactgtggaggaggtaatgaccaaagaaaccctgtcggagctctaccaggtggacttcaagatcatgaccatcgcgggccggcctctgtccatctactattgaagcctccgagttttcagtacttttgtcgaaaaggagaaccaccacatgaagaagaaaaccccgcgcgcgctctccctggtccttgccctggcactgtctctggcggcctgcggcacaggagccgctccacagccccagggggatacggtgccccttaccgccctcaacgcccaaaaggagcccgccgaggtagcggtcccctatgatccccagcgcatcgccgttctggatatggccaccctggacatcctggatgccctgggggtgggcggccgggtggtgggtgccgccgacaccagcctggactatctccaaactacgtcggcggcgaggtgtcctgcctgggcaccatcaaagaggccggcctggaggccgtcatggcctgtggccccgacgtgatcttcattgggggctggctggccggcagctacgacgccctcagccagatcgccccggtggtctatctggccaccgacagtgacctgggtgtggtggagagcgtacggcagaacaccagggccatcgcctccctgttcggcctggaggacacggccggggaactcatgaccggctttgacagccgcgtggcggccctggcctccttttccgaaggccgaaccgccattgtgtgggcctggttaccagcggcggcttcaatgtgctgggcaacgacggccgctgctccctcatcggccgggaagcgggctttgccaacgtgggggcggacgcccagcccggcacctccacccacggcaacgaggccagcttcgagttcctcgtggacaaggcccccgactatctctttgttctggatcgggatgccgccattggcaccgacggggccaagctggcccaggaagtggtggagaacgagctgatgaagggcaccgccgcctaccgggacggcaggatcgtctacctggcccatcccgccgtgtggtacaccgccgagggcggcatcaccgcgctggaccggatgctccgggatcttgaggatcccctgctgaagtaaataccgcagagcggaccgggatgagcgccgctcatcccggtccgctgccgttccgcctgcggaatgcttccggctcctgttccgtctgtttaaaacggctatttattcactatactattcttattacgaatatataaaaattattaaccgttgtatctccaatattgcgaatatttatacagaatgactattgcatttttatacgggttggattatactgggaacacattagctgggcggccggccacgccgccccacaggaggtcatcaacatgtctgagatcaagaaagtcgtcctggcctactccggcggtctggatacgtccattatcatcccctggctgaaggagaactacaacgaccccgagatcatcgccgtctccggcgacgtgggacagggggccgagctggacggcctggaggagaaggccatcaagaccggtgcgtccaagctgtacgtcgaggacctgaccgaccagatggtggacgaggtcatcatcccctctatgatgatgggggccaagtacgaggactatctgctgggcaccgcctttgcccggcccatcatcgccaagcggctggtggagatcgccaagcaggagggcgccgacgccatctgccacggctgcaccggaaagggtaacgatcaggtccgcttcgaactggccatcaagcgctttgcccccgaaatgaagatcattgccccctggcgggagtgggacatcaagagccgggacgaggaggtcgactacgccgaggcccacaacgtccccctgaagatcagccgggagaccagctactccaaggacaagaacctgtggcacctgtcccacgagggcctggacctggaggatcccgccaacgagccccagtacgacaagcccggcttcctggaaatgggggtctcccccgccatggcccccgacgcccccgcctatgtcaccatcgactttgagaagggctggcccgcggccgtggacggagtgaagatgaaggccagcgacctcatccgcaggctcaacgagctgggcggcgccaacggcatcggcctgctggacatcgtggagaaccggctggtaggcatgaaggaccggggcgtgtacgagacccccggcggcaccatcctctaccgggcccacgaggtgctggagcagatcaccctggacaaggacaccaagcacatgaagcagaagctggcggtagacttcgccgacctggtctacaacggcaagtggttcacccccctgcgggaggccctcaccgccttcgccacggacactcagaagtacgtcaccggcaccgtgaagctcaagctctacaagggcaaccttatcaccgcctccatctcctccccctgcaccctgtactccgaggatctggtcaccttcggggagagcgactacgaccagacggactcccagggctttatcaacctgtggggcctgcccgacaaggtccaggccctgcgggagcagggaaagctctgagcggagaccctgtctgatatctttttccgcctgcggacggcaaaactccgcgaggcaaaaggagcgatactatgaaactgtgggccggacggttccaaaaggagacggatgccctggtcaacgacttcaactcctccatttcctttgacgcccggatgtaccgggaggacatcaccgggtccatcgcccacgcggccatgctgggcaggcaggggatcatcaaggagcacgaggccgagaagatcatcgacggcctcaaggccatcctggccgacattgaggccggacaggtggagttctccctggagaacgaggatatccacatgaatatcgagaccatcctcacccaacgcatcggggacacgggcaagcggctgcacaccgcccgcagccggaacgatcaggtggcggtggacttccggatgtacgtccgcaaggagatccaggccatcatcggcctgatcctggacctggagaaggtgctggtcaggaaggccgaggccaatctggacacggtcatgcccggctacacccacctccagcgggcccagcccaccaccttcgcccacgccatgatggcctacgccaacatgttcaagcgggacgtgacaaggctggaggactgtctggcgcggatggacgagtgccccctgggggcgggggccctggctacctccacctacccggtagaccggttccagaccgcacaggctctgggcttttccaagcccaccgacaactcgctggactcggtgtccgatcgggatttcgccctggagtttctctcggcctgctccattctgatgatgcacctgtcccggttctccgaggagatcattctatggtgctcctgggaattcaagttcgtggagctggacgacgcctactccaccggctcgtccatcatgccccagaagaagaaccccgatgtggccgagctgctgcggggcaagacggggcgggtgtacggctccctcatcaccctgctcaccgtcatgaaggggctccccctggcctacaacaaggacatgcaggaggacaaggagtgcgtctttgacgccatcgacacggtggagctctgcctgcctgtgttcaccgccatgctggacaccctcaccgtgcggaaggagaacatgcgccgggcggccgccggcggcttcatcaacgccaccgactgcgctgactacctggtgaagaaggggatgcccttccgggaggcctacctgatcgtgggccgactggtcagccagtgcatcagagccggtgagaccctggacaccctgtccctcaaggacttcaaggccgtatccaaggtctttgacgaggatgtgtaccaggccctggagctcaggacctgcgtcaacggccgcaaggtctgcggcggcccggcggcggacagcgtccgggtgcagatcggacatatcagggaattcgtggagacacgcagacatggataagccgaaggtctttatcgacggccgggagggcaccactggccttcagctctgggagcggctctcccggcggaccgatctcgaactgctgcgcatcggcgaggccaggcgcaaggacccggcggagcggaaaaaatacctcaacgcggccgacctggtgtttctctgcctgcccgatgccgccgcctgggaggcggtggggctcattgagaacgggcacacccggatcatcgatgcctccaccgcccaccgtaccgcctccggctgggtctatggcttcccggagctgtacaaggacccagagcgcatcatcggacaggcccgtcgggtggctaatcccggctgccacgccaccggcttcctggcctcggcagcccccctgtccgccctccatattctgctccgggactgccccctcacctgcttctccctcactggctactccggcggaggcagaaagatgatcgcccagtatgaggcccccgacaagccggccgagctgttcagtccccggctctacggcaccggcctgcgccacaagcacctgaccgagatgcagaaggtggccgggctggagcagcccccggtgttctgccccgtggtggacgactactacaagggcatggctaccaccatccaactccacaaccgctatctgcggggccagcccaccgcccgggagatctgccacatcctggcggcctactacgccggccagcccctggtctcggtgcgctggggcggggatgcccccaccctccccgccaacgctctggcgggcaccgaccggctggagctggtggtgtgcggccacgaggagcagaccatcgtcaccgccctcttcgataacctgggcaaaggcgcctctggcgcggcggtgcagaacatgaacctgatgctgggctttgagatgacggcgggcctggccctggaaaccccaccggcgggcagtcccgcctcagcaaggagtgagcgaacatgaagcagatacccggcggcgtcaccgcccccaagggcttccgggcctggggggttcactgcggcgtcaagagcaaaaaggcagacaagaaggacctggccctcatcctctccgaccaggagtgcgcggcggcggccgtgtacaccatgaaccgggtcaaggccgcccccctctatgtcaccatggaacacctggaggacggcaccgcctggggcgtggcggccaacagcggcaacgccaacgcctgctgccccatgagccacgagtacgccgaggagatggcccggctggccgcccgggccaccggccgcgcacccgccgacttcgtggtggcctccaccggcgtcatcggccagaccctcaacatcgccgccatccgggcggggatgccggaggcggcggcgggcctcaccgccgggccggaaggctccgacgcggcggcccgcgccatcatgaccaccgacacggtgaagaaggagcttgccctcgcctgctctatcggcggcaggaccgtgacactcggcgccatcgccaagggctccggcatgatccaccccaacatgggcaccatgctgtgcttcgtcaccaccgactgcgccatcacccgggagatgctctccgaggccctccacgaggtggtcccccgcaccttcaaccgggtgacggtggacggggacacctccaccaacgacatgtgcgcggtgctggccaacggcatggcgggcaatcccctcatcgagtggaaggatgacggctacaccgtctttctgaaggccctccgccagctctgccaggagctggcccgggccatcgccggggacggcgaaggggccagccgcctcatcacctgcgccgtgcgggaggcccgcagcgaggagagcgccgagcgcctggccaaggcggtggtgggctcccccctggtgaaggccgccatgttcggcaccgacgcaaactggggccgggtgctgtgtgccatgggctactccaaggcccccttccgccccgagtatgtggacatttccttctcctccgccgtgggtgctgtggccgtctgccggggcggcatgggtctggacttcgacgaggaggccgcccggagcatcctctcccaggacgaggtggtcatcgacgtccacctccacgagggagagcacgaggccacctgctggggctgcgacctgacgtacgaatatgtgaagatcaacggcgattacagaacatgagaggcgcagcccgcgcccctctccccaaggaggcgaaccccatgtccgacgtgaccctgcgggcccaggtgctggccgaggccctgccctacatccagaagtattacggaaagaccatcgtcatcaaatatggcggcagcgccatgatctcccgggagctgcgggaagccgtcatcggcgacgtcattctcctcagcctagtgggcatccatgtggtggtggtccacggcggcgggccggagatctccgccatgttgaagaagctgggcaaggagtcccgcttcgtggacggcctgcgctgtaccgacgccgagaccatggacgtggtgcagcaggtgctctgcggcaaggtgaacaagaacctggcggccaccctcaaccgccggggcgggcgggccatcggcctgtgcggcttggacgccggtctgttccaggccagactgctggacgcgaagtacggtctggtgggcgagctcgccagggtggaccccgccccggtccgggactgcctgacggctggctacatccccgtggtgtccaccgtggctcagggggtggacggcgaaaacgcctacaacatcaacgccgacacggctgccgccaggctggcggtggctctgggggcagagaagctcatcctcctcaccgacgtgcacggcctgctgcgggatccggcggacgagagcacccttctccagaaggtgggcctgtccgaggtgcccctgctggtgcgggagggggtcatccagggaggcatgattcccaaggtggagtgctgcgtggaggcggtgcgctccggcgtggagcgcacccacatcctggacggccgcatcccccactccattctcatcgagctgctctccgacgagggcatcggcaccatgatcctgtaaggaggcgcagacatgacctttgacgaactcaaggcgctggaccacgcccacaccctccagacctacggccgcttcgacgtggacgtggaccacggacagggggccaccctctgggacctggccggcaggacatacatcgacttcacctcgggcatcggggtgtgctcggtgggctacgggaacgagaagtgggcccgggccatctacgaccaggccctcaccctgggccacatctccaacctgttctactcccagccctacgcccggctggccggcgccctctgcgcccggtcgggcatggcggcggccttcttcggcaactcgggcgcggaggccaacgaggggcttctcaagctggcccgcaaatacagccacgacaagtacggcgccggccgcggcaccatcctgaccctgcgcaactcctttcacggccgcaccctcgccacccttgccgccaccggccaggacgtgttccaccaacacttcttccccttcccggagggcttccgccacaccggcgccaacgatctggccgacgtggaggcccaggccggggaggacgtgtgcgccgtgctgctggagctggtccagggcgagggcggcgtgctccctatggaccgggacttcgtctgcgccctggccggcctgtgcgagcagcgggactggctgctgctggtggacgaggtgcagaccggcatcggccgcaccggcaccctcttcgccttccagcagtacggcatccggcccgatgccgtctcctttgccaagggcatcgccggcggcctgcccatgggcggcttccttgtgaacgagaagtgccggccggtgctgggccccggcagccacgcctccacctttgggggcaaccccgtctgctccgcagccgctctggcggtgctggacatcctggacgaggcggccctgaaccgggtcagggagaagggggcctatctgcgtgagcgcatcgaggctatgggcaagcggtgcctgggcgccacccggggcctgggcctcatgatcggggtagaggtccgccccggctggagcaacagggagctggtcgcccggctggccggacacggcctgctggtgctcaccgccggccccgccctgcggctgttgccccccctgaccatcacgaagggcgagatggaccagggcctggccatcctggaccggggcctggagtgaccccgggctgcgcccgccatttttgtatgaggtgaacgagatgaaagacctgctgaagctgctggacctctccagagaggagatcgtccgcatcctggacgtggctgaccagatgaagtacgaccagaagcaccgcctgccccacccccgcctccagggcaagaccctagccatgatcttcgagaagaactccacccgcacccgggtctcctttgagaacggcatgttccagctagggggccacgccctcttcctctccggcagggagagccagatcggccggggcgagccggtggaggacaccgcccgggtgctctcccgctactgcgacggcatcatgatccgcacctactcccaggaggaggtggagaagctggcccggtatgccgacatccccgtcatcaacggcctcaccgacttcgcccacccctgccaggtgctggccgacctcatgaccatccgggagcgcaaggccaggctggaggggctgaagatgtgcttcatcggcgacggcaacaacatggtcaactccctcatcgtgggctgcctgaaggtgggcatggaggtgtccgtggcctgccccgagggctatgacccccaccccgatgtgctggccttcgcccgggaggcgggccacgggttctccctggtgcgggatcccctggaggccgcggcgggggtcgacgtggtgttcaccgacgtgtgggcctccatgggccaggaggaggaggccgcccagcggcgggccgccttccggggctaccaggtcaacgaggccctgatggccgttaccgatcccagctgcatggtgcagcactgcctgcccgcccaccggggggaggagatcaccgccgaggtctttgaggcccacgccggcgagatcttcgacgaggcggagaaccgcctccacgcccagaaggccgtcctctgtctcctgatgggcgaggacgcccggtaaacggccgccccagcctgcgcagcagtttgccgaaagaaatgcacgggagctctcatactgaaagacggccccgggccgcgctgtgcgcggtccggggccgtctctgcgtccgggcttgcgttgtcagtggtcaggccgcacctgtgcagaagcgcaccagaatggcggccgcctgggcccgggtcgccccaccgccgggcttcagggcagcgggaccggtcccgctgatgaggccgccggcattggcccactgcataggcccacggcataggggctgatcttctctgcatccgcataggcggacaaatctgccctagctgacacatcgcggccctggctgcgggcgtagcggtaaaggatggcggccatctgctcccgggtgatggtgtcccctggtccgaaacgcccgtctccatacggtggaggatggtcacgatcatcccccgggtggtagtcacctccggggaaaatcgtccgtcgccggtgccggccatgaggcccgcttcggcggcgtagcgcactgcgctctcataccaggccccggataccacgtccacaaagaagggctccgcgccgggcttggtgaagtatgccaccacactgtcgccggagagctcgcacgtcttggcggcgctccactccgctgctccggcatcggccttcacgctcagggtatagctgccggttagttcggcgccggtgaccttgatgatgatgacggggacggaggcacctcgcttcatggtgatggtaatggtcccgtcctcccacttctggtcgtacaggtcggcactgatggtcttgtcataggacacacggacctcatgctactggcctcaacacccaggttgcccagcttgtctacgggtaccacgctatacctataggtcaggttgttggccgcgcccagatcatccgtgtaggtatccgaggtggtaaagccgatggccttgccgttacggcggatctcatagcccagcagtttttcactgtcggcgtgcctcatggtcagagtcaccctgggttacggcgtatcactttccacccggggagaaagccgttctctttattttatccccccgcagaatttgagctattcatctcttttctggccccacccccgctgtaatcctttgccgcggcgacgaagtcccggaacaggggatgggccctattcggccgggacttgaactccgggtggaactggacggccaggaaccagggatgatccggcagctccaccatctccactagcttcccgtcgggggacaggccggacaggaccaaccccttctccgtcagcagggaacggaagtcgttgttaaactcatagcggtggcggtggcgctcggagatatcctccgcaccgtaggcctgataggctctggtgtcatgcgtcgtgatataacaggggtaagcacccagacgcatggtcccgcccttgtcagtgatgccttgctggtcgggcatcaggtcaatgaccggatgggcggtggttgccagttcactggaatgagcatcggtcagaccggccacatggcgggcgaactccaccaccgccatctgcatccccaggcagatgccgagatagggaacctgattctcgcgggcccaacagacggcggagatcatcccctcgattccccggttcccaaaaccgccgggcacgatgatcccagcgcacccagccagcagttccgcggcattgctgtcgttgatgtcctcggagtccacccaacggacatccacctgcaccccgttttcgatcccaccgtgggtcagcgcctccaccacggagatataggcgtcgtggagggccacatatttccccaccagggcgatctccaaccggcccgccgggcgtttggctcgctccaccatggcacgccactcctccaggtggggcttactgacgggaagtcccaatacctcgcacaccgcttttgccaacccggcctcctccagcatcagcggcacttcgtagaggatgggggcggtctcgttggagatgacccgctccggcggcacattgcagaacagggcgatcttgtcccgcaccttctgggacaccggcccgtcgcagcggcagaggatcacatccggctggatgcccaggcccagcagctcctttacagaatgctgggtgggcttgctcttgggctccccggtgccgggaatggagacgatgagggagacgtggaggtaaagcacattctgccgccccacctcagcggccacctgacggatggcctccaggaagggctgggactcgatgtctcccaccgtgccgccgatctcggtgatgaccacgtccacctcctcccggcggccaacccggtagatgcgctccttgatctcaccggtgatgtgtgggatgacctggaccgtgccccccaagaaggccccctcacgctcccggctgaggacggaccagtagacctttccggaggtgatggaggagtccaccgtcaaatcttcgtcggtgaacctctcgtaatggcccaagtccaggtcggtctccgccccgtcctcggtaacgaacacctccccgtgctgataggggttcatagtgcccgggtcaatgttcaggtaggggtcgaacttctggagggccaccttcagcccccgggccttcagtagccgtcccagagaggccgccgctattcctttccccaggccggataccaccccgccggtgatgaagatatactttgccataccgatccctcccttgggtaagttggaagttcaaattttgacgcgtcagaacccgctggccccgtaatttttcagtgcccgggcggaggggtcatccacgttgcagccctcccaggcccgatttggcatccagaagtccttgatcatccgggcctggccggggtagtaccgctcgaacaggtcccgatagagcaggctctcccgggtgaagggcgggcggtactggtattgggcgcagccccgagtgaaagctaggtcgctgtactgcgctctggcatattccttcagatcatccaccatagagtggcccaccgcgtcggagaaggccgccttctcccgccacaggatctcgtcaggcagcagagcatcggactggaaggcccggcggagcagatacttgcccttgccgcaacggttgaccttcaacgccgggtccaccgacatgacatactccacaaagtccaggtccccgaagggcacccgggcctccatggaccagccgctgatacaccgatccgcccggagcacatcgtacatgtagagctcctccacccgcttttccgcctcagcctggaaggcagcgggagagggggcaaagtcggtgtacttatagccgaagagctcgtcggagatctccccggtgaggagcacccggatgtcggtagtctcgcggatggccttgcagcacaggtacatgcctacgctggcccggatggtggtaatgtcccaggtgcccagggcggccaccactttgggaagagcggctatcacgtcgtcccgggtgatgatcacctccgtgtggtccgccccgatgaactgcgccgccttccgagcgtacttcagatcgatggcgtcggtgtccatgccgatagcgaaggtgcggataggttttccaagcagccgggcggcgatggcgcacaccaggctggagtccagtccgccagagagaagaaagcccaggggggcatcggcgtccagccgcttgtccaccgcggcgataagcttgtcatggatgttctggcagacggtgtccatgtcgtcggaccggctgaggccgggacgggcggggtcggcgtagcggacaaaccgtccccggtaccagtagtgtcccggagggaaagggaggatctgctcacacaggcccaccagctgcttggcctcgctggcgaagagaatgctgccgtcaggatcgcagccatagaagaggggccggatgccaatggggtcccgggcggcaacgtattcgtccgcctccccatcgtagaggatcagggcgaactccgcgtccagccgggcaaacatgtccagcccgtactcccggtacatgggcagcaggagctcgcagtcgctgccgctgcggaaggtgtagcccctctgctccagctccgcgcgctgcctccgccagccgtagagctccccgttgcacaccacctggtcaggccccagggcgaagggctgcatcccacgctcgtccagccccataatggacagacggcgaaagcccagccagccggaggcggtttccgccacccgggccatgtcagggcccctggtataggcccggtccagacaggccaagacctcttcccgccccctggtcttttgggtaaatcccacgatcacgcacatagaaagcacctccaaaaatgtttgcgcagccctcgtcctcttgattaggacgaatgctgcgctccgcggtgccacctaatttgccgccggacggcggccccttttccggctctgacaagtcggcgcgatgtaacggtcgcagcccgttccccctactggcgcggtgcgttcgggtttccgctccgaagcgttcttcccgcggcctcctgtgcggggctttcaccatcccccgctcgctgggactgagtccccgcagtactcttctccctcattgcgtttaacggtattgcctgaaaaaacggacaagggcgctgtggtccatgccacagcgcccttgctgttatgggatattatagtggccgccgcccccattgtcaagaaaaactttcggcgggcgtccccaatttccctcagaggcggatgggatagttgccagtgaagcatccgtcgcaaaagccgcagccagcgtccggggcgatctgatgcaggaccttcagcggcagaaagcctaggctgtccgcgccggtgagggcgcaaatctcctccggggagcggtcacgagcgatcaggtgctcactgtccggaatgtccgtcccgaagtagcagggggtgatgaagggcggtgcggagatgcgcaggtggacctgcacggcgccggcctcccgcagcaggactacgatctggcgggaggtggtgccccggacggtggagtcgtcgatcatcaccacccgcctcccctccacacagctgcgcagcgcccccaacttaatgcgcaccgcctgctcccggctgcgctgatccggggtaatgaaagtgcggccgatatagcggtttttgaccagacccactccatagggaatcctcgactcctccgcataacccatggctgcgtccaggccggaatctgggatgccgatgactacatccgcctccaccggccaggtctgagccagcagccggcctgcccgccgccgggcctcatagacggactgaccgcagagcatggagtccggccgggcgaaataaatgtgcctgccgcccctttgtcaagagctccccataccggcggtgcagatagctcatttatgaaagtctattttatacttcctgcgcaaatatggagagccgtctggctatttgtcttagtggcgaagcaaaattgagttgaacttgcaaaaacatcttgacatggaattgcggttcgcgtataatttgcccatagtttaggacaaaggcgttccgaaccaacaggtcggcctgcctttgtcctctttttattttaactttacttgaaagaatgagaggagtgtcctgcatgtcgtacagcaaggaagacatcatccgtatggtaaaagaagaggatgtggagttcatccgccttcaattcaccgacattttcggtcagctcaagaacgtggccatcaccgcatctcagattgagaaggcggtgaatgaccagatcatgttcgacggctcctccatcgagggttttgtccgcatcgacgagtcggatcagtacctgtaccccgacctggactccttcgccatcttcccctggcggcccagccacggcagggtagcccggctcatctgtgacgtccatgacccggacggaaaacccttcgtgggcgacccccggcacgtcctcaagcgggctctgaaaagggcggaggagatgggctttgatgccttcaacgtaggtccagaggcggaattcttcctcttccagactgatgacgagggcaagcccaccacccgtaccaacgacgaggcgggctacttcgatctgggccccctggaccacggggagggcacccggcgggagatctgcatggccctagagcagatgggctttgagatcgaggccagccaccacgaggtagcccagggccagcacgagatcgacttcaagtacgccgacgccctgcgtaccgcggacaacattatgaccttcaagctggcagtcaagaccctagcccagaaaaatggcctccacgccacctttatgcccaagcccatcttcggcatcaatggctcggggatgcacactaacatgtccctgttccagggcgggaaaaatgccttctatgacccggatgacccaaagggcctgtctaaagaggcatattcattcatcgccggtctgctggcccacgtgaagggcatggcggcggtgaccaaccccctggtgaactcctataagcggctggtgcccggctacgaggctccctgctacctggcctggtctgcctccaaccgctccgccctcatccgtatccccgccgcccgggggcagtccacccgggtggagctccgctctcccgacccggcctgcaacccctacctggagctggctctctgtctggccgccgggctggacggcatcgagaagggcctcaccccgcccccggaggtcaccgagaacatcttcgacatgaatgccgccgcccgaaaagctcacggcatcgactctctgcccgactccctggaggaggccatccacgctctggaggccgatcccttggtgctggacaccctgggagagcatgtggcagccaactatattgagggcaagcggaaggaatgggaggagtaccgcacccgcgtctcctcctgggaacgggagaagtacatcatcaattattaaagcgatcccatcccaacaggggagtgaacgcacatggaaaagatcattgtggcctttgagagcgaaaagaccgccctgcgtgtaaaggaactgctggaggggggcggcgcggccgcctgcttggtgtgccgcaccgccgaccaggtgcggcgggccataaacaagctgccagtgccggcggtggtgtgcggctacaagctgggggatcagacggcggagctgttctttgaggacctgcccccctcctgcgccatgctggtgctggctcaccaggaccgattggatcttctggggaatgacgacatcttccgcctgccatccccggtaagccgtggggatctgctggctgcggtgcggctgctgctgcaagtggggcgcaggctggagcggtacgggcgcccctgtcacagtggggaggatcggagactcatcgaccgggctaaggccctgctcatggaccgccatggcataacagaggagcaggcccattactatttgcagaaaaaaagtatggacagcaggacaaaattggccctgaccgcccggctggtgctggacagcaaaacgatggaatagaggcggagacgaggtggtctcacggcgacggtcgggagacggaccgccgccgtttttatggaaagaggcgagacgcatgagggaaaaagcggctgaagggagagggctgtaccgcccggaattcgagcatgacgcctgcggcattggcgccgtggtggacatacagggccgggccagtcatgagacagtggacgatgccctgaagatcgtggagaagctggagcaccgggcgggcaaggatgccgagggtaagaccggcgacggggtgggcatactcacccagatcccccacgcgttttttgccagggcggcggcggaggcgagcatcgccctgcccggacggcgggactacggcgtgggcatgttcttcctgcctcgggacggtttgaaacgccggcaggcccagagacagttcgaactggtgaccgagaaggaaggcatggctttcctgggctggcgggaggtgcccgtgcacccggggattctgggccagcgagccagggacaaaatgcctagcatcttccaggcttttgtggccaggccggaggaaacggctcccggcttggattttgaccgaaagctctatgtagcccggcgggtattcgagcatctgagcggggacacctacgtggtctccctgtccagtcgcaccgtggtctacaagggcatgttcctggtccaccagttgcgggccttctaccccgacctgcaaagcataaactatacctccgccttggccatcgtccactcccggttctcgaccaacaccaacccctcctgggagcgggcccaccccaaccggctaatagcccacaacggggagatcaacaccatccggggcaacatggaccggatgctggcccgggaggagaccatgttttcacccctgctggcaacggatagggacaaggtgctgccggtggtgaacgcctccggctctgattccgccatgctggacaacaccctggagttcctgatgatggcggggatggaccttcccctggcggtgatggcctgcatccctgagccctggcggaatgaccgcaccctctcccgctcccgccgggacctataccactactacgccaccctcatggagccctgggatggcccggcggccatcctgttctccgacggggacgtggtgggagccgtgctggaccgcaacggcctgcgccctgcccggtactacctcaccgacgacagccggctcattctctcctccgaggtaggggtgctggacatcccaccggagcatatcgtggaaaagtcccggctgcggccgggcaagatgctgctggcggacctgaggcaggggcggatcattgacgaccaggaactgaaggagggctacgccgcccggcagccctatggagagtggctggacaccaatctgctccgtctggccgacctgcccatcccaaaccagcgggtggagcggcacagccgggaggaacttagccgccttcagaaggccttcggctacacctatgaggacgtgaacgacaccatcctgcccatggcccgcaccggggcggagcccaccgccgccatgggggtggatatccccctggcggtgctggacaacagggatcggcccctcttctcctacttcaagcagctcttcgcccaggtgaccaacccacccatggatgctatccgggaggagatcgtcaccgacaccaccgtctacgcggccgatgacgggaatctgctccaggaacagccggacaactgccgggtgctccagatccacaaccccgttctcacctccaccgacctgatgaagatcaaggccataaaccgacctggcttccacgcagccaccgtgtccctgctctattacaagggcacccacctggatctggtactggaccggctggcggtggcggtggacagggcgtaccgggagggggccaacattgtcatcctttccgaccggggggtggacgagaaccacgcggccattccctctctgctggcggtgtctgccatggagcagcacctggttcgcaccgggaagcgcaccgccgtatctatcctcctggaatccgctgagccccgggaggtccaccacttcgccgccctgctgggctatggcgcccgggcagtgaacccctacttggcggaggagaccatcgtgtatctgatcgaggagggcctgctggacaaggacttccacaccgcagtggccgactacaccgccgccgtcctccacggggtggtgaagatcgcctccaaaatgggcatctccaccctccagtcctaccagtctgcccagatcttcgaggcggtgggcatacggcaggatgtaatcgacaagtactttaccaacaccgtctcacgggtggggggcatcggcctggaggagatggccgccgcagtggagcggaaccacgaccgcgccttcgaccccttgggacaggagactgacctgacactggagagcctgggggagcacaaggcccgagccggtggggaggaccacctctataatccacagaccatccatctgctccagcaggccgtccgctgggaggattacgggctcttcaagcagtacaccgccctggtggacgatgagacaaagccccacaccctccgtggcctgatggagatgaaatatctgggcgagcccatccccttagaggaggtggagagcgaggattctatcgtcaaacgcttcaagaccggggccatgagctacggctccatctcccgtgaggcccacgagtgcctggcccaagccatgaacctgctggggggcaagtccaacgccggcgaggggggcgaggaagacgaccggctgggggatccggagcggtactccgccatcaagcaggtggcctccggccgcttcggggtcaccagcgcctacctggtgagcgccagagagatccagatcaaaatggggcagggggccaagcccggcgagggcggccacctgcccgccgggaaagtctacccatggatcgcttggtgccgccactccacccccggcgtcaccctgatctctcctccgccccaccacgacatctactccatcgaggatctggcccaactgatctatgatttgaagtgcgccaaccgtcaggcccgcatctcggtgaagctggtcagcgaggcgggggtgggtaccatcgctgccggggtggccaaggcaggggcccaggtgatcctcatctccggccacgacggaggcaccggcgcggcccctcgtacctccatccacaacgccggtctgccctgggagctgggtctggcggaggcccaccagaacctgatccaaaacggcctgcggtcccatgtggtgctggagactgacggcaagctcatgagcggccgggacgtggctatcgcctgtatgctgggagcggaggagttcggcttcgccaccgcccctctggtcactcttggctgcgtcatgatgcgggtgtgtaacctggacacctgccccgtgggggtggccactcagaacccggagctgcggaaacggttcacaggcaagccggagtacgtggtcaacttcatgcgcttcgtcgcccgggaactacgggagcatatggcccggcttggggtgcgcacggtggaccagctggtaggccgcaccgacctgctgcgggtacggaagcccgccgtcaaccagcgggcggccacggtggacttgtccgccattctggacagtgcttacgccggctggccaaagacccgctttgatccggcggacgcctatgacttccatctggaggacacagtggatctgcgggtactggaacagaagctgggcgtcgcccttgagaaaggcgaccataggcggctggaactggcggtgtcctccaccgaccgggcagtggggactatccttggttcggatatcactctcctccacggggaggcactccccgacgacacctttgtggtaaagtgtaccggcgggggaggccagtccttcggcgccttcctgccccgcggcctcaccctggagctggagggggacgccaacgactacctgggcaagggcctctccggagggaggatcatcgtctatccgcccaaggacagcccctttgacccggcagagaacattctggtgggcaacgtggccctctatggagccacctccggccaggcctttctcaacggcgtgaccggggagcggttctgcgtgcgcaactccggcgccgacgcggtggtggagggagtgggggaccacggatgcgagtatatgaccgggggccgggtggtaatcctgggccccacgggccgcaatttcgccgccggcatgagcggtgggatagcgtatgtgctggacgaggaccatgacctgtacctgcggctgaacaaggaactggtgtccatgggcccggtcacggaagagggagatatagaagcgctgcgaggcctgatccaggctcacgcagaggccaccggctcccccaaagccggacgaattttggccaatttcggagcctggttgcctaaattcaagaagattttgccccacgactacgaccggatgttgcgtaccatcgcctggtacgaggcccagggtatgggccgggtccaggcagagacggaggcgttctatgtcaacgccagaggaaagggggactgaccgtgggaaagcccactggatttctggaatatgcccggcagggcaatccctgccagccaccgctggagcgggtggcgtactggaacgaattccatccccggctgggccgggaggagcggcaacggcagggggcccggtgcatggcctgcggcgtgcccttctgtcagtcaggggcggtgttgaacggtatggtctccggctgcccactgcacaatctggtgcccgagtggaacgacctggtgtaccgcagaaagcttggccgcgctttggagcggctactgaaaaccaacgacttcccagagttcaccggccgggtgtgccccgccttgtgtgaggcggcctgcacctgcggcctaaacggccagccggtgacggtgaaggacaacgagctggggatcatcgaggaggcctgggagcagggactcatgtcccctcggccgcccgagacccgcaccggtaggaccgtggcggtggtgggctccggccccgccgggctctcctgcgctcaaaggcttaaccgccgaggtcacagcgtcaccgtgttcgagcgggccgaccgacccggcggcctgctgatgtacggcatccccaacatgaagctggaaaagtcggtggtccagcggcggctggatctgatggcggcggaggggatagccttccgcaccggtgtggacgcgggccgggacgtgggtcaggaggagctgagggaacagtttgacgcggtggttctctgctgcggcgcggcccagccccgagatctggacgtaccaggtcgggcgggagtggacgtctggtttgcagtggacttcctgacaggggcaacccgtgccctgctggatgggacttactgtccctctgcacagggcaaggatgtggtcatcgtagggggcggcgacacgggcaacgactgcgttggcacctgtatccgccagggctgtaaaagcgttacccagttggagataatgcgtaaagccacaggcgcccgcaccgccaagaacccctggccggagtggccgcgggtgtgtaaaacagactacggtcaagaggaggccatcgccatctttggtcgtgaccccaggatctacgagaccaccgtctcacacctgcttcgggatgcggaggggcacctcaccggggtggagaccgtcctgctggggccggaccgcaagcctctgacaggaacggagaaactgctgccctgccaactgctgcttatcgctgtcggcttcctgggcccccaggactatgtgccggaggccttcggactgacgcgcactccctgctccactgtacagacagcggaggggagttattccaccaacatccccggcgtgttcaccgccggggacatgcgccggggacagtccctggtggtgtgggccattcgggagggccgcgaagccgcctgggaagtggacaggtacctgatgggacacggcgagtggaccgagctcccgctgattcagacagattgaaaaacagaaggcccggtcggtgcccgcattatgcagcactagataaggatacatcgtgaaccaggggttcatatcattttctcttagcataaggccacaccaatctgcatattttaggcggaaagcttagagtaccagggggtgtggcttttctattttccctaaaattgaccagatcaaaaaatgatattttcgaggaataaacacccttatagaggttgttttccagagttttccgtgtttccccgctgtattcccttttagcgccctatttgctctcaaatagggcgctaaaattcgaaaaaatgatatacaaaaaacagcgcgccggtttgttggttttgtcaaccatcaggccggcgccttttgttgcccggggagttcaaaaagggcattttcaatttgcgccggagaaggatgacatagcgcgccaactttattcgtactgccaaaaaaggcacacactttttcgtcccatttgctaagtggataagatggtacgataggagactcaagcgagtgactggagcgatgatcgaaaaagggcattttgcctgaaggaggaagatgcacatgaccaaagaaacctatttcgaggaactgtcctacgccctgcggcggcgggagctgctgccccggccggtggaggaggacggcctgctcccggtggagtggaacggccgcatcctgtgccgggtcacggagagcggcgccgtccggtatgactccacctgggtggacaccagcagggcaaaggccgctttggcccaggtcacggaggcggcggggacggtgatggagtacatgacgcttctggagaatgccccacctctgaaggcggatggcctggcgaacggttaccgggtgctggcagagttcaacggcacagtgctggccgggacagagacgctgctgggggcccagttcgtcacctgggcccgggactatgaccggagcggggtcaacaacggccactactacatggaggactatcagggcgccagggaggacttcgccctccgctccgggctggtggccagggaacggggctttgaccagggaacagctggaggggctgcgccaggcggtgcagggcttcctctatggagagggccccgcctcctaccagcaggagttccaatgccggcgcctcctggatcagatcacagcccagctgccggaaagaacccaggatcagatgcagagcgaaagtcaggagcttggacagtccatgtgaaggcggcgccaaatcaggcgccgcctttttctatgcccagattttatttcatttctgcgcccacaagccgtacgccccggagcacccggcggaaccgccgcccaggccggtatgcacctgctcccccctctgcgtgggctgcccctaccccgcaaacggcttcctctgctgggggagggatggaaagtgcctgcgctcggagatgcggcggctcaatgccccggacaggcaggtggcacaagaagtgaaggaggagtgatttcgcggtgaaaccaaatagcaactgcttttccctgcggccggccacccgtgaggaggccagcttattctactcagatgaccaggcggacagatcattgggtacagtgggccatgtccggatggactttggctccagcggcaaggggttttaccatacctggtggcctcacaatggggagtagttcaacacgccggagttcaaggaggccctgcagcagttcgtggacgctatgcggacggacgggccgctgagggacctgccctctatggacagattctgccgccagaacggcggggccatcacggaggacggcctgagctacgggtatctggcagagatgggcagctaccgcttctgccttcgtggacgatatggtctatgacctgtatggggaggagaaccccaggccgctggaggattacgtgtctcgccaggggccggagatgggagggcagcagatgtgaccacacagaatagacagccggtgctgcgctgtgtcctgagcaacgcggcgcacccggagtatggccaagtgaccatccccttccccatccccgtcatggaatatgagtgcaccctggaatgcttggccgctatggaactgggagcccgcctgaaacgggactgccgggtggatgagctggagagcggcttccccatccttaagcggttggagggagtgagggccaacctggatgagatggactacctggcccggcggctggacagctttgacaaatatgaggctgcccagttccaggctatggcggtcaggctgggtacgtttgatatgacggactttatcaatcttaccttctgctgccagcaggccacggtaattacaaacttttcagatctagaggacatcggaaaggcgcacatcctgacgatcaacggcggctgcttgtatgcggacgagcaggaacaggtagacggcagggcggaggccctgaagttgatcctcaacgagcacggtaccgtaaccccctatgaggtggtctatggcaacggtatggagctggaacagctctacaaggagggcggccccttcccggactatcttgaccgggagttcgtcatactcctggaggcgtccgccggcgaagggcagagcactctgctgatcctgccggacagcccagccaggctggaacggctcctgtgccacaccggtatacgggacagcccccaggcacactccagggtagtggacagcaccctgcccggcggggtgatcagcagcattccatcggaacatctgtccatcaatggcctcaaccggctgtgccgggcggcggagcggattgcaccggaggatctgaaaaccctggtacaactgctggccgacaaggaccaccccagccaggggccatccctgggcgggctatccatgtgaaccgaggggagagaacatgcagaaaaaagagtttatccggcagctcaatgaactggttcccaggccggaccccgtcaccaccgaggcgctgtaccgctttgaccgggagtgtgcggagacggagtacatcgatatgctcaccgccctgcgggtggtggcgcggaatttcagtgaggagacgctccagagcgcctatgagatcatccagaaccaaaacgccgccctgcccagcgagctgttcaccgccgccgtctaccttcaggccgggcgtacaccggcagaggtgtccggtctggccagggagggccggcttatgggcttctttggcccggagcggccggaggagctcagccggattgcgacctgcaccattgtggagtctgggcgggagcaacggttttacaccatggacttcgggaggttcaacccacagcatgccttgaagcgggccataacatacagccgggaagcaggtatatccgccacccaggccatggcccgcctcaccatggatcaaccggagtttgccgaaaagcccggcgggccccgctgtatcctggacggcctgggctcagagctcaccaaggcgttgttccagctctcgccggcctgccccgccgtggccgcccatatcacctgccatgcggatttgggtatcacagagatagcttatcatcctctgtggctggagcgaagccagagtcaggcggccatccagcagatgtgaaaaaactgctggatatcacgggcacactgtggtatgttgtgtgcttaccagaagaaagggcgggaaagagctatgaaccatcagaggaaacagagcatgcgcaagaaccccgttgaaggccggcttccatttggggagctggccttttctattcagatgatacttgcggcaaaatgaagggaggcagatcatcatgcaggatgtatcgaaggagtggctggatttccggcggaatcagttccccgcgggcagccggatccagacgtgggagctggatgatcccaggaacacgctgaaggaggccagaaagctggattacatcgatgactcgggccggttccacgtccggcagagcgacggaggtgagtgcgtcctgacccttggggaggagatgttctccgtccacccgcctgagtccacccagctcaagctgtacatgcccctcaccgccagcttctatgcccggaatgagtggggagattgggatgagacgggtgaggaatgggacggcagaacgcttctggattatgaggacaggatcctgggttcatggtgtggaaccgggtgccggaggaggcggggcggggcctcatgctctggtgcgacaaggagttcctggacgtcaaggtgcgctccgccgtgtttacggcagaggccagaggcggcaggctgtggggcgtggcggagtgccaggtcgtcggccagctctctccggaggagctgacaagcctgaaggactatctcaccggccaggctgcggacggcgttggcgagggcctggagcagcaggcaatccgtgtggacggcggggagctctatgtccacctgtggcaatctgagggctggagcattcagacagagggggagcggttcgggcagacacagatccaggaaccgcacgatgacgtggtccccaccgaagcccagcacaacaggttcggtggggagaggagttccggcgaaatgagtgagccttgcccacagggcgaggcgaagggtatggagcgcggaatgacgatgggagggatgagcttgtgagtgttcccgtgctgacccaccgcagggatctgaggaaaggggatcttgtgtttctggaggagatcctgcccattggccacatgctggatgttcaactcgactgtgtcggcaaagaagttcagcaggaggtgtttggcccggagttggatcccagtccactgtgtgactggctgaacctccatactgcctatgattttgcgcttcaggatgtggtggaccatatagaaataaccctctgccggaattttggagaggaggagcacccattcacgtatccgctcaacagggcggagcgggacgtcctgcgcggggagatgaaggcctgctgccagctccgtaccggtcgcacactagcacagcattacaaccatctgctggtgcaggaggaggtggagccgccggagctcacggctgggacgcgccgcatccccgtggacaaggtgagttttgcggatgagctctcagagtgcgatgggttgctccagttctatatgccggtgacctttgacccggacgcggtctttggcacccacgtggcgaccgcggaaaacgacggctggctcaacgtgtacgccgcctatgacctgaacaccggcaagccgtgctccgcgctggacgtcatcctggtgtgcggagacggcaatgagttcgccttccggtatccgctggccaagcaggagcaggccgcgctactggagaagatggacgcctactgcctagggcagaccggcatggcgctggcggatttccgggcccggtatctggtggaggaaccgcagtcccaccaggcccccggtctggcccagctgtgagcacgccgtcggccccgtgtgcgccctgtgtgccggtttcaggaggagggcgggccagggccccgcccagccagaaaactgccccgttggggccagtttcgccccggtttggggtgttcgattttagtacgaggataaagggagatggtcgcaagcgcccacctcccgcccacaaagccccgcagtgcggggctttcccggatttcaggccaggtggtcggaattggagattctggccgtttggggtggtcgggttcagataaacacttactgcgccagcgggttccgctgtgtcgcaggcaaaaagcggaggtgaagaacatggaggaacacgacaacaaaaagcgcaccgccgtctggctgacacccggtgtgatccgccggatggacagctggctggaggaggacaactgcaaaacgcgcagtgaatttattgaaaaggccctgcggttctacatgggctacctggccacggaggatacctcggagtacctctcccgcgccctggcggacaccctgcggggtacattggcagacaatgaaaaccggctgcgcactttgctgttcaagctctgcgtggaggtgaacatgatgggccacaccgtggccgcccacttccgcgctgatccggtgaaccgccgggagctgcgggcctttgcagtggacgaggtgctgcgcaccaacggaaagatccgcttcgatgatgcactggatctccagcggcaggtctaccctgacggatgagccgcgtccggttcatgtccccctacctgaagggcggcagggatacagccaagctgtccaaccgggcccgctacatcgccacccgtcccggcgtggaggtgatcaggggcgagcacagtgaccagcccgccacgaaaaagcaacacgattatatccaacgtctgctgcgggactttccgggcgcggaggaattgctggagtatgaggactactgcaacgcgcccacccaggcaaacgccaacactttcatccgccaggtgcaggaggacttcgcggagcccatgagccggatggagaattacctggactacgtgtcccaccgccccggcgtgcagctgaacggtgagcacggcctgtggtgcgccgggggcaaggtacgcaatctctcccaggccgtccgggaggtggcggagtacaccggcagtgtgtggacgccggtggtggccatccgcagggaggacgcggaacggctgggttacaacgacgcggagagctggcggctgctggtgtgcgcctgcgcgccggagatcgccagggggtacaagatcccgctggagcatctgcggtggtacgccgccttccaccgcaaggaggacagcgtccatatccacatggtggtgttctcctccgatcccaaggagggctacctcaccaggcagggtatccagcaggtgaagtccgccttcggccggcggatcttccaacaggatttgctccacgtctacgaacagaaaaccgaataccgggacgctctgggccgggatgcggagcgcaccatggcagagctgatcacccagatggagactggccagatccaaaatgagaacctggagcggctggtgctggagctggcccagcggctgcacaacacccagggcaaaaaagtctacggctacctgccacccaaaaccaaagtattggtggacgccatcgtggatgagctggcaaaggacgagcgcgtagcagccgcctacaacctgtggaaccagatgcgggaggaggtatgccgcacctattctgagcagctgccggagcgcctacctctttccaaacagaaggagttcaaggccgtgcgcaacatggtcatacgggagacgctccggctggggcgatgtgagccgcctacaacagatgaggtggtacacgggtttaccccatctagcacaccgcctgcacaatccggtatgccgcatggggtacatcacccacagcagaaggtcacgcaccaccagcgtacacagacacatcgggcggtatcccacgcggataccgcccgatgtgtccttcagctattccacaacatgggccgcatcttccgagagcagtccgcctccgatgccatccaggcttgcctgcacatcgacaggaagcgccgccggatgctccgggagaagcgtatggccctgggacacaaggccgatgaccatgaggaaatcccccagcattctcaaagataagatgggggactgccattgaactggtagtcctccgtggtttcttccgctacttcggctccagaaatcctatgaccatatctaccgcctctgaggagatatcctccggagcacgctccacaaaggaggcatggcggctgttcaaatccagcatccgggcctgatcacacaggatgaccccgtccgtcctggtacgctcatccagccggaggtggaacgggtgcccccggtctgtgtgggtgatggggcaaaccatggtcaggctgctgacccggttgaacaagttgttgctgatcaccaaggcaggacggcggcccttctgctcatggccggactggggatcaaagtccagatagacgatatcaccctgttcaaaaatcgtcaccatgcctcagagccctccgccttcccccaatccagctcttcggcctcaattcggtcgatctggtcaatgggctttccgtagaatgcggtgaggcgttcctccagggtgcggtgcgggatggaagaggcacgccggatgttgataccatcatccatctgcaccagttccacccggtcgtgttctttcagaccaactgcgtccaggagggccttggggatccgcaggccctggctgttgccccatttttggatcgtcgcgtacatgaacgacacctgcctttcaaagatagtatatacagagtataaacaaaagtcaaccgtttgattcgaggtgagccgacatgggaacctatatccattttaccgatgaacagaaggagcgggccaactccgttgatctggaggaattcctgcggcagcggggggagaaactgctccgcgccgggcgggagtcccggctggccagggtgcaccatatcaccgtccggggcaacgaatggtacgaccatattgcccggcagggcggccatgcggtcagctttgtccagcactactacggcatgagctattaggaggccatggagctcctgttggggaatgaattgggcgcgacatatcccgccgcagagccaaagcgggaggagccgcctaagcccttcgccctgcctccgcccaacgccgatatgcgccgtgtgtacgcctacctgatgaaacagcgccgcgttagccgggaggtggtcacccacttcgcccggtccggcctgctgtacgaggatgctcaataccacaactgcatctttgtgggcacggacgagcatggtgtcccccgccatgcccacaagaggagcaccaacagccagggcaagtctttcaaggtcaacgtggaaggcagcaggccccagcacagcttccaccacgtggggcaggacggcctgctttatgtgttcgaggccccgattgatctgctgagcttcctcacgctgtacccggacagatggcaggagcacagctatgtagccctgtgcggcactggcggccaggccgtgtgctggatgctggagcagcaccccagcctccaatccgttgtgctctgcctgtggatcacgacgagcccgggcagacggcggccaggcgcctccaggaagagttacagggagcaggataccacagcggtatcctgctccctgtgcataaggactggaacgacgacctggtgcaagggcagaccatggccggccttgtaatgaccatggggcagagtatgtaggccgcagaggcgcaccgcccgccaggggggtggtgtgccctgccgctggaccgggggccggttcattttggcccgcccagaaggtcacaatggaagtagatttaaacacagagagcagacaacgaagggatgattgcagtgaacaacgacacctggatgctgatcctcctgctggcggtggtattcggcgccctggtcgccaccaccaccttttccggccggggcagcctggacagcatcaagagtaaaaccgtgggcgacgggcagcacggcaccgcccgctgggccacgccgggggaaatcaagaagaccttccgctccgtccccttccagaccgcgctgtggcggaagggggagcgcctcccgggcacacaggggctggtgttgggctgtaccggaaagaaggggtagctcacggccctggtggattcggacgatgtccactgcctcatgatcggtgcctccggcgtgggcaagaccgccttcttcctataccccaatttggaatacgcctgtgccagcggcatgagcttctttgccagtgacaccaagggagatctggcccggaactatggggccatcgcccgggactgctatggctaccaggtggcggtggtggatcttcggaaccccacccgctcagatggctataacctgctcaccctgatcaatcactatatggacgcgtgccggagagatccggctgacctggccgcccgggccaagtctgagaagtactccaagatcctgtccaaggccatcatcaacccggatggggagaactttgcacaaaatcaatatttttacgacgcggcggagggcgtgctcaccgccgtgattctgctgctagcggagtacctgccgcccagggagatcgacggagtgctgcgagagcggaggcacatcgtatccgtgttcaagctggtgcaggagctgctggcccccagcattctgcccgacaagaatgagttccagctcctcatggaccgcttgccggaggaacacaaggccaagtggttctccggctccgccctcaccgccgccgagcagtctatggcctccgtcatgtccaccgtcctctcccggctgaacaccttcctggactcggagctggagcaagtgctgtgtttcgacagcaccatagacgccgagagctttgccgcaaagaaatcctccatcttccagatacttccggaggaagatcagaccaaaaacttcttggctgggctaatgatccaaaccctgagtcgggagcttttctctgtggcggatgaacacgacgggaagctgccctgccgggtggtgtttttctgtgacgagctgggcaccatgcctgccttcgacattctgcccctgttctccgctggccgctcccggcggctgactctagtgcccatcatccaaagcctggcccagctggagaagaactacggcaaggagggggcggagatcctggcggataactgccaggacaccatcttcggcggctttgcccccaacagccagaccgccgaagtgctgtccaaggctctgggcagccgcaccgtgatgagcggctccatctccagggggaagaacgaccccaaccagagcctccagatgatcgagcggcccctcatgaccccggacgagctcaagtccatccccaaggggcacttcatcgtcatgaaaacaggcacccaccccatgcaggcccgcctgcgcctgttcctggagtgggggatcacctttggtgcggcctaccaggtaccccagcaggccgcccgaaaggtctactacgccagcaaggcagaattgaccgatatcatataccgggcatttcctgcgcctgcctgccagaacaactaccgcacgccgaaaaaggaggaaaccgtgccatgagctattttagtgagatctacggcgacccggagctgagtgccagggccaagcaagtgctggtgtacctccacgaccgggcaaacaaggatggcaagagctggtacgccatcgccaccatggccaaagacctgagcatctcccgctccaccataaaacgagccctggcagagttgatccaccagggccgagtggagaaataggcaagattccgggagaacagagggtgtacttcgaactgttatcaaataaagcaattgatgcgcatctaatgtgataactcagtcagttaagatataaagtgttgtggggagaatttttgcgttttatgaaatagcccatagtattcatgaaggatttagattgagataaagtgttatacgaaacataccgccttcctgctttatatcgagcgtacccccgtatttgtctacaaccgactggacattttgtattccatatccatggaaagaatggccggagtgtagacgatgtttaccgccctcaatatacgggttggacatctcatagagaagaagattgttatggactgagatctctaatgagattttcctatgttgggctggaagggctagacatgcctctaaagcgttttcaaaagtgtttccaataataatgctaaggtcgagtatattgatgtttagagtttggggtacccagacagataaatctaatggtacagtcaaatcattagcttgctgggcatagtgttgcagaattgcgccgacttccgggttcccgacatcaacaacacttccgattttgctgagagagtcctgtgcatcaaggaacacctgttccacagacgatttatccccgcttaccgacacagctttcatggcagttaggtatttgctcatatcgtgccacatggcgcgggtttgctcctgctctttccaaaggctgtcgtaatagcttaactgtagttcaagctgttgctgtcggagatcggcattgtgccgctcttcctgccgtgctttgaccacctctgcatagacaatgattataatattgagatagaggatgcctattaaaataatcgtcgattccacagagagttttcgtcctccattttgcgtaaggcgcagaatttcatcgcagaaatagacgctgaatatctgacacgcaagaagaggcaacaagcttttcagcttcagtaaagagtgctccctgtgcatgagtggaacggcgattatgaccaacgctaattggcacactttcgctatgagaatataaatagcccgttcataccccggggacataacgtccagatactcccaccccataattgcaagcagctttaagcaaaggagctccgtaatcaaggccaacgcacaaaatacggtagcaacataaactgcattaagtggtgcagagcgataacagactttacacagcacaagaataccgagccaagtgtaaatagttcggacaatcggcataacaggaaccacgttcaaggccatgagtcctattccaaatataatataggcaacccacactatcgcagatgaacgtgagttccgggaaagtagcttttgcagatagaaaaagatgaggaatactccaaaaacaatggtagaaagatgatagatgaaatacatacaatcaccttctcaaaaagtgaaacagggcttcatcaaataatttcttccgatttctgctgatggggatctctgttccgtctgttaaaagaaggttggccttttgaatacggtctacaaaatcgaggttcaccaggaagctgttgtggggccgtgcaaagccattgccccacaaagtcccctcaaattccttgagcggagtccgcacctggtactgttctttgctggtatggattatcgttttatagctaaagacctcaatgtacgtaatgtctctgatccttacgagaattggcccgcgttccccggccacagggatgctttttggggagcacttagccactgcggcagatactgcccgcacaaagtccgggtattcgaccggctttttcaaataccgaaaggcaacctcatagccccggattatgtaggccccactctgtgtaatgaaaatgatcaacggaatatcgggcaacttgttgagttcctcagccgcctggtagccgttcataccctccatttctatatccagaagtacgatatcgaaatagtcccgccgaaaagccgcaagcagctcctccgatgaggcaaaccccttccagttcgcttgagcgttgtagcgtagcaaatagtcccggatctgccgcagttcattagggttgtcgtcgcacaacgcgaatttcatttctctccctcaacttggtcatgagtgctttttgtggaaagctgtacggatactgtcctgaataaacttctgcacaggctcgtccagttcagagagcatattctccaactcgctgaattgatattgatcttgcttctcatcatagaaaatctgattcgcgtccagtgaaagtgcattgaccagccgctttaacgtggggatgcttgccatggacaggcctcgctccaactggccgatatagcctgccgatttcccaatcagttcggcaagctgctcctgcgtcaatccgtgctcttcccgtttcatacgaatcaagtcgccaatctgcatagccatcacccatgcctttagctgtagtgttgctattattattgcatagcaagtcgtcggcatacagatagtgacacgatgattttatcatagttatacaaaagaagcaaccagatactgcacaggaatgacaggatacagcagatccattgtatattttacacaagaagttaaaatgtacttatcagtagaaaagaaggaatgaacaatgatcaagaaggcggcagccgggtacgccggttggctgtgtgccaatgggattgtagcgccggaaaagaacaaaatatacgcctacggaatggaactggtcctatccggtttggtcaatgtcctgtctgtcttgctaatctcaattttgcttttccatccggttgacggcctgatcttccttgtggcgttcattcccctgcggacgacagcgggcggataccacgcaaattcccacttgtcctgtaacctggttttcctcgggacgtttatcgtgttggaagctctgggatattggctccagaaatactgtactatccccctctatctggctacagcagtcatttcgcttgtgacactgctgatcctatcccccagtgaggcaaagaacaagcctttgaccctagagcagcgacggcgcaatcgccgcagaagcctcattttaggcgggctgaatctggcaatcgggatcatccttatatgggtccttcaagtgccagcctcatggtgtacaagttactacttaggagtcatcgcagcatcaattgcgatgtgggcggctcaaataaaagaaaggatgtgtgtgcaatgaaagcaatgattggacgtattttcctgtggtttggtggagtaatggccgtgctggcgcggcgtacagccactgcgtctgcaaattccacctgcttctatacggcctaccagccggatgtaccagatggtgtttgaacgcaggagaggctttatcacggtgtcatacaatactttccacgaaaggagctaactatatgaaggcgaaactcagatttgcaaagacgtttgcagccatgatggttgctttaagtctgtgcattagcaatgtccacgcctactcaaatgatgttcaaagcctctacttagacgataacgagacttattcaggtaaaattattcctgcagaaatgtctactgctgcatttgcaaatgaagttgattacgatagccttgcagatcttcaattcaaaagagcgatatctatctctggagatcatgtttctgtagatctatcgctattaattgattcatcggaaatccaattacactatgacggcaaaatgtacaaatcatctaggtatactgatgagaatcctgtttatgtcggtgcgctggagaatgatggtaccacagatttcgaactaatttattttgagattagtaatgatatttcaccatataatctgaataaggatctaagaaactgtgcatcgataacaatgtatttgcagtgcaacgagggtacaatctacgacttaggcagtaaaattgtatctccaattattcttgatacgatcgaaaagcaggcgccgagtgataaggatattacttggttcttaaattacttccgtggcacacttacagaatcccaggacccccgccctaattctacttatgatcacgaatgggagggggatctcaaagaagtatcatatacagttgcaggttatgagcatctattcacggcacgcccatatgctgatatcgtatatggtgatgtgcccgcttatggagaatttgactttagtgtggctttaaaaatatcggaatcgcatagataccgatacattggtgaaaaaaactgggtcattgatacaggcgactatggtaaatgtttcgcaattgaaaacgtccagctaggttggacagccggcgcgaacactagaattattggaattgaacctcatctcaatgagcacaataaaggaggcgatgcgtttacttttacaggagttgtcgctacaataacttcgttccttcctgtaactgcgcctatctccgatattctggcactcgcagactcacttatggctatggatggcggtgattctaatagtttcactaatactgcgtatggtggaggtgttaatgtagccgcatataagatgcaattcccacaaaatttttatattgaagaatctggtcttggagttgctggtaacgtggcagaaaggtttgaacttattgccagaatggcaacgcttgatagtagcctttctcgaaagcaaaagactgctgcagtagcgaccctgtcgtttgacttctgttggggcgatatgactggtaactcaggtagcaaaacttacaacgtacctgtgcaggtgaactatttcactaattgctgatttattttactttagcctcacctcgctattgaggtgaggctatcaattaagttgtatttttatttaggttttagcgtatttagaatggtttccagcttggccagacagaggataacaacttatgaacaggaaaaaacttgcaattattatactgcctgtggtgcttgtgttagtattcgtatattccatctgctataattaccgttttggtgtggctctttataatgaggctatcgaagtggcatatcaaaccgaaacgtttgcaaatagtatcgattttacgagaaaggagtttgagcaatcaagtagcggagctgatagtgtagatacatatttgtttgaatattcgatcaattcaattttgctaagatttggaatagaaaatatgccttttttagatgaagtgcgcgcagaatggcataaccaaattatgaaattttatcgccaggcttgtactgatggagatttagaaagtatattttgcaatgaagaaatttatattcttcgggatcaattaaaagatctgtcaaacattctcaatgaattttgcagaggttacgagcaaacaccgaagtggaaacgatactttatttcctggaaggatacgcgagatagactaagcgatcaagcagaaataattctagaaaaatcaaattcataaaaagtacgaaaagttgatgaactaatatctataaccatcaggcaccggagcagaagagctgttccggtgcctgatagttttcagttgtatagaagtcccctaattgaggggactttttcaacacaaaatcaaacggtggatcatgacaaaggtgagggaatccagagcttgacttgataagggaatccggagcttcgacatcgctcgttcacggacgtccattccgcgtcggtgattgtacacgggcacccccgcacagttgctcctttgtccggtataatagagacgaatcaagaagggggtgctttttgtaagggaagaactagtcgcaaagcgtcatttttgtgcaaatgctttggggccgctgaccttggagtattatctgctggtaagtccacttgttgaagaactggagatctacggcgtcaaaattattgagcggcggggcgggacagcgtccagcgcccccagcctcacgacgaacagccgacggatccttcacctgatcgacctgttttccaaagggactattgtgccgacaagcttggtggtggaatttatagggggctgtcgtttgcgttaccgggggacggaggaccttcaatgagcgtagaacgtggagtgtcccttactatttacatttctacttatagtttctctccgtccgaatagagtatttgtctctcatgaagagctcgtgttgctgtggtctgtgactacagcaacacgggtttttctcttgattaaacaaaaccgtattgtgcattatacatagattttcacgcccaaatggagcacaatgctgattttacagagaccagaggaaaactttttttaaccggaaaagaaccttccgctttaacctttatacttcaatcacagggcaagacgagggcggtgagaggaatgaccccgtcagagcggagaagtgaaatcctacgcctgctatgcaagcggaggcacgaaacagccataaatcttgcgacagagtttggtgtctctgagcggacgatccgcaacgatttggtgattctctcctgctattacccgatccaagttacatgggaacgatatggcggaggggctcatctaccagaatggttccacttagaaaaccggatgttatctccgaaacaggaaatacttctccaaaaactgaaaacagccttagatggggaggagctccaagtcatgaatagtattctagcccagtttgccctgtattgggagtatcggtgatctaccgatttccgtcctgatccttgtaaatagaatatccggcagcgggatacgtccgctgacgagaggccctccgggaggggggctgaagcgacgctggaggatgcgccaagaccacctgtgcgggctgtgagcccgcatcaaagacggccaaggaaggtgcagagcggtgcccatctgtccacaaagcagcctgtggcgggctgtttcgcattgtggtcagggttttcctgatctgaccctcgtcagcaatctgataatgatactcctgtccagccacagccccgggtgataccgggatcaagcaatgggggcagctcagagagatcctcggaggggtgagattcccgtgatgtgtgccagcacagtccatctgctgccgcccagggcccgggaagtagtgtcgaatagggccaaccagcgaaatgtatttttgagagaattagcgggggccgttctgcggccatacgcctcataacggcccccatttgaaaatggagatatgaaatgaaccacaacattaactatatcgggatggtgaacctccttcatcacctccagaatgtcggccttgttagtcggaaggaggccgggaggatcgccgcccggctccgtgtagagactggagcggacgtcatattttctccctaatttttgttgcgtttggatatggatattttgcagatgtgctggtattgtgtgttgctgacaggaggcgattttgtggacgggcaaaagaaaaccagtggttccctggcattgaacagcacgccccgggtgatcaccatcgcgcccagcaccccggtcagggatcgcaagctgcgtgtggcggcctacgcccgggtgagctccagctcggaggatcagctcaactcctttgccgctcagaacgcccactacacagagctcatcaccgccaacccggagtgggagttcgtggacgtgtacgcggacaagggcatcactggcacctcaggggaaatacaatacctgcttcgccccgtttggataccaacttgtgggcggaaaactggagctgatccctgagcaggcgccgattatccggtatatctatgacgcctacctggcaggcaagacggcggaggacatcgcagcgacgctgaatctgttctctgatgaccgcccttggaagccacagcggatcgactacatcctcaccaatgagcggtacagcggcaatgcccttctgcggaagcgatacacgacggatactataccccgcaaagtgaagcgcaaccgtggagagaggcccatgtgttttgtggcaggaatcaatgaagcagtggtttcgcaagagatattcgataaggcgcaggaactgcgcaaaaaacgatgggaaaaccgccttgtcgaccctgacatttttatatcccgccaaaacgagctggcggaacagctccgcgccgcaaagctggagaaggaacggttcctgaaggccgaggaggatcagacgatccaacagactcaggagctgattgaagccctggaggctgggccggacttcctggacgccttcgatggggagctgttccgcgagctcgtggacaagattatcgtggagagcaatgaccgtgtgcaggtacggcggcaggagcggacaacgccctgcaaaaagagcccagcccagaaggagcttcggaagctgtgcggcggcagcccaccggcctgggtggaacggcaggtactgggccttctgaaccgcctgatccagcacccggagcgcatcacctgccccgtgttggaggatgagccaccgccagaggtgaagaagctgcgccgggggctggacgagctcctgcaccgcccgccggtagatgaggttcagaccagagatctggccttccggttggccgacctccagttaaatgccatcgggccggaggagtatgaaaccctccgccttcggaggctgtttcagggatgggcacccatggcagaactggagcaggaattgctccatcagagcgtccgccgcatcgccgtcagcaacgggacagtcaccgtcctgctgaaaaataaccagaccttggaagggggacattacacatgaacgataccgtgcccaatgtcatcgtcatcccagccaaagtggaaacaccccaggaacaggataaaaagcgccacctgcgggtggccgcctactgccgggtgtctacggacagcgaggagcagctctccagctatgaaaaccagctctcttactacacggagaaaatcatgaaggaaccgggctagaccatggccggggtattcgcagacgagggcatcaccggcacctccacctgcaagtggaaggagttcctgcggatgatccgccagtgcaggcaggggaagatcgacatgatcctggctaaatccgtctcccgcttcgcccgcaacaccgtggacaccctcaacttcacccgggagctgcggagcctgggtatcccagtggtcttcgaggagcagaacatcaactccatctacccggagagcgagtttctgatcaccctgcacggggctttcgcccaggccgagagcgagagcaccagtagccgggggccctggggcaagcgtcaggccatgaaatccggccatgtcgccatgcagtacaagcagctgctgggctatgagaagggccccgacggcaagccaaggatcgtgccggagcaggcggagaccgtccgcttcatctatgaccgctatctggccggggacagcatccgggagatcaaggcggccctggagggccagggaattcccacggtctccggaaaagcagagtggatggcatcccatatcaggagcatcctgaccaacgagaaatactgcggggacgtcctgctccagaagaccttcatccaggactgcatcagcaaaaaggtgatccccaacaccggacaactcccccaatacctgattcaaaaccacaatgagggtatcgtcagccgggagaccttcgacgctgtccagctggagatggcccggcggaacgccaaggcgggcgacacgcgaaagagcacccccaccggccggggcaagtacagcggcaagcatgtcctcagcaacctgctgttctgcggggagtgcgggacggcctaccgacggtgcgtgtggactcagcgcggagtcaagcgccccgtatggcggtgcgtcagccgcctggactatgggaagaagttctgcacccagtcccccaccctgaacgaggaaccgctccagcaggccatcctggccgccgtcaatgccgtcatgctggatcgcgataccctggcccggcagctcgccgccgtcatggagtgggagcttgctccgatgttgggtgagagtatgagcctggcggacattgacagggccctggaggaactgagcagccagttcaacagcctgctggccgaggcgtcagccaacccagcagaggactacacggagcggttccgggagctgtccgagtccaccacccgtctcaaagaacggaaggcacagctggagggggcctgccaggaacagggtcggctccagaaccgcctgcgggcggtctcggccgccatggagcatatgacggcggcgatgacagagtgggacgaggaggtcatccaccagctgctggagaaggtgacggtgctctcccgggagaagatccgggtgaccttccgggatggccgggaaatcgagcaggcagtcaatcagccaaaaaggagatgtattacagcatgaagatcttcgctataggcgatacccactggaattttgagcggtttcgcccggaatacttcccggagagccaagagctcaccaagaaagatgtggtactccagctgggagacttcggcggcgtgtggttcggggatgaacgggatgacgaggcgctggacaccctgctgcaaaccgaactgccggaggcggaattgtaccttgagattggcagggccatctgtgctcgcccggagaagggcgcggcggtaatggccgctgagtatctccaggccaactaccccgagtgcgggggcttctcccccagaaacctgcgccggatgagggagttctaccgagcctacgcagatagccggggactgcgggcgctggccctaaagctgggctggacgcagaatgtggccattctggagggctgtgaaggcagccaggaacgcacatggtatctccgggccgctctggagcaccgctggaccaagtccgagctgctggaacagatccaggctggggcatggctgcaatccacactcgacgaacagacggattcctgctatactgaagaaaatacagagagtgtggagtgtctggagcatgaagaaaatcctttttgtgtgtcacggcaatatttgtcggagcccgatggccgagtatgtcatgaaagatctggtgaaaaaagcgggcctggaggccgagtttcaaatcgcctcggcggccaccagccgggaggagatcggcaacccggtctacccgccggcccggcggaagctggcggagcacggcatatcctgcgaaggccacgccgcccggcagctctgcagccgcgactacgaggagtacgacctgctcattgggatggacaaggccaacctccacaatatgttccgcatctgcggcggcgatttcaacaacaagatgcatctcctgctggagtacgccggccgaccggatcaagaggtggcggacccctggtatacgggagactttgattccacctggcaggatgtgctggaggggtgtgagggacttttagacaatttaatgtaaaaaggttgaaccaaagtcgatgaactgattgtctgcgaagcaaaagtcggtatccaatggaaaatggaacgggacaactatgccagcctgagatattgcaaatgtaaagggtcatcaaaaaactgaacaccgttatattgctggcattaaggtttctcctacgccaaaacgttcgtacagcaaaaaagtatcgtcaatcaaaaggagaggtatgtcctaataaaaatatttagattggagtttttcctggagcccgccggagtccatagattccggcgggtatttttttgcagttcccacactctgggaactgctggagagcatactcataatgtccctgatcaccggagttgagtcctgggctcggcaattatgcttgtactggagagtgctggttagcagtaagaagccgtgcatggctggaatgggaagacaaaaattatgcatactatggcagaaaaatagggtgacaggacgaaatattccattgtggcagcgccggttcggtgctattttgataacagcacacataaaacgggggtgatacgcagatgtggattttggaggaaggacagattttgccctatctgcgcagccattaccctgtgtttgaccaatcgggaccggttgatatccagtgcataggcgcactggaaggagaggagaagcctcgggaaccggatgaaggcgggctgatcaactatatatttcgggtttccaacgggaagcagtctgtcatcgtgaagcaggggcgttccgccagccggaagaacgacaaaatagttctgcccatatggcggaatcgtcaggaatatgagacgctccggcttcgccatgccattgtaccccagtacacgccggagacctattatgtggactgggagaacgcaatttttctgatggaggatgtgtctgatctcgctcaggttcggaagctgctctgctcgggagtcatgctacccagactggcggagcaggtgggggaatttgttgcggcgagcaccttttactgctcggagttttatctggaagcagacctgtttcgaagactttctgcacgcttccgcaacagcgatatgcggtccatcatggaagactgggtgttcctgcgggatgcaccctacctcacccataatggaaacccggtgctcaaacagcttattgaccgggatgagagcatcagggtttgctgctacgagctgcgccacaaatttatgacccggggagaggctctgatacatggggatctgcatacgtccaacgtgtttgcagacgaggagcggctcaaggttattgacatggagtatacctttgccggaccgctctgctatgatatcggatactttgcggccagcctgctgacccagtactgcacagcgtgtttccggccgttcccatcggaaggggcgcgccgtacctttctctcctatctcctctccagcctgctggagctctactactcctttgtggagcactttacggagttttggagagaggatgcaaagccgatttatcagagatcgggcgggttttgtgagcacctagcccgtgggtttctgccggatgtgcttgggtttgcggcggtgccctgtttcccccagattacaacatctctgaccccggagttcgctcagttggacgggaaggccagaggacaggcgcatgagctctgcctggtgctcagccggtaccttctgcttgagcgggagcggtgggatacgatggaggatgcggttcaggccatcggagcggttacgcaaatttacctggattgcctggaataaacgcagcaaattaagacacatggcgggcttgccatgtgtttttttctcaaaaaagtaattatttggataaagtggtgttgctcaaatggacttttttgttataatagagaaaaaacatggctggcgcgcaagtgggtacccacttgcgctaccggatatccggtagagtaaaaccctttgtctgcgccgggagatgggccggaacggaaaattgagaaggaggatagaggggcatggaggacgcaagaaaattgtccgattttattgatctggacctgctgcagaacatccaggataattgctcaaaagcgatgggccttgcatttatcacggtggattacaaaggcatacccattaccaaatacagcggcttcacatctcactgcatgctggggagacaggcaaagggatttgcagagatgtgtgagcaatgcgacgcgcacggcggacttcacgccgcgatcaccggacagccgtacatttaccgctgccacgccgatctggtggatttcgcggttcctctcattgtcaatggaagctatatgggggcggtgctgggcgggcaggtgcggctacaggaggagagcgagcgggagctggagcacatcctcccacagcgtcccaattggaaacgggataaggaatgggaggaggcttaccagaagctggaggtcgtcacctatgaaaaagtggaggcatctgtaaagctgctgcgcgacatcatcgtgacatttgtggaaaggcggactgggaagggggcggatggagtcctgagagagaaggaaaagcagctctcggaggagcgggcggcccgtctggacctggaaaagcaggtacagaagcaggagagcaatacggcccgccgcaggacagagctccactacttcttttttgtcatgaacattatctcaaagttagcctatgaggagaaggcggccaaaacagaggcggtttcatacgattttgcagacatgatgcgttatgcagcgggggcagagcaaaaaatttccaccttgggggaagaactgaactatatcggggcgcttcttcggatacggaaggcttgggttcgggacaagttagcctatactatttctgtcccggagcagtatcatcaggtatcctgtccctttatggtattgcagcccattgtggagtgcgctctggagggggccgaaacggaggctgcggagcccagaaagctggatttctatgcggaggaggagaacggcaggctgctgtttcagattctcagcaatgacaccagccgctcggtggaggagctgacggaggagttatccggggcggcggaagagggatactttcatacaggcggtgtggaccgcctgttgaagcagacgctgggagggggataccgcctgatggtcaaccggcggagagacgggcgggccggtgcagcggtcagcttttacctgccgctggagcggaacggatagccggctcaagagtgctgtaaacgggaaggagctgccgcatgaagcagattctggttttgattgaaaacgagttggagcagagcattacaggggatattctgcgctccgggctgggggctgaggcggaaatcaccctcacagccggggcggagcaggccatccagcagcttcagagcggagcggtggatctcttcattgcggatgttgaacggtttgacgtggcccactgcaatatggtcaccacggcgcgaaagacggccccggacactccgatcctggttacatcggtggggacgcaggaggaaatcgcagggtatgtctggcgcctcggcgtccgggactatctgctcaagccgtaccggcccacgtggttgttggccgcggtgcgcgccttggtgcgtaaggagcgcagcggcggatgcgccgccgaccagcaggagatttacctgaggcgcctgacggagcacctgcagagattccagtataaaaagtgcaccgatgccgcaagagaataccttgatttgctctatcaaagtactgataataagggtgttatccgcacgagtgcagtccgctttgcggagggagtggcgaaagccggaatcccgttcagcaggaccacccagtggaagctgtcgggaagcctggagcactttcgggtccgctttgaccagcaggagcggaaatatgcaacctatgagtttattgttcggatgctggacacgatctttgacgccatagagaagagcgggctgtacgaggtagacagcgagcagaagattctgaattacattgaccggaatatccggcggggggtcagcctggatgaggcggcggagtacgcgaatatgagctcgtgctatttcagcaagctctttaagcggatgaccgggaaaaactatattacttatgtgacggacagccgaattgaaatggcgaagcgcatgctggtggacacggaaatgccggtcatcaatatcgcctatgagctgtcctataacgagacaaattatttcagcaaggcgttcaagaaaaaggtgggagtgacacccagcgaataccggacagcccattccgagctgttcagggagcagggggcgggctgataccggccgcgcagacgccttgcagcgccggaaagggtggagaaacatggaggaattcagcttcagcaccagaatcttttttggtgagggcgcgctggaacgcctgcgccgggtgcaggacaaaaaagttatgattgtgaccgaccgttttatggcgggtatcggtgtgccggataaggtggcggggcacctgacccggtgccaggtatctgtatttgacggcgtggtgccggatccccccatcgaggtggtggcggccggcgtccaggcccttcaggactgcggtgcggaggtcatgatcgccgtgggaggcggctccaccattgacgcggccaaggccatccgggcggtggcgaaggagactctgcacatcgacacagaccggtgggagtgctttgccgtgcccaccaccagcggcaccggctcggaggtcacggactacgccgtgatcaccgaccgggcaaaggggatcaagtatccgctggacagccaggcgttgcgtccgccggtcgccattctggacccggagcttacagtttccgccccggcctcggtaacggccgacgcaggtatggatgtgttgacccacgcgctggaggcatacgtctccaagggagccaacgatttctccgacgcgctgtgtgagaaagcggtttctctggtgtttcgcttcctgccgctggcctttcaggacggcacaaacctgctggcccgggaaaagatgcacaacgcctcctgtatggcgggcctggcgttcaactcggcggggctggggctgaaccacggcatggcccacgccatcggcgccaagctccacatcgcccatggccgtatcaatgccatgctgctgccgcatatcattacgttcaacgccgacttgggacggattcggaacggcgagtacgccctcgcagcaaaaaagtatcagcgcatggcaaaggttttggacctgccggcccccagtgtgcggctgggcgtgaccaaccttctgcgggaggtggagcgcctgaaccgcaccctgaagatcccggcctccctgaaggagtggggagcggagccctccaaggtgaaggagctgcgcggggagattgtttccgctgccctggcggatgccaccaccgccaccaatcccagaccggctgcggcggagcatgtggaggctcttttgaataaggttatggggggataatcccggagcgagaagcggcaccactctatttacaaaaaagcacccgaaggggtgcttttttgcgttgtttataggaaatgcaaacaaacaggctttgaacaggtggaggacttccgacaaaaaagtatatatggcagccaagaaaacaggggagggtttccggtataatttcgccagaaagcgtgcgaatgctgtttcaggcgcgccgcggaccacaataaggaggtagtaatatgcaacaggaagccctcggaatggtagagacgaagggcctggttggcgccattgaggccgccgatgccatggtcaagtccgccaatgtcagtctggttggctacgagaagatcggttccggcttggttaccgtgatggtgcgcggcgacgtgggcgccgtcaaggcggccgtggacgccggggcctgctccgccgagaaggtgggcgaggtcgtggcccagcacgtcatccccagaccccacaccgacgttgagaagatccttccccatatggcgtaaccgacataacggaaacttaaattagagttcggagggaacatagatgaaagacgaactgatcagcaaggtcatggacgaggtcatgaagaagatgggcgcgtccgacgcgacttccgcccccgccgccgcatgctgcaacaatggcagcgcgaactgcaacctgacggagtttgtgggcaccgccatcggccacaccatcggcctggtgatcgccaacgtggaccatcagatccacgagaagatggacatcgaccccaagtaccgctccatcggcatcatcggtgaccgtaccggcgccggtccccagatttttgccgctgacgaggcggtgaaggccaccaactgcgagatcgtgaagatcgagctgccccgtgataccgagggcggcgccggccacggctccctgatcatcttcggcgccgaggacgtgtccgatgcccgccgcgccgttgaggtctgcctgcgggaggtggagcgcaccatgggcgacgtatacggcagccccgccggccacctggagttccagtacaccgcccgcgccagccacgccctgaacaaggccttcggcgctcccatcggcaaggcattcggcatcacagtcggcgctcccgccgccatcggcgtgctgctggccgataccgccgtgaaggccgccaccgtggacgtggtgggctatagctcccctgccaacggcggcaccagcttctccaacgaggtcatcctgaccttcaccggcgactccggcgccgtcaagcaggccatcatcgccgcccgcgatgtgggcatgcaggtgctgaagaccctggagcccagcgtggagctcaagtccaccaccaccccctatattctgtaattgccgggaaggagtcagacagctatgaagtcaaaacgttttgaagttctggccgcccgtccggtcaatcaggacggctacgtacaggagtggcctgaggtgggcctgatcgccatgaacagccccttcgaccccaagcccagcatcaagattgagaacggcgtcatcaccgagatggacggcaagtgccgcgccgatttcgatatgctcgataccttcatcgccgaccacgccatccgcctgggcaacgcggagaaggccatggccatggattccctggagatcgcccgcaagatcgtggacatcaacgtctcccgtgaggagatcctggacatcaccctgtccctgacccccgccaagctgaccgaggtcgtaggcaagctgaacatcgtggagatcatgatgggcatgaccaagatgcgcgcccgcatgatgcccgccaaccagtgccacgtcaccaacgtgcgcgacaacccggttcagatcgcggcggatgccgccgaggccggcgtccgcggcttcgccgagatggagaccaccgtggccgtcgcccgttacgcccccttcaacgccatggccctgttcgtgggcgcccaggtgggccgccccggtgtcatgacccagtgcgccctggaggaggccaccgagctgcagctcggcatgcgcggcttcaccacctacgcggagaccatctccgtctacggcaccgagcccgtcttcatggacggcgacgacaccccctactccaaggcgttcctggccagctgctacgccagccgcggcctgaagatgcgctttacctccggcaccggctccgaggtccagatgggctatgccgagggcaagagcatgctgtacctggaggcccgctgcctggctgtcaccaagggcgccggcgtgcagggtacgcagaacggctccgtgtcctgcatcggcgtgcccgccggcgtacccggcggcatccgcgccgtggccgctgagaacctgatcgccatgctgctggatctggagtccaccacctccaacgaccagacctttacccactccgacctgcgccgcgtggcccgtaccgtgcctcagctcttctccggcaccgactacatctgctccggctactccgccacccccaactacgacaacatgttcgccggttccaactgggacgccgaggactacgacgactggaccatcatccagcgcgacatgaagatcgacggcggcctgcagcccgtccgcgaggaggacgtgctcaaggcccgcaacaaggccgcccgcgccctgcagggcatgttccgcgagctgggcctgcccgagatcaccgacgccgaggtggaggccgctacctatgccaacggctccaacgacatgcccgagcgcaacgtcaacgaggatctgaaggccatcgaggacatgatggcccgcaaggtgaccggcgttgacttcgtgaaggcgctggaccgcgccggcttccccgatgtggctcacaacatctacaacatgcttcgccagaaggtggccggcgactacctgcacaccgcctccatcttcgacgagcagttccacgtgctctccgccgtcaatgtgcccaacgagtatcacgggcccatgaccggctaccagatcagcgaggagcgctggaaccagctgaagaacattcccaacgccatccgtccggaagatatctaagaggggtgaagcagtcatgacgtttgatgaaaacacgctgcgcagtgtaattgaagaggtcctgaaggagatgggcgaggtgagcggcaccgccgccgcccccgctgcggcgcctgtcgccgcggccgcgggcaagctgaccatcaccgagaatggcgaggcccggaagggcaccgccgccgacgaggtggtcatcggcctggcgcccgccttcggcaccaagcaggttaagaccattatcgacctgccccatgacaaggtgctccgcgagatcatcgccggcatcgaggaggagggcctgaagtggcgcatcatcaaggtgtaccacacctccgatgtttccttcatcgcccatgtggccgccgagtactccggctccggcatcggtatcggcatccagtccaagggcaccacagttatccaccagaaggacctgcccaacctgtccaatctggagctgttctcccaggcgcctctgatcgacctggacacctaccgcaagatcggcaagaacgccgccaagtacgccaagggcgagtcccccacgccggttcccaccaggaacgaccagatggcccgccccacctatcaggcgctgtccgccctgctccacatcaaggagactgagctggtggacaacaacaagaagccgcaggccgttacggtctcgttccagtaaaggaggcagcacgttttatggatcaggaacttttgatgaagcagatcgtggagcaggttatggccgccatgaagaacggcacgcccgcttccgcgcccgccgccgcttccagctgcggctccaaggtcaccgcggccaactatcctctggccgagagcatggccgaccagatcaagacccccaccggcaaggacttcacctctctgagctatgagaaggtcatcaacggcgagctctccgccgacgacatgcgcatcgcgcccgaaaccctggagatgcaggcccaggtggccgagtccgtccaccgcgaggcctttgccggcaacctgcgccgcgcagccgagctcatcgccgtgcccgacgaccgcctgctggagatctacaatgccctgcgtccctaccgctccaccaagcaggagctgctggacatcgccggcgagctggacggcaagtacggcgccaagaccgccgcttccctggtgcgggaggctgccgaggtttatgagaagcgcggccgcctgaagaagttctaatcatactccagagtcaggaggccccagaatgaaactggtcgcaggcattgacatcggaaacgcgacaacagagacagcattggcccgcatcgaggacggtcacgcggtcttcctggccagcggaaccgtccccaccacgggcatcaaggggacccgccagaacatcaacggcatctttcactccctgaccaacgctttggagaaggccgggctggagctcaaggagctgtcggaggtgcgcctgaatgaagccgcccccgtcatcggcgatgtggccatggagaccattaccgagaccatcatcaccgagtccaccatgatcggccacaaccccgccacacccggcggaatgggcgtgggcgtgggagagacggttctcatcacggagctggaacaggctccggtcgggcgggactatattgcagtggtgcccgggacggtggactttgaggtggcggcccggctgatcaaccgggccaccgccggggaccgcaaggtcaccgcagccattgtccagcgggatgacggcgtgctgattcacaaccgcctgacctgcaagatcccgatcgtggacgaggtggcgctgattgacaaggtgcctatcggcatgcgctccgccgtggaggtggccgccgtgggcggcgtggtggaggtgctctccaacccctacggcatcgccactctgtttggcctgtcctctgacgagacccggcaggtggtgcccatcgcccgggccctgattggaaaccgctcggcggtggtgatcaagaccccggccggagacgtgaaggagcgaaaaattccggccggcacgattgagctactgggggaaaaccgcagcgtcaaagtggatgtggacgacggggccgacaagatcatgaaggccgtggagtccattcccagcctggaggatgtgcggggagagccgggaaccaacgccggcggcatgctggagaaggtgcgccaggtcatggcgaatctgactagccagcaccccagggacatcaagattcaggatctgctggcggtcgacacattcacaccccagaaggttcagggcggcctggccaacgagttttcccaggagaacgccgtgggcatcgccgccatggtcaaggcggaccgcctccagatggaggccatcgcccgggaatttgcccagcagatcggcgtcccggtcgaggtgggcggcgtggaggccgacatggccatccgcggcgccctcaccaccccgggcaccaacaagcccctggccattctggacatgggcgccggttcgacggacgcctccatcatcaacgccgagggacagatccactccatccacctggccggagcgggcaacatggtcacactcctgatccagtcggagatgggactgcccgactttgacacggcggaggatgtgaaaaagtaccccttggccaaggtggagagcttgttccacatccgccatgaaaacggcaccgtggagttcttccagcagccgctggatcccaacctgtttgccaaggtggtcattctcaaggagggcaagctgctccccctggagggtgactggagcatggagaagatccggctcatccggcagcaggccaagcagaaggtgttcgtcaccaacgcgatccgggccctgacccgggtcagccccaccggcaatgtccgggatattcagttcgtggtgctggtgggcggctccgcgctggacttcgaggttccgcagatggtgaccgatgcactttcccagtacaaggttgtcgcgggccgcggaaatatccgcggcaccgaaggcccccgcaacgcggtggccaccgggctggtgctctccctgacggaagggaggggctgatatgcccgtaatccaagaaaggatcaagcccaccgtccatgtccgctgtgcagaggacaccccgcaggaggtactgcggcagctccagtacggcatggaggaggagggcattccctgggaggccgcagccgggacgggcgacgccctgtccctggcctgggaggccgcccggagctcccggctggaggtgggaatcggcctggaccgacaggcgctggttctccactactccaagctggagcgcgagcagcccctgttccgtattcccgccaattccggtatggagacggtgcgggcgctgggggccaatgcggcgcggctagtgaaaaagctgccgctgaaggccctggacaggaggtgagagcatgcagcaaaaaagcctgggactcatagagacccaaggcctggcggccggcatcgaggccgccgatgcggcggtgaagtcggccaatgtggagctggtgggctatgagctgaccaaaggcggaggctggactaccatcaagatcctgggcgatgtgggcgcggtgaaggcggcggtagacgccgcgcggattgccgccggcaaggtgagccgggtggtaagcacccgggtaatcgcgcggccgtccatggggctgaccggcctgatccacaacaccgacacggtgggagatcagccgccggagccgcctgcgccgcccgctccaacggatccgccggagccgccgaagtctccggcagacgtgcagcccgcagaggagggtgcttcggggacgacggagtctccggaggaggtacagcccgttgaagtggagccttcggggacgacggagtctccggaggaggtacagcccgttgaagtggagccttcggggacggcggagtctctggaggaggtacagcccgttgaggtggagccttcggggacgacggagtctccggaggaggcgcagcccgcagaggagggcgcttcggaggcgatggagtctccgaaggaagccccctctgaaaaggcgaaggagacgccctccaaacggcgggggaagaagtccgcaaaacgctgaaccgcgcagaaaagcgggacggcagcactgatttttctgatattttctaggaggttatcacaatgggtgaagctctgggtatgatcgagacaaagggtctggtcggcgcgatcgaggcggccgatgccatgaccaagtccgccaacgttacgctgatgggctatgagaagatcggctccggcctggtcaccgtcatggtgcgcggcgatgtgggcgcggtcaaggccgcggtggacgccggcgcctgcgccgccgagaaggtgggcgagatcgtggcgcagcacgtcatcccccgtccccacaccgacgtggagaagattctgccgaagggcctgtaaaaagaggcttgaggcatggacaagaacaacgtggtttcagcagagattgtccgccagatcacccgcatggtggtggaggagctccagaagcagcagcggctggagcgctccacccccattggggtctccaaccgccatgtccatctggaccgggcggacatggacgccctgtttggtccgggcagcgagctgacggtcaaaaaaatgctcggccagccggggcagtacgcctcggaggagaccgtcaccatccgcgggcccaaaggggagctcagccgcgtgcgcgtgctggggcccctgcgcgctcagacgcaggtagagatctccatcgccgacggcttcacgctgggggtcaagcccccggtgcgcgagtccggtcagttgaaggataccccgggcattgagatcatcgggccctgtgggagtgtaaagaaggacagcggcgtgatcgcggcgctgcggcatgtgcacatgactccgaaggacgcggcgcgcttcggcgtggaggacggccagtatatccaaacggagatcgacggcctgcggggcgcgatcctctgcaatgtgctggtgcgcgtctctgacaagtacgcgctggaaatgcacattgatgtggaagaggccaatgctctgggcgtcaaaaacggcgaccgggcctttttccttgacgattgagccgggaaggaggcagggcagaggtgggccaggagctgacgcaggccaatgagacccttctggaatttgagcggctgattcaaaccggaggctgcaatgcctgggagggtacgctgcgtaccggagtggatctgggcaccgccaacatcgtgctggcggtggtggatgagcagaaccggccggtggccggggcctcttatccctccacagtggtccgggacggtatcgtggtggactacatgggggcggttcgggcggtcacacatctgaaaggacagttggaggagcgcctgggcgtcatgctggacgccggagcctgtgccatcccgcccggcatccttgagggcaatgtgaaggccatcggaaacgtcgtggaggcggcgggcttccgcctgaccaacatcgtggatgaacccacggcggcctcctccgtgctgggtatttccgacggcgcggtggtggacgtgggcggcggcaccacaggcatcagcgtcctgaaggacggaaaggtgatcttcacgggcgacgagcccacaggaggcacccacatgacactggtgctggctggcttccacggctggaatacccaggaggccgaattggccaagcgggatccggcgcaggaggccaatgtgtttcctgtgatcaagccggttgtggagaaaatggcgtccattgtccggaactacctccgggagtacccggtggagacggtctatgtggtgggcggcgcgtgctgcttcacccaatttgaatcggtatttgagaaatttctgggtgtccccgtggtcaagccggcggctccgctgctggtgacgcccctggggattgccgtaaactgcaagctgtaaagtaggtgaggaccgttgacgacggagcaactgcgcgggatggcggacgaggcgtttgtccagatcctggcccagcgcgttgtggagaagctcctggcgcggcagaagcaggcgctggtagtctacaccggttccaacatcggtgaggctgccgcgctggaggccatgggccgtctgcgcggagagggcttcacgttccgggtgctcctctcgcggggggcgtccggcctgctggacgtggaacggctccgctccgttctggagccggagaagctgtgggtggaggctccggaggagactccggaggcgctgaccgcccggtacgacaccattttggttccggccatgacggtacataccgccgcccacgtggccgcctgcatggcggacacaccggcgtccgccgttattctggacggcctgatgcggggaaagaacgtagtggtgaacatcgacggctgctgcccggatcacgccgagcgcctgaagcgcggcttccatatggcggagccgctgaagcaggcgcttcggaacaatctggagaccctgcgctccttcggcgcgcgcctgaccacctccggcggcctctatgacaaggcgctgcgggcggttggcggggcacaggcccggacggcggcgccggctgcgaggccggaggccgcgccccggaagcaggagggggctgcccgcatccggctggagggccgggttttgagcggacgccacgtccagggatgtccgccccacagcaccctgtgggtgccgcgggagaccctgattacccaactggccgccgatgaggcgcgccgccgggacatctgcatccgaaaagagacgtaaagcaggtggcaaaatgtatttgggaagagtgatcgggaccgtggtttccaccagcaagaacgagcatctggtgggaatgaagctcctggttgtggaaaagctgacggagcgcctggagcgggaaggcaccagcgaggtggccgtggactccgtgggagcgggcaccggcgagattgtcattgtctgcaagggcagctccgcgcgctatgtgttcggcaagggtgacgccccggtggatacctccatcgtgggcattgtggatacggtagaggtgggctgatggcaaatctttacaccaaaaccggagacaagggccagaccagcctggtgggcggctcccgggtgagcaagtccagcctgcgggtggagtgctacggcaccatcgacgaggccaactccatgctggggctggcgtatgcccagaccgaccgggaatatatccgcaccacggtccaccgcatccagggccggctgttcgccctgggggcggagctggccagcgacgagcagggggcggccgggctgacgggaaagatctcggaggaggacgtggcctttctggagggcgtggtggacaagtgcaccgagaccaccgggaagcagacccacttcgtcattccgggcgtggaccccgcctcggcggccctccatgtggcccgtaccattgtccgccgggcggagcgccatgtggtggccctggcggagagcgagccggtacgtgaggtgctggcccgctacatcaatcgcctgtccgatgcggtgtacgcgctggccaggcttcaggaggatctgacgcaggaggagcgcctgagggcgcaggtgactgcgctggttcggaaacaactgtccgccccggagggcggcctgcccccctttagcctggcatcgctccagaggatggcccagcgggccgtggagcgggccggacagctcggggttccggtggtgttctccgcggtggacagcggcggcaatctggtcctgctccagagaatggagggcgcgctgctgggcagcgtggacgtctcggccggaaaggcctataccgccaacgccttccagatgccgacccatgagctgggccaggcggcccggccggacggcccgctctacggcattgacgcttccgctcccgggaaaatcgtgctgttcggcggcggcttcccctatgtggtaaacgggaaagtcgtgggcggcatcggcgtatccggcggtacggtggaacaggatatggacatcgcgcggtacgcgatgtctctctaaggaggaacagcaaatgaacattgacgagaatgtggtcgaatccattgtgaagcgggttgtatcccagctgagcacggagaccgcttccgcccagacctgcccgtccggcggggactggggtgtatttgagagcatgaacgacgcggtggacgcggccgtggaggcccagcgggagtatctgaaccgctccatgcacgaccgggcctgctatgtccaggccatccgcgacgtggtgctggaccaggaaaatctggagtacatctcccgcctggccgtggaggagactggcatgggcggctatgagtacaagctcatcaagaaccgtctggccgcggtcaagacgcccggcatcgaggatctgaccaccgacgccatgagcggcgacgacggcctgaccctggtggagtactcgcccttcggcgtgatcggctccatcacccccaccaccaaccccactgagaccatcatctgcaactccatcggcatgctggcggcggggaacgcggtggtgttcagcccccatccccgggccaagaaggtgtccctgcacctgattcagctcatcaacaaggccctctgcaaggcaggcgcgcccgccaacctggtggtcaccgtgtccgccccctcgattgagaacaccaacgccatgatgagccaccccaagatccgcatgctggtggccaccggcggccccgccatcgtcaaaacggtgctctccagcggcaagaaggccatcggcgccggcgccggcaatccccccgtcgtggtggacgagaccgccgacatcgagaaggccgccaaggatatcgtggacggctgctcctttgacaacaacctgccctgcatcgccgagaaggaagtcatcgccgtggactccgtggccgactacctgatcttcaacatgaagaagaacggcgcttacgaggtcaaggatcccgccgtgattagccagctggtggagctggtgaccaaggagggcaagagccccaagaccgagtttgtgggcaagagcgccaagtacatcctggacaagatcggcatttccgtgggagatgacgtaaaggtgatcctcatggagaccaaggaggatcaccccttcgtgcaggtagagctgatgatgcccatcctgcctctggtgcgggttcccgacgtggatcaggccattgagatggccgtccgggtggagcacggcaaccgccacaccgccatgatgcactcccgcaacgtggagaagctgaccaagatggccaagctcatccagaccacgatttttgtgaaaaacggcccctcttacgccggcatcggcgtaggcggcgagggctataccacgtttaccatcgccggtcccaccggagagggcctgacttcggccaaatcctttgcccggcgccgcagatgcgtgctcgtcggagggatggacgtcagataaacggaggtttgggccattatgcaagagaatctgctcggcctggtggaacaggccggtgtggtgggcgccggcggcgccggatttcccacccatgtgaagctcaaggcccaggcggacaccgtcatcatcaacggagcggagtgtgaaccgctgctccgggtggatcagcagttgatggccctccaggccggcgacctgctggacgccctcgatctgctcgtggagcaggtcggggcgtcccagggcgtggtggcgctcaaggagcactaccacgcggcggtggaggcgctggagcgggagctgtccaggcatcccaggctgaggattcaccggatgggcgcattttatcccgccggtgacgaacaggtgatcgtctacgaggtgaccggacgcgtggtcccggaggggggcatccccctgaatgtgggcgtggtggtcagcaatgtggagacggccctcaatgtgctggcggccgtccgccatcaggccccggtgattgagaagtatgtcacgctgaccggtgcggtgcgcacccccaagaccgtgaaggtgcccctgggcatcacagtggcggaggcgctggccctggcgggcggccccaccgtggagcactatgaggtcatcaacggcgggcccatgatggggcgtgtggtgagcaccggaagcgctattaccaagaccacaaagggactcatcgtagtcccggagggccattccctcctccagagcctgaaccggcccgtgccgcggatgctccaggatgcccgggtggcctgtatgcagtgctccctgtgctccgaggtctgcccgcggggcctgctggggcaccgcatccagccgcacaagatgatgcgcctggccgcctatggcgccctctgcgacccggagtatacccccatgaacgccttcctgtgctgcggctgccgcctgtgcgagtacgcctgcgtgatggggcttcagccctggaaactgaacgggatgctcaagggcgagatgggaaagaagggtgtccgcaatgcgctgcacaaccagccggaggcggccgcgccgttccggcagtacaagcgatacccggttcacaagctgattcaccagttggggctggacggctatgatgtccccgccccgatggaggacagctcctgcgactatcaaatggtgaccctgccgctgagccagggggtgggcgcacccgcccagcctgtggtgcgcgcaggggacagagtggagaagggagccctgattgcgacggccccagagggaaagctgggggcaaaccttcacgcgagcatcgcgggcacggtgaccgcggtgaccgagagagagattaccatccaacaataaagattggagaggaactgatttatggatatcttggctctgatcgccgcatttggcggcggcattatcggcgcttatatgggcgcccttcccgcctttattatgactggtatctacgccctggtgggcggagtcctgacggctgccggcgtgggcggcgatgttgcagtcaactacctcgcctttggttcctttgtcggcccccacatcgcctttgccggcggcgtggccgccgccggctacgcgggccgcaagggcaagctggcctccggcaccgacatcctgtcctccctcaacggcctgggtgagcccgacgtgctcctggtgggcggcatcttcggggtgctgggcttcctgatccactactgcatcggcctgctgcccgtcatcggcagcgccggccccgccaccaccgacctgcccggcatcaccgtcttcattctggcggttgtcacccgtctggccttcggcaagaccggcctgaccggcaagtacaccggctccggaaagcgcgagtggttcgccaccgggaagggcttcgtctataacgtggtactgggcggcggcatcggcattgtggtgagcttcatcgccgcattcctgtacgagaatgagtttaccgccgcgttcagcatcttcccgatcgtgtgcttcggctttgcggccatcacgctgatcttcacccagaccggcttcgccacgcccgcgactcaccacattttcctgccctccgggctggctgccgtggccggcatcaccgcctggggccctgcgggcgctctgctgggcgtgctcttcggcatcctgggctccctgctgggcgacctggtgggcaagagcttgaacagccactgcgacacccacatcgacccccctgctaccacgatctttatcctgacgattgtgatcaacgctgtcagcagcgtgatcaatgcctgagccaacagaggaatccataggaaaagaggccagttatgggaaagtccatcggattactggaattgaaaagcatccccgtcggcattgaaaccgccgatgcggtgctgaaggccgccaatgtggagctgctgaccgcgacccccacctgtccgggtaaatatgtcattatcatctgcggcgcggtaggcgctgtgaagagcgccatggagagcggccgccagacagcgggcatctatctggtcgggcaccacaccatcaacaacgtgcatgcttccgtcccggaggcgatcgtgggcacgtcggaggtgggacacatcgcctccatcggcgtgattgagaccatgacggctttgactgccgttgaggcaggggactatgccgccaaggcggcgaacgtccgcctgatggagatccgcattgcccgcggcctgggcggcaagggctttgttattctcaccggcgaggtttccgcggttcgctctgcggttaaggccgcgatgaatcaactggaggagaccggggatattacaagcagcagcgtgatcgcatcgccccatccgggattgattgacaagctgacgaactaagggaaacaggaacagacgcggaaaggagggccatcagtatggcttcacaggattgtcccaactgccactatccagcacccaaccgcaaaaagcctggggagggggagcgcgtgccccagggtatgtaccacgcccccgacaggagcggtgagccggaagagtgcccccagtgcttttaccagccggaggcagtggaggaaaggccggaggaggagtgtccccagtgcttctaccagcccgaggacgggcagaagcgggaggaggccaaggaggacgactgctctcagtgcttctataagccggataaataagaattggtaagaaaggattgtgagctctgtggaacgactcattggaaagcaggcgccctatttttccatggaggcgctgtcggcggacggagaacattttgtgcgcgttgcgctgccggactatgccgggaaatggctggtgctgttcttctaccccatggatttcacctttgtctgtcccacagagctcacagccttctcagagcaccgggaggccttccgtgcggccggagcggagctgctcagcgtgagcacggacagcgtctacacccatcaggcctggcagcgcaacggcctgggcgggctgggttaccccatggcggcggatcagactctgcgggtctgcgccgattacggagtgctgctggaggaggagggggtggccctgcgtgggctgttcctgattgacccggagcaaaaagtgcgctacagcgtaatccacgacaacaacatcggccgcaatccggaggaggtgctccgggtattggccgcgctgaaaaccggcggcctgtgcgcagccggctggaaggccggggaggaaaacctccgcccggacatgccggaacgcgaggctccagtgctggcgggtacggcgcccgtgcgcatctatacgatgcccggttgcagctactgccgcagcgtaaaggagtttttgagacagggcgggatctcctatgaggagatcaacctcgcggaggataaggccgggcaggcctttatggagagccgcggctacacgggcctgccggtcacggtgatcggcgcggaggagattgtaggctataatatgcccagaatcaaggcggcgctgggcctgagcggagcaaacgaggtgaaataggatggacttaatggactttggaaccgtgcaggaggggaagatgcggcttgttcaggagatggtgcccggcaagcaggtcactctggcccatattattgcaagcccggatgagattatctatcagaagctgggcctcaatcccaatgtggactaccagcaggccgccatcggaattttgagcatgacgccctctgaaatttccgtaatcgcgggcgatattgcgaccaagacctccaaggtggagatggggtttattgaccgcttcagcggaaccctcatttttaccggacgcatttcaaacgtacaggccgcggtgtccagtatcctgacctatctgaagaatcacctggggtttaccatctgtgaaattacgaggacatgaagaaaattattttaatgggccggagcgaatgcggaaagaccaccctcacgcaggcgctgaagggcgatgtgatccactatcacaagacacagtacataaaccattatgatgtggtgattgacacgccgggggagtatgcagaaaacgccagcctggcgaaggcgctggcgctctatacctatgaggccgacgtggtggggctgctgctgagctccaccgagccgtactcgctctacccaccctgtgtgacggcctgctgcaaccgcccggtgatcggcattgtgacccagattgaccatccggacggtgatccggaccgggcgcagggctggctggagctggcgggatgccacccgatttttcgggtcagctcctataccggggaggggatctggcagatcctcaactatctccgggagccgggagacatcctgccctgggattcggaacaggcggcggagcgtccccgggtggttctctcgaacaaatatgggaggctgcccgaagagggcggcggacacccgcaaacaatttaggaaaaaacaggagtgctcctgccgcgggagagactgcggtgggagctttgctgttatgatacgttaggcgatacaatttgcagaaggagggctgtccatggaagcgctgacctttttttccgcgatgaaccggggacagttccgggaggaacaggggattgagggcagctcttactgtatcttttttgccccgatggaggagctggtcacccaggaccgtatgaccggaagagaggaccgggtcgtgctggagctgctctacggcgatgaaatgctgcccggggccctgcgggtgaggcaggtggggagcaatgcggtcgttgaggagtccacacagggggcgtttcgcgccttcctggaggagaagccggtcaagtacatcggacaactgctgatgtacgcgctccagttcaaaatacaggatctctccctgcgcattgagggctgcacaggcgagatgaagcagttggaggacgccctggacaactgcatcgacaacagcggcacctatcgtctgctggatttccgcaggcgctacaccgagtgcgggaatatggtgctggcggtgaaggagatcctgtcgcggatcgacaagggctactatccgatgcagatgcagaacagctatgtgttgcagggcgaggtgctgatggagttccgcttcctggaggagcggtatgagctcatcaagagcacggttctcaaggactttgatacctatacctccatcatcaataacaatatcaaccggaatgcccggctgctgagcatcatctcgctggtgggggtggttctcaacttcatgttcggaagtctgctggccgccaatccacttctgggaatcatcggcggcctgtcggttgcgggcctgtctgtgggggccacggcggtctaccatgtcagccgccgcggcaatgcgccgcttccctccgggcgcggtccgattcaggcgtttccctccctgccgaaattccacaggaaagagaagcgggagcgggatcagtgggaaaaatgaatatggagcggtgacagagggggtgtgccaaacccgtgccgccaaagaccggaatgggccggagaggacgaatgtcctctccggcccattttggtttcactaggaagcagatgttccgggttgccgccgtttttccggcggcctcagtccatcacctcgccgccgggcgcatcatgggcgtcggaccagactcgctcaagagcggcccaatcgcgctccgtcagcctgccggtccacgcctccgtgtcttccccttctgtccagatatagtcatgggagttggtggcttcctgcatggctgcgtagtaccaggcggaggtattgttgtccggccaggtgagcatctctccgcggggcagcaggtgtgcttcatgaggggcccggcccagggtgcggttgacgatggtgcacgcctcggcccgggtgatgttgtccagcgggtggaaggtgccgtcgggcatgccctcaattagtccgtactccaccgctgcggccaggaaggtcacataccactcggttccctccacatcggagaatcggccgtcgtatgtgaagtccccttcggtaaactcgaaaaagctcactgcaattttggtaaactcagaccgtgtgatgggttcggtagggcggaaggtgccgtccggatagccgtccagaatacccatgctggtcaaggtggatatggcgttgttgtaccagtcgccggaggccacgtcggagtatggattggtctgactccaataggcctctctggcctcgtcggtgagcaggcggaaaaagatagtggccacctcgctgcgggcgatatcgccctccggccgcacagtgccgtccgtatagccgatgatgtaggccacgtggtcctcggtattcagagactcaggctcgtcgtcgcggtccgggcggtgggaggggcggccggggtcgggacggctggtctgaatggtgtaggacacggttggcctgcggaagttctccggctggccgggccggctgttgctgtccaccgggtacagggtcgcgctgttgttggtgtaaaggccgtcgtagttcttgctgccgtccgcatcgtactggccatatgtgccatcggtctcctgcggattggtcagcttgacggtgtaggtcagttgaaccggggcgaagttggagatgggaacattgattttccagacaaagcactcgttggagacaccgtcccgccccttggcgtagtagtagagctcaaaatcataggcgccgctttccccagctccaaacccataggcgctggtgatatagggatcgctgaacgagggatcaatcaattcggtcttgtcgagaacctctccgcccacggtcagggccagccggtctatgtcgttgacaaaatcaaagtcgtacccgttgcttttgttgtcggtgccggagccaatttcatccaccacatagctgcctttatcaagcaggtagtagatgtcgttctggatgtcggtaaaatcaacggtttcgccgccggccaggtagtccatgaaactgatgccaaagccataactgtcgacaccgctctcagctttcagcgcataacaatggtactctttgctcatttcctgatagagcgcattactattgtagagagacagatcaacgttgattggatagccgttcctatttacataagggatggagccttcagaatccaaatcacttgtttttggacgattcggatcgttcaaagaatattcatatttggtgtattcactatccaatacgccttttactgcatcaaagtagctggcccaattttccgggacataatcagaggaatatttacattcccacgcggacaatccgtcatttggctgttcgttccttccgcccgttccggtatcaccgccgtttctggaggaaattgtgtatgcctgatcgtagtttccgcctttacaataataatacgttaaaccatcactgacaaggattaaatatttccgagagatatcaacacttgtatctgcatccagcattgccttgccagccagcagtccggcgtgcatattggttccactctttagtgtctgctggatcgcggcttcaatgtccgcatattcggtagccagatcaaaaaattcaccattattggcgacattggcaaccgcattaaaaataactacaccgacattgatcttcgcgccagtgttctcaagctgatcctttagggaacgaagcatctccagagacttggcctcaaccgctgcactcgtagatttgtccaatacaaagaccacatctgtaacgagctgttcctctgccgcgggcagggacagggtcacgtcggacccaaaattgctgtccagattggttgcggtcttggatttggaggtgtcccatccgctttcttcgccgggctccagagggctcaggccatgggctgcttttagcgccgtaagtccggttgcagaggcaaacccggtcagcggctcaaaatccgtgaactccaccgcgtgatagggctcctcatgcgcctcccagcgggcgccctcgctgtcgtcgtaccagccgtctatggcgtcgatgcagtctccctcccctccgtcaagggtccagccggagcccacttttccgaaggagagagagggcccgctgacaccttcggaaacatagatatcatcgcctgcaacaagtgcatgattgttgcagattatggcatcggcgggcagaattacagtcgggtcatagttattgccatagccgacataaattccgccgccgtagccatccagcaggctgtgcgaaaccttgttgccggtgatcttgaggacagccccgtcctctaccgtcagattgccttgccgcacatacagtccggtgttgttgttatcctcaatataaagctcgctggtactgtccactgtgaatggatagtcgttgtagagccgtacagcggcataaccatagctggaattcccggcgtttccggtcacagtaacaatggaaccgttctcgacggtaaaggcgttgtttacggtaatccccataccgttgttattttttgtgttgacggtggagttatcgatactcagttcaccggcagaaaggccatgggaaccgttgttgttgaaattgacttcggaatcctcgataataaagtgagagccattggagccatttccaaggctgttgacaacatccaccttagaattggtaatcgtggcatagaatgtacccgtgaagccggagcggttgtggtcggagatgaaggtagaattagtgatattgacgttatacccgccatcaccgccgtcccactccagagcatcgttttggtagtttttaatcgtcaggacagagccgtttgtcagattcagcttattgttgctacagaagtaaatcgcatggggggaaccggtgctaccggttgcatccatggtcatattgacgttgtccagcgcgagaacggcatctttgctggcgcagatcgtcatccaggtccattctccatacggtgtggaaccgaccccgttcatgacaacgtcgatgcccttaaaggtcagcgtcttgccccacagggcaatgccgtccttttcaaaggttacggtcggcttttccgccagatccggggccgacgtaatggtaagactcttggttaaattccatcccttggtcgtggcatcggccagaagttcgatggttgcaccgtcctccgctgcattcaccgcctcgtccagcgtggggtactcgttttcctcaattttcgccacattgtcatccgagaggagagtggttggttgattcgagggcgcgtcctcggccgccagggcgctcatgggcagcatgctgaggcacagggccagcacacagagcaaacccgtgaatcgcttcaagattcttcgcatacttatcctccttttttcaaatatgctgggactctgtcgttcaaaaagacctgctgcaatcacctcgctttgcatggcaaaataaatcttttgtcctaggttcacctgtgtattccggcaggatgtggcataaagggcgataaaaaaagccccgtgccgaggcacggggctaaaaatgggcgcagaagatgggccggtgaagcataattgcttgccccggtctgcttttccatgtccaaaacaggctgcacttcttgaaagagagcaaaagatgtggtaaaatgaataccgttctatgtactgaacatttacttttcaagccgtatataggacaaaagatttattttgccgctatgatatcagccccagacgggcaagctggcgggcgtgctccgcgccggtggagagcaggtagatccgggtggtctcgatggaggagtggcccagtacatcggccagcttgaccacatcccggctggcctggtagaaggctctggcaaacaggtggcgcaggttatggggaaacaccttgctgtctgccactccggccttccggcacaccgctttcatctccgcccacacctgctttctggatatgcctctgccgcttctagtgagaaagatctcgccggaggcgattttttgtgcccgcccgtattgcagcagcttgcggcacagcttaccggggatcaggatcgtgcggattttccccttcagcgacacctccgcccggccgcggcgggcggcctccatggtcaggtatttcacctcactcacccggattccggtggcgcagatggcctccatgagcaggcccagacgctcccggcccagtccccgggcggcggagagcaggcggccgtactcggcccggctcagctcccggtcgggggagcgaaaaagccgccgctggagccgcagtggtttgaccgtgcagtccatccagcccaggaaacgaaaaaaacggttcagcccggccagcttgctgttaactgtggcaggggagaggccccggcgcagcagctcggccttccagccgcccgccgaaccggcggccacggtctccggcgccagccaggcggcaaactgacgcaccgaccgcgtgtactgtttgatggtctctgtgcagcgctcctctgcccggagcgcctgggcgaatgcagccagcgtttccacggtaatgcttcgcagttccatatggttctgcccccattgaatcaaatattttttattttacccaactacgcgggatgatatgaagcggcggaggcgggttcgggagagggggggccgctgccgcgggaattgtgtgccggaacattttatggtatagttgtaaaatagaaaaaacaagtgtgccggcggagcgctcccgaggagagcaggctggcgcgtgatttccggcgaggtgatgcctgtgatagggaaatggctcaactacatgtccagactgcacgacggtgtggatgcgattctgatcgcagaccggcatgggaccatcgaatactccgccatgttctccgagcaggaaaacgggctggccgacgagggctttatcgggaagaacatcctcgaagcctatccgcaactgaccgaggagacctccagccacttccgggtcatgcggacgggggcgccggtgctcaatgaaaagcaggaattgacggacttttacggccggcggaccatcttggtcagctccacctttccgctggagtacagcggcgagctgattgggacgatggagacctcggttttctaccacaaggacgctcagttggatgggaaaaaccactggctggccaatccgcacaaggggctgttccggctggacgacatcattacccaaaacccggagatgctgacgctcaaggataccgttcagcgggtggcggccaacacctctcccgtgctcatttggggagagaccggcacggggaaggaactctttgcccagtcactccatagccacagctccagggccagggggccgtttgtggcgcaaaactgcgcggccatcccaaccaccttgctggagagcaccctgttcggcactacgcgtgggagctataccggggcggaaaaccggaagggactgctgaaacaggctgatggaggcactctgttcctggacgaagtgaactccatggatctgtccctccaggccaagattctcaaggcgattgaggagaagcggttccgccctgtgggcggggaacaggatgtgcacagcgatgtgcgtattgtctccgccatgaatgtggatcctatcaccgcagtacgggaggggctgctgcggcgtgacctgttctaccggctgggtgtggtgcagttggcgctgccacccctgcggaagcggccggaggacattccgctgctcaccgatttctatgtggagcagtacaaccggaacatggggcgggcgatctccggcgtgagcgagctggtgcgcaatgccctgctggcctatgactggccgggcaatgtacgggagctgcgcaatgcggtggagtcggcgttcaacctctgtaccggggccacggtacagctcaatgatattccccgctatatcttttaccacgaggaggaggcgggggagaggcaggagccgtggcctatgccggaacatatggggcttcaggaggcggtccgccgctacgagaaggggttgattgtccgtgcgctggagcagagccggacggttacggaggccgcggagaagctgaggctgacccggcaggcacttcaatacaagatgatgaagtaccatctcaacggataggactgtagaaagcaagaatttttgcattttgcgcaaaaattcttgctttctttttgccgggcctgtcccgcgaggcggccgcgttctgcgcaacccctggcagcgcaggcagttctaactatgtttgcctcttttgacaagctggcatccggcttgcttattctaggggcagtggttatgcgtggaccacatatctgaagttaggagagggttaaagatggcaccaaagaaaaaaggtatccgtatcccccacatgttcacgctgctcctgctcatcatcgcggtatgtaccattctgacctatgtgattcctgcgggccagtacgaaacctacgtggatgagaacggcgtggagatgctggtggacggcagctaccaccgcatcgagcaggccccggtgaccccgatgaaggctttgatggccatacaggagggcctgatcgaaaccgcttatatttccgcctttatcttcatcattggcggcgccttcggagttgtggcggagaccaaggccattgaggcgggcatcggacgcatcatcaagaaaacctccaaacggcaggagctgctgatccccatcatgatctttgtggtgggcttcggcgccggctcctttggcatgtttgaggagtgcctggtcttcatccccttcctggtacccatctgcatcgctatgggctacgactccatcaccggcctggcggtggccatcgtgggcagctccagcggctacgcaggctcctttgtccaggccgccaacgtgggggtttcccagagcatcgcgggcctgcccatgtactcggccatgtggtaccgcctcatcatcctggtggtcatgctgaccatcgcggcggtgtatatctatttgtatgcccagcgcatcaagcgggacccaacccgcagcctgatgtacgagttcgaccgccagcgggaggagaaggtggatctaaacgatcttccggagctgacgggcacccggaagctggtcttgctggtcatgggcgccaccttcgccctgctgatcgtgggcgtgctcaagtggggctggtatatcaacgagctttctgccctgttcctgggcatgggcatcgtcgtgggctttgtggcccgggtgggcttcgacggctttggccgcctgttcagccgcggcgtggccgactttgcggccggcgcgctggcggttggctttgcccgcggcatcctcatcgtgctggagggcggcaacattctccacaccatcctgtacggcgcctccggcctgctgacctcgctgccctcctctctgacagtgctgggtatgtacgtattccaaaacttccttaacctcctgattccctcggccagcgggcaggcggccacctctctgcccatcctgctccccatgggcgacatggccgacattacccgacagaccacctgcatcatcttccagatcggcaatggcctgtccaacatcctggtgcccacctcgggcaccttcatggtggccctgaccatggcaaaggttccctacggcaagtgggccaagtggtttattcccctgctgggcctccagttcgcggcgggcgcggtgctggtgctgatcgccaacgccatccgcctcgggccaatgtgagcagaaagaaggtatttcgatgaaagagacaatacaaacagcggcggagagcttcctccccgcgctctgggccatgtcccgtgcgatgtacgaccaccctgagctggggctggaggaggtcaactcctcccgcatgctgcgggagtggctggcggagcagggcttcaaggtggaggagaacttccacggcctgcccaccgccttccgggcagtctacggctccggcaggccggtgctgggctttctgtgcgagtacgatgcgctgcccgaggtgggccacggttgcggccacgacctcatcggcgtcgtctcggcgggagctgcggctgccctgcggcagacggtggacgccgtcggcggcaccctgattgtctacggtacgcccgatgaggaggtcacctgtaccaaagtacagctcaccgacgaaggggcctttgacgagctggatgtggccctcatgctacacccctatcaaaagacctgcggccggatggggagcatcggcatctatccggtgcagtacgagtttttcggaaagaagtgccatgccaacgaggccgggccgggcagcgactgcatcaacgccctggacgccgccgttgccgcctacctcagcgtcaaccaggtcaagcagtatctggacgccaacatctacggtatcctcaacagcggcggcaccctgcccaacatcatccccgactatgccagcctgcgctactacatccgctgtgaccaggagtggaagacccgtcgggcggtggagcgcatcaaccgctgtgtccagggggcggcggacagcatgggggcggagctgaagatcacccagtacctgtgtcccacccagccgctgctgctcaacgagccgctgctggatgcctatgaaacgaacatggccgcgctgggtgagccggtcgtggtggaggaggccaaccgcctatctaccgacgcgggcaacgtgagcttccggatacccaccctccacgggatgctcggcattcacggatgtgggggtgtcgatctgcatacggaggagttcgccgcccgaaccgtgaccgaggagggccgggaggccacccggctgggagtctgtgccctggcgggtgtgggctacgacctgctcacccggcctgagctgctggaggctgtccgggccgacttccagcggggcatccgggaacaggacgagaaaggagtttcatcatcatgctattgaaaaattctatcacggaggacaagactatctgggctggcctgaaccacccggagctccccctggaggaggccgacatagctgtgttcggtatcccctacgacggcggggtcagcttccgctccggcacttgcgaggcgcctcaggagctgcggaaaatcacccacaccatctcgcccaccaccgaggatttccgggatatctcctctgtgaaggtcaaggatctgggggactgcgtggggaaggaccgggacgagatgttcgccgaggcggaggagctggcctatcaggccgtgaaggcgggaaagttctttaccatgatcggcggcgaccactcggtgacgatccccgtccaccggggcgtcaaccgggcggtggaggaggacttcggtatcatccacatcgacgcccacttcgatctctgccacgagatgcacggggacattctgtcccacggttccaccgagcggcgggccaccgagctgtcccacgtgggggacagtgaccacctctacttcctcggtatccgctccatcgagtccgacgagctggagttctaccagaacaacaagatcaacgtcctctccgccgctgatgtggaccacctgggggtgccggcggcactggagcggatggtgtcccacatgaagcggttctccaaagtctatatcactctggatattgactgcctggaccccgcctatgccgccggtaccggcacgccccaattcggcggcctcaccgcccggcagctcctggacctgctgaagggcctctttgacggcctcaacatcatcggcatggacgtggtggaggtggcccccagactggacccctctctggcggcgctgttcgcggcccggaaaattattaccgagtgctgggcccaccactacttcaaaaacctcgcccgtgcgtaagcagagagaagaagaccaagcgcataaaacacggcctccggttcaggcggaggccgtgttttatgcgctcagaaaaacttttcagaccgttcatccgtccaatgtttaacagccactgcggcggtatacgtttggatgaggtgagcttaatgaagcgaataggtgcgctgctgctctgcggtattctgctgctcccggccgccggagcttccggcaccccttggccggcctgggcagccgaggcgctggcatggggacgggaaaagtcggtcagccgggcatttctggcctcgccgggacagcgtttgacccgcggagcggtggcccggctgctctatgagtcggcagggcagcccgctgcgcatgaggagtgccctttctctgatgtgtctgaaaaggatgccgcagccgtgggctgggcagcagggcagggctatctcactggcgtgggagatggaacctatgagccaggccgccctgtcacccggcaggaatttgccgctatcctctggagacaggcgggaacacccgaggtaccggtccaaggactcgagcgttttggggatgccggcactgtgtcggaatgggcgagggatgctgtgctctggtgccagcaggccggggtaatggcaggccggagcggggataaactggccccagaggataccatcaccacagcggaggcgctggtcatgctggagcgggccgccgggctgcccgatgtcgggcagctccgggacgatctggagatccttgccgcacaccaccggccggtgggctcccagggggaggccgatgcagtccggtatctgagggaccgctttgaggaaatggggtacagcgtcactctccagccctataccgacggccagggccgcaccgggcacaatgtcgccgcggtaaaggcggcctctgttcccgatgcggatatcttggtgctgtccgcccatcacgacagtgtgcccactgcctatggggcaaatgataatgcctcgggtgtggctgccctgctctatacggcggaggcgctgaggaatgtaccgactgatacggaggtgcgcttcctcagcttcaccgatgaagagaacggtaagaatggatcccggacctacaccgcctctctgacagaggaggagcggactcggatagtcggtgcgatccagttcgatatgctgggcgggctcggttccacagggactctggtgtgtactgtagacggggaggcgaactgggtcagcgacctgcttcagaaaaagaatccggggttggagagcggagtggagaccgccagcgaccatacctcgtttcagctctccggaatacctgctgtcctgctgatgcagagggggcggggctacctgtaccactcggcggcggatacggcggaacagttggatctgtatgccattgcggctgccgctgacagcgcagcagccgcggcggaggagatctgctcgaccgataccccctcctaccgggctctggcccgggagcagggagagagaagcgcctaccgccagaccagacagaatatgatctatttcggcagttccagagcggatactgaggcgtacatcggagcggcgggagagcccgtaggcgccagtgagatatccggggaggggtggaccgacacctatgagacctaccactactccatgcgctggtttgacagcaaagctcctatgagtacctattaccagtaccgcaacggttttctagagcgcattgagctgcggccggaggaaaccggctatacaggggaacaggtacgggaactcattgaggcgatgtatggctcccccgtatcagaggaggggggacagaccggctggtccgaccccatttacagcaaatatatcacgctgtcccgtgaccaggaggggtgtctcgtcacggtgggaaattactccgtgggcatcaccaatgtgctggcctcctatccggtgagcggcggtcaagccgtcatcagcgatccggaggatgcggcggtatggaactatctgtgttcgatcctcccgctggaggccagacagaagctggccgagttcaacctgtttacggatggtaccagtaatgtcctggcctatacctctcccattcgggaggagggcgttacggacaacacccgcttttccatcagcattgactacttcgatgtgtatgatgaaaacggggagaagcgggactggagcaaactgacctacacgattttgcacgagtatggccacgtcctgctggaggacgagacacaggtagacctgaccgtgggcagggacactcatgacccggcgggatttgtggagggggccttccgcagagcgttttacgatgcgttttggagggagcttggagtcagcggcgcgggtgattacgacagatcgcctactcactatgtgagccgttacggggccaactacttccatgaggatatcgctgacacctttgccatctttgtgttgggtggggagcctggaaaaaacactgtggcagaggagaagctgcgctttttctggagggacccagatatgacggcgctgcggtccgctgtccgggaaaacctggggttggagtggccggagcgagctgacaccagcagttccagccccacgccgccggtggccgctgctctggaggaattggaacagaagctgatggaagcgattgtagcggtggagtagccgcccgccttagcatgtgcggcaccggtcggttcggcggagctgcccatggctgttaaaaacctgtactacagcatcttatccgaccatccggagtacaagtatgcctatgatctcacttcagaggtaggggaggacggactgctccgctgtaaagtgtcctatatgccctaccgtaccggcgcgtatcccgccggatttcagggaatagaggtggatggcctggatcgtctggtggaggtggcgcggggtggactgtcacaggagagtattcccatccggattaccgagcccactctgacagtggatgccatgaaccgggcgcttcagcaggtgggcggaggttggctgttgtgccagctcagccgtgacggcaccgctatcacggtcacgccccagggcggcctgagccgagaggaggccctgaaccggctggctcagtcagagtgcctggcaaggcaggtttatgaggaaatcgtcacggcggagatggggaaggctgcacaggctgaggcgctgtatgcttacttgacggaacaggtacgttacgacttccgatactacagccagcccggtgagatgccctacagcgctaccaccgcatacggggcgctccatgaccatctagccatctgcggcggctatgcccaggcgttccagatgcttttacaacaggcggagattccctgtattaccgtcagtgggaagatgggtggagagaaccacatgtgggttctggcccaggtggacggccagtggctctattttgatcccaccagcgaccggggcagggttgattacggttttcagtacttcggagtgggagaggatgctctgttccgctatacctgggaccgggagggggcgcgcagtttaacggaggcgctgtttccctaatcgggaaaattggaaaacggcagtgacgcatacccctgtatacgtcactgccgttttcggctgcccggcgaatcatcgtcatggcctcggcgcagatgataggcatcgcattgggcaggcgaaagaagcgtgtggcggtttctgcttggatgatgttgtccagagcgcgtactgcgccgccccatcagccgggctgagggcttgtctcccgaagggatcagcgcatgcctgctgtgcaatatgcagatatgtggaatcaccattttgacttccccactgggacagtgctctccgccggactctatattgatcacacccggggcaaaacgcagccaaatttctgattttgggtatgcaaattaagaccgagacgtttgctctatcccggcccctgtccttctgcatcccggcagtcctcccaatccgggagacgaaataggcggttgaggacggtccgcgtctgccgagagagtcaagctgccatggctcaaagcgccgtgcccctcttggggacggacaggcgggagagctccacgccctcgtgctccagcagccggagcttggcggcgatgccgccggcatacccggtgaggctgccgccggagcccacgacccggtggcagggaatgatgatggagatggggttgtggcccaccgcgccgcccactgcctggctggacatggagggccttcccatctgcgccgccagcgcccgggcaagagctccgtaggtcgtggtctctccgtagggtatttggcacagcagcctccatacccgctgccggaactccccgccgatggggcacaggggcagttcggagggcatcggcttttctccagcaaaataccgggccagccagtcccgcgccgcgtcaaagacgggaagcccgtcccgctcctccagcgcctcccgcacggctccgccgaaatacttctgtccctccagccaaaggccgatcaggtgctccccatcgctgcccagcgtgagcatccccagcggggatgggcagaccgcagaatagtacatccaattcctcctttttgatcaatcagatggatttcacagcggcgccgcaggccgcctgtcaatgagatcatagcacaaaacgcaccgattttctcctatgaacgttccaagccaacaaaagggggttgacaggagcggggaatatgtgtatcattacactaacgctttaattcgttagcgagatagaaggtgattcaatgtcgcagtttctaaacggggcgctccggcggctcaccccctatacgccgggggaacagccccggaatcaggcatacatcaagctgaacaccaatgaatctccctatcccccgtcgccgggggtactggcggcgctgaaccgggcggagggggagaacctgcgcctctactccgacccggaagcggtggagctgagggaggcgctggcggcccggtacggggtggagcgtgagaatgtgtttgtcgccaacggctccgacgaggccctcagcttcgcctttctggcctatgccgccgacggccggggggtggcctttcccgacatcagctacgggttttacgccgtgttcgcccgcctgtacggcataccagtccggcaggtgcccctgcgggcggacttccgcctggcgccggaggactacaatcacctgcatcgaaccattgtgctcgccaaccccaacgcccccaccggcctggccctgagtcgggacgaggtagaggggattgtccgggccaacccggatgcggtggtggtggtggacgaggcctatgtggacttcggcggggagagcgcggtgcccctcaccgcccgctatcccaacctgctggtggtgcagaccttttccaagtcccgctccatggcgggagcccggctgggctacgccatcggggatgcggccctgattcaggatctggaggccatccgcttctccaccaatccctacaacgtcaaccgcctgaccctgcgggcaggggccgcggccctggcggagcaggactactacgacgccaactgcgcggccatcgtggacacccgcgccgataccaagcggcggctggaggcgcttggcttcacctgcaccgactccagggcgaacttcctctttgcccgccatccggcagcggacggcggggacctctaccggaggctcaaggagcgcggggtgctggtgcgccgcttcgacgccccccgcatcggggactatatccgcatcaccatcggtaccagggcccagatggacgccctgctggaacggctggagggactgctatgagaaccgcccgcattgcgcgcaagaccaatgagaccgacatcaccctcaccatttgtctggacggccggggggtgagcgccattcagagcggcgtgggctttcttgaccacatgctcaccctgctggcccgccacgggcggctggatttggagctcacctgccggggagacactcaggtggacgaccaccacagcgtggaggatatcggcatcgctctgggggacgccgtggcccaggccctgggggaaaagcggggggtgcgccggtacgcctccctccacctgcccatggacgaggcgctgattctgtgcgcggtggatctgtccggccgggggggctattacgatgccctggacatcccggcccagaagatcgggcgcttcgacaccgagctggtgtacgagttcatgaacgccttcgccgtccacgccggcctcaccctccacctgcggagggtgtgcggccgcaactcccaccacatcgtggagggggccttcaaggccctgggccgggccctgcgggaggcggcggccattgatccagagggccgggacgaaattccatccacaaaggggatgctttgaccatgcaggagcggctgaaccggctctatgagcagtacggctaccgaaaattcaaaatgtcccggtttgaggattacgacctctacgcccagaaccgggattttctgcggcaagaccgcattatcacctttaccgacgccgacggcgccctcaaggccctcaagccggacatcaccctgtccatcatgaagagcaacggaggagacagcgaaaaggtgtactacaacgagaacgtctgccgggaggtggggggcgccttccgggagatcctccaggtgggggtggagtcggtggggcagattgacccctatgccgaggcagaggtcatcgccttggccgcccgctccctggagcagctctccccgaagtacgtgctggctctgtctgacgtgagcttcgtgggcagcctgctggaccagatggggctgtccgcccccgtgcgggggaaggtgctgggcctcattgcccgaaagaacgtcccaggcttgtgcgtcctggcggagcggggggagctgaccggggagcaggccgacggcctgcgggagctggtggagctgtacgcccctctcaaggaggggattggccgggtggggcggctggccaagagcaacgccgcctgggaggccctgcggcagctctccctcaccgccggattgctggagtcgtttgggctggaggagcgggtacggctggatttctccctggtgaacagcatggactactacaatggggtgatcttccagggctttctgcccggcctccaaaccccggcgctctccggcgggcggtacgacaacctgccccgtaagatgggcaagcaggtgggggccatcggctttgccctgtccatgggcttgctggaggaaagggcggacggcggacggtttgacgccgacgtgctgctcacctatgggcccgacgcggaactggccgggctggcagcctttgccgaggccctgcgggcctccggccgctccgtccgctgtgagcgggcggggggctccgcccagctccgctgtcggactgagctgcgctaccgcagcggcatgacaccggaggaggtgggactatgatcaatgtggcgctgcccaaggggcggctgggggagagggcctacgaggcctttgcctccgccgggtacgactgccccgcgattttggagaaaaaccgcaggctgacctttgaaaacagggagaagggagtgcggtatttctgggtgaagccctccgacgtgagcatctatgtggagcggggggcggccgacgtgggggtggccggccgggatatcctgctggagtacgagcccgacgtgtacgagctgctggatctgggcatcggccggtgccgtatgtgcgtggccgggccagaaaacttctacgacgcgcccggccgaaccctccgggtggccaccaaattcccccacatcacggcagagcactacacggccaagtcccgcgacatcgacatcatcaagctcaacggctccatcgagctggctcccatcctgggcctgtccgacgtgattgtggacattgtagagacgggcaagaccctgctggaaaaccacctggcgcctttggagaccattgtggacatcagcgcgtggctgatcagcagccgggtgagctatcaattcaagcatcaggagatcgccgcgatgcaggcggccctggcgcggaagctgtgaggcggtcatgatcaaaatatatgatatcgaaacgctggaggagcgggagatcctgttccgcggcggaagcggggcggacgtgtccgccccggtggcggagatcctccgggccgtgcaggagcggggggacgcggccctgcgggagtataccctccgctttgacggcgcagcgccggacgccctggcggtgacggcggaggaggtggaccaggcggcggcgcaggtggagccggccttcctggccgtgctggaggaggccgcggagcacatccgggcctaccacgcccggcagaagcgggagagcttcgtgatgaccgagcgggagggcgtggtgctgggccagcggatcatccccttggcgcgggtgggtatctatgtgcccggcggcaccgccgcctacccttccaccgtgctgatgaatgccattcccgcccggatcgccggagtgggggagatcattatggtgacgccgccggggcgggacggggcggtgaacccccacatcctggctgcagccaaaatcgccggcgtgacccggatctacaaggtgggcggcgcccaggcggtggccgccctggcctacggcaccgggaccatccctcaggtggacaagatcgtgggccccggaaacgcctacgtggcggaggccaagcgccaggtcttcggccgggtgaacatcgacatgatcgccgggccctccgaggtgctggtactggccgacggccgctccaatcccgcctgggtggcggcggatctgctgagccaggcggagcacgaccggatggccgccgccgtgctggtcactgactcccgccccctggccgaggcggtggctcatgagctggagcggcagttggccgccctgccccgggcagagaccgcccgggcctccctggaggccaacggcaagctcatcgtctgccgggatctccgggagggcatcgcggtagccaaccgcatcgccccggagcacctggagctgtgcgtggacaaccccttcgactacctgggggagattcagaacgccggctccgtcttcctgggccgttataacccggagcccatgggggactactttgccgggcccaaccacactctgcctaccatgggcaccgcccggttctacagtcccctgtcggtggatgacttcgtaaagaagtcccagttcagctactacacccgggacgccctggccagggactaccggaaggtgagcctgttcgcccgcaaggagggcctggacgcccacgccagggcggtggatatccggtttgaggggggagaggcatgatcgccatcatcgactacggggtgggcaacctgttctccctcaagagctccctggcggccatcggccgggaggccgtggtcaccggggaccgagcggtcctccgggcggccagccacgtgatcctccccggcgtgggggctttcggcgacgcggcggcccggctgcgggccgtcggcatggcggaggcggtactggaggccgctgccgcaggcaagcccgtcctgggcatctgcctggggatgcagctcctcctggagcgctcctttgagtacggggagcaccccggcctgggcctcattccgggggaggtgcgccccatccgggacgtgattccggcggggctggccgtgccccacatgggctggaacgccctccgcttcccggcggagcggccccgcagccccattttcgcggctctggaggagggggagcacgtctatttcgtccactcctacgcgggctttgcctgcggagaggggctcaccgcctggaccgagtacggcgcgcctctgacggcggcggtgcagagaggaaacgtgtacggaacccagttccacccggagaagagcggggatgtgggactgcggattctcaaggcattctgcggattggagggtgaagcatgattctgcttccggctattgatctctatgagggaaaggtagtccgcctgaccaggggggactacagccggatgacggtctaccgggaggaccctctggaccaggcgagggagtttgaggccgccggggcggcctggctccacaccgtggatctggagggggccagggacggcgccacccccaatttccgggtggtagcggagctctgccggtccaccggcctacaggtggaggtgggcggcggcatccgcacgctggaggccgtggcccgctacctggacgcgggggcggcgcgggtgatcctgggcactgccgccgtcaccgaccccgtttttctccggaccgcactggaccgcttcggagatcgggtggcggtgggggtggatctgaaggacggggccatcgctatccagggctggcgggagaccgctccagagccggcggaggccttcttccagcgcctggtggactggggggtgcggaccgtcatctgcaccgatgtctcccgggacggtatgctgggggggaccaacgtggcgctgtaccagtccctggcggagcggcttcccctgcagctcatcgcctccggcggcgtgtcctccctggaggagctgaggcggctgaaggcgctgggcctgtacggcgcgattctgggcaaggccctttacaccggggccctgtcgctgcgcggcgccctgggggaggtggagtgacatggtgaccaagcgtatcatcccctgcctggacgtacgggacggacgggtggtaaagggagtcaattttcaggggctccgggacgtgtccgacccggtggctctggcggagcactactcccgctccggtgccgacgagctggtgttctacgacatcactgcgtcccatgaggggcggaagctctttaccgatattctgaccaaggtggcctccgccattttcatccccctcaccgtggggggcggcatccaggggctggacgacttcgagcgggtgctggcctgcggggcggacaaggtttcggtcaactccggggctgtccggaaccccgctctcatcggggaggcggccaggcggtacggcgaccagtgcgtggtgctttcggtggacgtgaagcgggtggacgggagctaccacgtatttctgaacggcggccgggtggacaccggactggatgccctggagtgggtgcgccggggagtggacgccggggccggcgaggtggtggtcaactccatggacaccgacggggtgaagggcggcttcgatgtggagctgctgagggccgtaagccgggcggtgtccgtgccggtggtggcctccggcggcgcagggagcgccgccgacttcgcggccctgttccgcgccctgccggagctgtccgccgggctggcggccagtattttccacttcggcgaggtgaccatacctgcgctgaagcgggtactggcggaggaaggggtgtgcgtgcggctgtgattgatgtgcagacgctgaaatttgacgagaaggggctcatacccgccattgtgcaggatgcggagacggggagggtgctcaccctggcctacatgaaccggcagtccctggccatttccctggaaaagggcctgacctgcttctggtcccgttcccggcaggagctgtggcttaagggggaaaccagcggcaattaccagcacattgtggagctgcgggccgactgtgaccgggacgccctcctgatccgggtgcggaaggaggggccggcctgccacctgggcaccgactcctgcttcgacggagcggtattctttgcaagggaggagagatgacatggacgagcagttcagctatgaggggctctaccgcctgctggaggagcgccgggccaagcggccggagggctcctataccacctacctgtttgaaaagggcctggacaagattttgaaaaaggtgggcgaggagtgcaccgaggttatcatcgcggccaaggaccgggatcacaaggagacggtctatgagctggcggatctggcgtaccatgttctggtgctgatggtggaggcggggatctccctggacgaggtgagggccgagctggccggccgccacgtcatcgaccacaaggtgaagcaggagaagatggcctccgaccaggcggagtgaggagaatttgcacacagagcgaaggagcccctggagccgcaaagcggctccaggggctccggttcatttgtaccggcccaactgccagaaggccacggcgctggccgccgccacgttaagggaatccacgccgcgggccatggggatgcaaactgtatagtcgcagtgggccaccgttcggggggaaaggccgtctccctcggtgcccaggacgatggccagcttttctgcggacaccagccgggagtcctcgatggagagggcttcgaggctcagggccatggcggcggtctgaaagcccagggcccgcagacgggcaagtcccggctggggccagtcggcggagcgcgccccgatataggtccacgggatctggaacacggtgcccatgctgacccgcaccgcccggcgatggagggggtcgcagcaggtgggagtgaccagcaccccgtccatgtggagggctgccgccgagcggaagatggcccccacgttggtggggtccacgatgccctccagcacggccacccgcctggcgccggcgcacagttcctccacggcgggcagggaggggcggcgcatagcgcacagtaccccgcgggtcagctcgtagcccgtcagggcggccagggtgtcccggccggcagtgtagaggggcacgtccccgcagcgggcgaggatgtcccgggcggggccctccagttggcggcgctccatcagcagggaaacgggctcatatccggcgtccagggcgtggccgatgactttggggctctccgcgatgaacagggccctctccggcgcgcggcggctgcggagctgggcctcggtcaggcgggcgaatacgtccagttcgggggcggagaggtcggtgatctcgatgatgtggggcatggcgttcacctcgcttattcttgcttgccttcattataccgccgtccgggcggaagggcaacggaaaacagccgcgccgcctcccaacatgggaggcggcgcgtgggttacaggagcatcccggcaaagcactggcaggccagaaacagaatgccggcggtgaccaggggggccagccgtccggatgggccggaggcgaggcgctcccgcagggaggtaaacaggaaggttagagcgccgaaggccgcgccgcctaccacagcaaagcgcacggcctctgtcccggcggtgagcccggcggcccaggggagcaggccgaaggtgagggcgcccagcaggagagtaagcccccagttccggcggggaacgcccttggagagataggcctctgcggccagggccagcagggagcaggccgccgccgcgggcaggcccacggcagggagcacggcggcggacaggaagacgcggtagagaaccgccgccaggcagcccaagcccaccacggcggccagggcggtattcagggtatatttctcttgcatggcttaacctccccactcggttgcgctggagctgacgtccgcgccggtgacaaaggcggaggcggagttgaccgccttgaccaccgccttggaggtgacggtggcgccggtgagggcgtccacgttgtcccctacggccagctcgccccggctccagatgagctgggagagaaagcctgcgtcggacagggcttccgccccaaggccgaaggtctcctccatctcccgcaccaccgcacccaccacggcgccgtcaaagtccacggccaccagcatggtgatatctccggcgtagccggcggtgacggtctcgacaatatagccggtggaaccccggtggacagcggcgatggcggtgtcctcaccgttgtaggcctcctcggtgaagggagcgccgccggggagaagggtgtcgaagagcctggcctgttcggctgcggcgttctccgccgccgtgggggccagtcccgccgaaagggccaacaggagcacaaagacggcggccaacacggccacgggcttgatcagggctttcacattcatccggcctttcctcctctcacagcgccgaagcgcaccggcggcagggccttgtccagcgcccaggcgcaggcgttcatcagcagaatggcgtaggtgaccccctccggatagagcccgaagtagcggaacagcacggtcagcgcgccgcaccccacgccgtaaaccaattgggccgcgggcagggcgggggaggtggcgtagtcggtggccatgaacagggcgcccagcatcacaccgccgcccagcaggctgtagagcatccaggcaacggggtcctcccccttataaaataccagggtgaggaaggctacagtacctaggtaggcggcggggatacgccaggagatgaccttccgcccaagcaggatggcaccgccgatcagcagggccagggcggaaacctctccgatgcagccgccaatgttccccaggagcatgtcggccggggaggccgcgggcagggcgggcatcaccatgtcgtggagaggggtggcggcgctcaccacatcggcggtggagccgaagaggggcagctccgccccggcgggggcgtagcgtaccagccaggcgggccacagcagcatcaggaaggcccgggcggccagcgcggggttgaagatgttctggcccaggccgccggacaggcccttgaccactacaatggcgaatacgccgcccaccgccgccagccagtagggggcagtggcggggagggtgagggccagcagcagcccggtgacggcggcggagccgtccgcaatcgagccgggggacttggtgacggcccggaaggcccactcggaggccacgcaggaggccacgctcaccaaggttagcagcagggcccggagaccgaagaaccataccccggccgccagggtgggcagcagggcgaggagcaccgtgcccatcagacggcgggtggtctccccgctgcggatgtggggggaggaggatgtgatcagcttcacggacgaattccctcctttaaggcttgtttcgccgcccggaaccgctccgtcagggggagctggccgggacaggtgtaggagcagcagccgcactcgatgcagtcggtgacgtggagggcctggagggcgtccagattcccggcggcctcgtagcgatagaggtacaggggctgcaggtgcatggggcaaacctccacacacttggagcagcggatacacaccggacgctccggtgtgggattggcgctggtgaggcagagcaccgcgttggtacccttgagcaccggggcggccagttcaccctgggccgtacccatcatgggaccaccggagagcaccttacaggcgtcctccgtgaggccgcctgcggcctcgatgacctgggcaaagggggtgccgatgcggacaatcaggtttttgggctcctttacgccctcgccggtgacggtgacgatgcgcttggttaccggcttgccctcgtacaccgcccggtagacggcggccacggtgcctgcgttaaacacggcacagcccacagagaagggcagatggcccggcggcacctgccggccggtaacggcctggatgagctgtttctccgccccctgggggtagcgggtgggcaggacggccagctccactcccggccagtcgggcaggtgcctgcgcaggatggcgatggcctccgccttgttgtcctccacggcgatcacccgccggtcggggtggagagcggcatccagcgcagccagtccccggaaaatctgctccggatagctgcacagcagggcgtcgtcggcggtgatgtagggctcgcactcacaggcgtttaccaggatagtgtccacccgcccctgggcggtgacggccttgatgtcggtggggaaggtggcgccgcccatgccgacgatgcccgcctcccggatgatggagagaatatcgttgggggagagccactcgtgggtggcgtgaggctccagtgcttgggcgggggtgtcctggtagtcgttgtcgatgaccaccgacagtacggcccggccggaggggtgggggcggggctctacggcggccacggtgcccgacaccgaggcgtggatggtggcgctcaggccttcggcatcgccgatcttctggcccagcttcactgactctcccgccttgaccagaggggtacagggcttgccgatgtgctgaaccattgggatgacgacctggcttggaaggggggcgggggtgggggccgcgccgcgggagagctccttgcggtcggcgggatgtacgccgccccagaacagatgtctcatgctttcacctcatttttgaagtcaggtgcggagataggcggaaaaaccggggctgaatacctcgccgccggaggcgtccacccacatggcctcggccccgtagcggtccagaagggcctgcccctccgcctgggggagggtgaatagggcggtggagagggcgtcggccaggccggaatcggcgcacagcacggtgaccgcccgccagtaggcggcggggcggcaggtggtggggtcgatgatgtggtggtagcgcacgccgcccacggtgtagtagcgctggtagtcgccgctggtgaccaccgacacatcgcggacgtagagggtgtggaggaacgctccgctctccccatcgggggcctggatgccaactacccagttctcgcctccaggctttgggccggtggcccggacgttgccccccacgctgagaagcagcccatccggcgcggcgcggcatacctgctccacggcatagcccttggcaatggccccaacgtccagccggagggcggggtcggtgatctgcacggtggaggcggcctcatcaatgatgacagaagagaagtcggtgtggcgagcggcctccgccagagcggcggcgtcggggagggcggcggaggcgggatcgctgatgccagcctcccgggcgtcatgccacagggccagcacgccccccaaggcggcattgacttggccgccggtgccctcgcagaggtcccggcagaagagaagcaggtcgatgattttgcggtccacaaccacgggcgccccgccggcggcgtcgtttaccgccttgaggttgaccacgccgtcatagtcgctgtagatgtcgtagagctggtggtactccagcagcgcgtcatggagggactgggcggtggcctgaaagtcctcctcactctccgcatagcccaccacggtggtcacggtgtcaaagagggtgagaaaggtggcctcataccgcttcgcaccctcctcctccggcgcggcaggggatgcgcagccggccagcaggaggacggacagaagcagggggagcaggcgacgcatctcaggcccctgccttttccaccagggtcaggaagtcgcccacgccgatggtgacggaggcggcgaggtcggcgtcgcccgcattgccctcctccgtgacggcgataccagtggcctcggccacggtcttgccggtaacataggaagcgaaggcggcggcttgctcgtcccactccttgccgatggagctgaccttccccatgccgtagtcggcacccagttcattcttggagggctgcgcggcggagaggtcggtgctaatggtcccggcggcgttaaaattcacgttggcctgtaccgcgtcgatgaccatgctggtgatggtgtccccgctcagggtgagggctcccacggtggcgtaggcctgggccaggccatcggcatcgctagtagcgtccgtgctcttggcggcattggtggtggtggtcagcaccagccggtcgcccttggaggcccccaaatgggaggcattggccgcagcctgctcaatcgcgctgatgtatcctccgatggacatggtgacggaggcggtgaggtccgcgccggtgggcttgccctcttcactaatggaaatgcctttcacctcagggatggtcttgccaaccacatagtccgccagggactgggcctgctcgttccactccctgccgatggagctgatcttccccataccatagtcggcgcccagctcgtttttggaggggatcgtgagagtgaggtcggagagaagcgcgccagaggtgtcaaaattgagcttggactggatggagtcgataacgcagtcgtaaatgatcccgtcatcgcccactgtgacggccaccacggtgatgtccgcctgtgccaggccgtcggcgtcggcggtagcgtccttactgctggacacagaggtgagaagggccaggccggtcttgacggggacaccgccggggacggtggcagggggcgtctccgggctgggggtgggggtttcggcctccggggtgggggcggggacggccaccaccactgtggtgccgcagccggccagcaggcccagggccagcgtcagggtcaggagcagggcaagcattcgtttcatgtcgatacctccgaaacttatttagggggatgggttcctttcatctcaaagtggatcaggaaggagagcagggcccgcagcagaatgacggcgcccagcaccagaagctctttgaggtcccgcaccaagacggtcttgagaatctcggcggccattttgaactccaggctgagggccagaccgttggccagggcgaacttaacgtcgcagggggtgcgggtgaacaggcttttcaggtaacggccgaaggcgcttagggccgagaccgccacaatgaagatacccatcagctccagcgccgcaatgatagtgggcaggatacgttcaatcagttgttccagcatgtgcggcctccttgcttcgccggcgcatggttttcagggcgatgaactgactcaacagctccacggtaccggatacccccaggggaccgctgtccaccgtcagatcataccggcccacctcgccccacttggctccggtatgcaggccatagagccgggcccgttcccgatcctggcgcagcgcctcccgggcggcctccgccggggacaggccgcgctcccgcatcagccgctccacccgctgttccatgccgcagtggataaaaatcctgttcagccccggctggccggacagaacatggtcggcgcacaggcccaccaccacgcaggagccgcgtcccgccagtgagcggacggccccttcgtcggcctccgcgtcgccgcaggggatctccagccgggcggccagccgccgaccgatctccaaaccgccgctgccataggtgtgcccaatggtaatcagcatagtataccccctttcccactgtttgttaaaagaataacaaataagccttaacaggacatagatagaaccttaatatttgttaaggtatacacaaaaaatacgcccccgcacggtgcgggggcgtattggagtttaggtatcctcctccggcggcgtgatggtggggaaacggaggagcatggtggtgccccggcctggggcggtgtcgatggcgatggtccccttgtgctcctccattacctgccggacgatggccagtcccaggccggtgcccttgccacgctccttggtggtaaagaagggctcaaagatgtgggggagcacctccggcgaaatgccggagccggtgtcggagacctggaagcagagaaactccccctccggccgggtggccacggtgagggttccgccgccgggctccatggcgtggtaggcattgaggatcaggttgagcagcatctgggagagctggatctcgttgccccggagccacaggtggcggcaggcgagatcggtgcgcacctccacatggggcggccgggcgggggaggctacggcgagcaccttgcgtaccagctcatcgggggatacatactggaaggtgagagaggtgtttttgcgggacaggtcggacagccgggcaatgatctccttggccttgcgggaggagttgtagatctccagcacgttatcatacagctcctcggcatcagagggcagttgctccagcaccagaatggagtagcccatgatgggggtgagcagattattaaactcgtgggcgatactggaggtgagtgtgccgatggtctggagccggtcatggtgggccagctcctgattcttgcggttgagggcctccatggcggcgttcttttcctggagcagggccagctcccgctgggcgcgctcgttgcgccgcccggagcgaaggttgagacccgccagcaaaagcactccggcgatcaccagtccgccgccggtggtgagcagaagggcggagcggcggatgggccgcgacacttggtcgaagtcttcggaaacgcctacggcgaagatgccgttgtttcctgcggcggggatcaccgccatgcgggcggtgtagccctctgcctcatagaagcaggctccctcctggccctccctctggcactggagcagaaagcccaggccaggctccccggcgagaccgtccgccgccagctccacacgtatctcctgaccggtctggtggagcaggacctggccgcccgcgtccagaaggaggatctgatcccggggagaggtggtgaggccgccggccacctgccggtaaaagagagagaggtccaccagcgcggcgtaccacagcccccgctccccctccagttggaaggagagatagacggcgccgttctccgccacgcaggggcggacacggtcccgcccgtccaggctgcccccgacgggaaacgtatagccggtgcgtccagaggcggagagcagcacccgcccgtcctggagacagagaaagtcagtgataagggcctcacggataagagggttgttctggagcaattgaaggagctcctccggctgcccggcgaggcagtcggcctccgcatcggtaaagttctccagtcggatgaggtagtccagctccccgataaattgctccagggcgcccgaaacgctgcggtccaccgagcgggccagtccgtagagctggctgtccgactgctccagcaggagggtgtcgtagcggccgaagctctgcacggccagggccaggccaccaacggtgaggaaaagaaccaggatcatcagaagaagaacaggaggccgacgctttttttgcccctccataccacacacccccttgtcaaattccggcagattctttatactgaaatcatactggatttcaaaccggctgtaaagggggagaagcacagtggcggatacggtgctgattgtggacgacgatgaagccgtcctcaccatgctctataaggtcatccggagcaacggaatcgaggcggacacggtggcttccggagaggaggccctggagcggacggcgcagcggacgtacgacctgatcctgctggacgtgaatctaatggggatggacggttttcaggtggtacagaccctccggcagcggggcgtccggacccccatcatcatcgtcagcggacgcaaggaggactatgatactctgtatggcctggacatcggggcggacgactatgtgaccaaacccttcaaccccgtcactctgggggcgaaggtaaaggcccttatccgccgtagccgcaacggcctgcctggggcggacagcctcatcaccgccggacccttcacctacaacaccagcaccctgcgcttttataaaaacggggtggaaattcccctctccgcaaaggagaacgcgatgatgaagctgtttatcgacaatgtcaaccgcattttctccaaggatatgctctacgatctgctctggggagaggccatcatcgacgagaacgccatcatggtctatgtcaaccgcctgcgggccaagattgaggaggaccccgcccaccccgcctacatccagacggtgcgggggctgggctaccgctttgtggtataaagaactgtctgcggcttgacaaattccggcgaaaacgctagtctataggtacaaatgtatactgttccgagtccgtccgcctacggggtgacctagggctggcggaccgatggccccggctggggccgcagggtgccgcgggaaacggcggcgccttccgtgtttgaaaaggaacgacagtccgtggcggccctctgcacagggaccgccctgcgttgccgtatcctttttcaggatgcggcgttttgttttgccccaataaagaggagatgctgtgtgatgcacatttttttgaccggcccgctccagagcggaaagtccaccgccatcgcccgctatctggcggggcggccggagacccccggcgggttccgtacccactgggatcgggcgggcggccatctggcgctggagctgctggagacgggggagaccctgagcgttgccacgatggagccccatggcgtgagggccgactgggccgcctttgacgcggcgggggagcacctgctgtccgccccggcgggacggcgctccctgctgctgatggacgagcttggctttctggagcggtgttccccggtgttccagcgggcggtctttaccctgctggacggccccacgccggtgctgggggtgctgcgccgccacgaaaaaagtcccttctggggccctgtttcccgccgggcggatgtccggctgctcccgctgacggtggagaaccgggcggaaattcctgccgagctggcccatttgctggattgaggtgagagaggaggtacaggcccttgtccaaaacagaacacaccggcggccgggtgctgctggcattgggcgtactgctggcggcgctgttcattctctccttctgcctggggcggtacggggtggatgccggcaccacctgccggattctcctctcccgcctcctccccctggagcagacgtggacgggcaacgagtacaccgccgtcctgaacatccgcctgccccgcatcgtcctggcctgcctggtggggtgctgcctgtccagtgccggggcggcctaccagggggtgtttcagaatcccatggcctccccggatgtgctgggggcctcctccggcgcgtccttcggggcggcgctggccatcctggtgggggtgggcaatcagggcaccaccctgtccgcctttttctggtccctggccacggtggtgctggtctacctggtgggacagcgggcgcccggggaccgggtgctcaacctggtgctggcgggcatggtgatcagctccctgttcaccgccgccacctcctacctcaagctggtggccgaccccaccagccagctcccggagatcacctactggctcatgggcagcctgtcgggcacccgtctggccgatgtggcccgcatcgcccccgctatggccgccgggctgttccccctgtttctcctgcgctggaagctcaatctgctcaccctgggggacgacgaggccagggccatgggggtcaacgccccccggctgcgttttctgacggtggtgtgcgccacgctggtcaccgccgcctccatcgcggtcagcggcatgatcggatgggtggggctggtggtgccccacctgtgccgcaagctggtggggagcaacttcagggtgctgctgccctgctccatgctggcgggggcggccttcctgctgctggtggacaacctctcccgcaacctgctggccaccgagatccccatcggcatcctcaccgccttcacgggcgcgcccttcttcctctatctgatgctgcggaaagggggtgcccggtgatgctggaggtggaacacctgcgcttctcctttggggcgcgggaggtgctgcggggggtggagctgcgggtggagccgggtgagctggtctttgttctgggggccaacggggccggaaagaccactctgttccgctgtatcctgggcctgctgcccggctaccagggacgcatccgggtggacggcggcgacgtgtcggccctgacgccccgcgccctggcccaaaaagtcgcctatattcctcagactagccatatggtctttccctacacggcgctggagctggtgcttatgggcaccaaccaccggctgggcctcttctccgcgccgggccgccgggagcgggccatcgccctggaggccctggcggagctggggattgcggactacgcccaccggagcttcgcggagctgtccggtggagagcagcagcttgtactggcggcccgggccctggcccagcaggcccgtctgctgctgatggacgagcccacctcctccctggacttcggcaaccaggtgcgggtgctggagcgggtatccgccctgaccctgcgggggtacaccgtcctgctctcctgtcacaacccacagcatgccatgctctatgcccagcgggtggtggccctccacgacggcctggtggccgccgacggcccccctgaccaggccttggacgaggcgctgatgcggaagctctacggtgtgcccgcccgctttgtccgcaccggcgacggggtactcatcgccccggtgcgcaagtccattgtcctgtggacccacgacatggtgcgcttcatggccgacgccatccgggtcaacgggagctgtgcggccatggccgcagccctgtctcaggtgctccccccgggggcgcgggtgtgcgacgcggggtgcgggctcggcgggttgagtctggcgctggccccctactgccgcgcggtggtggcggccgatctgtccgccgaggccatccgccatctggaggcacagcccctgcctcccaacgtggagccccggcggtgcgatgtgctggccgacacaccggacgagccctacgacgctatggtgttctgcttcttcggccgcacggatgagatcctctccgccgcccggcggcagtgtaccggcacggtggcggtgctcaaacgctgcggccgggatcaccgcttttccagggggaaggaccacccccggcagggctttgaggagctgtgccgggagctggaggagaagggcatcccctaccagagccgggttttagagctggatatgggccagcccttccgctccctggaggacgcggcggtctttttccgcacacacagccgggacgatccggcggagctgacccccgaggccctgcaaagccgccttcagcggcgggacgacccggaatttccgtggtatttcccggtaaacgagcccatcggcctgctctggttccaggcctgcgagataccagataaagaaaaggagagatgataccatgaaaaagctgctctgtaccctcctggccctcagtatgctcctggggctggccgcctgcggcggccccgcgcccacggagggcccctccgcagaccccgcgccggcggtgtccacccccgcccagcccgaggacggctccgcctccttcaccgactccgtgggccgcaccgtggaggtgcccgcggagatcaccagcgtggcggtctccggccccctggcccagatggtgatcttcgccctgtgccccgacaagctggtaggcattgccgacgagtgggacgcgagcgctgagcagtacctggccaccgagtactacaatctgcccctgctgggccagctctacggcggcaagggcgagctgaatctggagaccctcttgggctccggcgcccaggtggtcatcgacgtgggcgagcccaaggacaccatcgtggaggatctggatgccctccaggagcagaccggcatccccttcgtccacgtgtccgctaccattgagaccatgggcgacgcctatcggaagctgggcgagctgctgggcatggaggaggcggccgagacgctggccgcctactgcgacgagacctacgccatggtcaaggacgtggcggagcacgtggagaaggcgaacctgctctacatcaccggcgacgctggcctcaacgtcatcgcccaggggtcttaccacgccgagatcatcgacctgctgtccaacaacctggcggtggtggactccccctcctccaagggtaccggaaacgaggtggacatggaacagctcatgctgtggaatcctgacgtaatcctcttcgctcccgacagcgtttatgcctctgtgggggatgatccgctgtggcagagcctcaccgccatccagaacggcagctactatgaggcccccatgggcccctacaactggatgggctttccgccctccgtccagcggtatctgggtatgctgtggatggcaaagctcctctaccccgacgcggcggattacgacctccaggccgaggtgaccgaatacttcgacctcttctaccactgcgcgctcactggagagcagtacgaggccctgatggccaactcgatcgggaagcaataaaatcacacatcccagccccttttggggaccgggatgcttgcatagggcggtggattacgcgtacaatagggaaaaaggaggggagcgcatgaaaattgccattgtgaccggggcctcctccggcctggggatggcctttgtccggcggctggacgcgctgggcgggctggatgagatttggggtgtggcccgccggggggagcggatggaggcgctggcggcggagctgcgcaccccgatgcggcctctggccctggatctgacccgattggagagcgtggagaccctgcgggttctcatgagagaggaggagccggaggtggcggtgctggtcaacgccgccgggttcggcaaattcggcacctgcgccgaactcaccctccaggagacctgcggcatgatcgacctgaactgccgggctgccgccgcactcactgccgccgtgctcccctacatggggcggggaagccgggtgctggagatctgctcctccgccgcctttcagcccctgcccggcttcaatgtctacgccgccaccaaggcatttctgctccggtacagccgcgccctgcgctgggaggcggcgccgcggggcatccgggtgacggcggtgtgcccagggtggatcaggaccgatttcatggacgtggctagggatacaaaaaacgggcgcaccgtgcggagctttcccttcgcccagcggccggagaccgtggcccggcgggccctgcggaacagccgcctgctggccgtcactacctgcggcctgcccgccctggtccagcgtgtggccagcaagttcctgccccactgcttcatcatggcctgctgggagggcctgcgaagggcatgatgcaaagcgcccggagccgtttggctccgggcgctgcgtttatttacgcggcagggagttcaggtagtcgccgacaccccgtgccacgccctccatcagcttctgctgataggtctcgtcgcacaggcgggtgagttcctctacgttggtcataaagccggtctccaccagtacggcggccatgttggtctcccgcaggaccacgaaattggccgaggcgatgccgcggtctaccgcgccgctggccgcgcaggcggcgtcctgcacggcctgggcaaaggccttgctccggctgctggtggggtagtaataggtatagagcccctggaaggtggggacggtgggggcggagttgcagtgaatgctcacgaacaggtcggcgttgacccggttggccagctcggagcgctcgtacaggtctccggcggtctccccgtcccgggtgagcaccacgttatagccttcattcagaaggatgtcccgcagcttgtagaccatggacagggtgagatccttctcatagatgtccaccccgttggcatccggatataccgcgcccagcgttttcccgtcgtggccggcatccagtacgacggtgtacttgttggggtcaatggggggcagctcgggggagacggagggagtggcggtaatgcgcacgccgctgctgcccgcctccacggtgatgtttttggcgtagctggcaccgcccttgaggtccagcaccacccgcagggtgtggggatagccataccccaagtcgtccccatgctggttgtaacgcaccgaggagaacacatcgctgtccaccggcagggcggcctcgccctccagagcgccggaaaacaccgcgcccaggaggtccaccgctacccggtctcccagatccaccacccggtattccggtatatggtcggtggcgatggtcaccacgtgggaagaggcgtccaccgagatgccggtgacataccccttgtctccggcggcgggcgtgtcgggcgtgggctcgggggtcggcgtcggtatcggcgtgggctccggctccggggtaccgggggaggtgaggatagcggtaaaggtatcgttgtcccagtccacggtggcgcccaactgctccgagacaaagcgcagggggaccatggtgctctcccggccctcccacttaaccacgccggcgggcacgccaccgggcagctccatggcctgaccattgaccagtgcggtggccgagcccagggtgagtacgatggtgctctcctcccgcaggaggatgacctgacgggtttccggcacccaggttaccgaggcgcccagccgttctgcgatcaggcggacgggtaccagcgtgcggccgttctgtcccgccgggtactgcaccagggcgggtacatcgtccggtgtcagaggcgagccgtccagcgtcaggctgacccggtcggtctgggtcagttcaccataacgctgggcagtctcgtcgtagaagtagacggagagggtccccgcgggaccgaccgcccaggcggacagcagccccgccagcagggcgagggtgagcaggaaggaaacggcttttttcatggcagaactcctcggcgatagatgctaatattctaccttattccacaggtgccgtcaagaaaggaccgcaaaaagggttgacataaatttatggcaggcactttgacacgctactgtaaatgtgggcaaatcccttgcgttttgcggcaaaacttgttatgataaacattaaatacaaagcaacggagggaatacccatgctgaagatcacctgtgagggcgtgtactacaagaacgggggctttgtcccggccaaagacggccctgcggccggcttgcccgcgccggaaaaggcgagggagggcaccatggcccacgcgattctgaaggcccacaataccggagacaatatggaggagctggccatccgcttcgacgccatggcctcccacgacatcacctatgtgggcatcatccagaccgcccgggcctccggcatgcaggcgttccccctgccctacgtgctcaccaactgccacaactccctgtgcgccgtggggggcaccatcaacgaggacgaccatgtgttcggcctgtcggcggcgaagaagtacggcggcgagtttgtccccgcccaccagagcgtcattcattcttatatgcgggagcggtacgccgcccccggcaggatgatcctgggctccgactcccacacccgctacggcgcttacggcaccatggccatcggcgagggcggtccggagctggcccggcagcttttatcaaaaacttataacatcccgtacccgaaggtcatcgccatctacctcaccggcacgcccatccccggtgtgggcccccaggacgtggcgctggagctcatccgctccacctttaaagacggagtggtcaagaacgcggtgatggaatttttcggccccggcgtagccaacttgtccatggactaccgctccggcatcgacgtgatgaccaccgagaccacctgcctgtcctccatctggcccgccgatcataccttgaaggcccacctggccgtactgggccggggagaggcgttcaagccccaggcccccgccgacggggcctactatgacggactcattgaggtggagctggacaagatccgccccatgatcgccctgcccttccacccctccaacgcctacaccatccaggagttccaggagaacctggacgagctgctccaccaggtggacgaggacacggtgcgtcagctcaagctcaagaaccggcccgcctcactgcgggagaagattgtggacggcaaattccgggtggatcagggagtcatcgccggctgctccggcggtacttaccagaatatcgtgcgggcggcccagatcctggacggccgcgccatcggctccggcgagttctggctgtcggtctatcccaccagccagcccgtcaacctggagctgacccggaggggctacattgcctccctcatggccgccggcgcctccatccgctcctgcttctgcggcccctgcttcggcgcgggcgacgtgcccgccaacggggccttctccatccgtcactccacccgtaatttccccaaccgggaggggagcaagccttccgacgggcaggtgtcctacgtggccctcgtggacgcccggagcatcgccgccaccgccctcaacggcggcgtgctcaccggggccgacgagctgcccgcacccccggccgatcctgccgaggagcccttcgcctacgacgacaccccctacaaggcccgggtctacttcggcgtggggcggcccgaccccggccaggagttggtgttcggccccaatatcgccgactggccggagcaggtggccctgccggagaacctgctgctcacggtgtgctcggccatctatgaccccgtcaccaccaccgacgagctcattccctccggcgaaacctcctcctaccgctccaaccccgtcaagctctccgagttcgccctcagccgcaaggatccccagtacgtgccccgggccaaggaggtgctggcggtggaacggctccgccgcaccaatcccggcgatccccgggtgggggaggccctgctgggccatgatccggcggacaccggcctgggctccctggtgatggccctcaagcccggcgacggctccgcccgggagcaggccgcctcctgccagcgggtgctgggcggcgcggccaacctggccgccgagtatgccaccaagcgctaccgctccaacgtggtcaactggggcatgctgccctttatcgccgaagacgtgaaggactggaacctccagccaggcgaccggatctacctgcccggcatccgcgccgccgtggacggcggggcggaggaggtatcggccgtcctcctccagaacggcactgagcggcccgtcaccctcaggcttcccggcatgacccgcgaggagcgggacatcgtgctggcgggctgcctgatcaactactacgccaagtaggggcggcctgtggccgcccacccctgaaaaagcggggaagcgtaggggccggtgccctcatcggcccgccgctttccggagccctttacatgcggccgtatggttgggaaggagggaggacttgtatgagacggcatctccttgcattgcttgtgtgtgttctgctctgcctgatggtgctcccaagcaccgcctccgccgacagcgggcccaagcccgccgtcaccatcacggtggtcaacgccctggcgggggagtactacctggatctgctcgtcaccgaccccggcgaccatgcaaacatcgatccggcagactacgaccccaatcttctccaagggctgcgggactgggaggtagacggctggtaccccgccctggcgggaggcaccagcgttcctctgttcggagatctgcggccgggggaggacggtacccatcgttttacctactacggcctgccccgcgcctttcgtatcgccgtctccggcccagacggggcccaggccacggacgagccctttacccgcacggtgttctacacccatctgacgtacgactgggagaccaactccattacaagggccacctccccggcggggttctacggcgtccagtttttatccaccctggtgcccaccctgctggtggagggtgggctgctgtggctgttcggcttccgggcacgccgggactggctggtgttcctcgccgtcaacctagtcacccaggcggggctccacctgtggattgcggcagacctggtttccatcggcgattctgcccttcagtatctggtgctcctcgtggcggaggtgcctattttgctggtggagctgattgcctatgtgttcctgctgaaggagtacagcgggctccgccgggcggcctacgccgcctgcgccaatatcgccagctatgccgtgggttatcttcctctccactgggcggtagaatttctggcccggtgagaagatttgttttacacgggcggcaaaatacggtataatacgatatgccgggtaggaattacccggcgtatcgcctgttttattgagataaggggaagtatatgaaaaaaatccttgcgggagcgtgtctgtttggccttctgctctctgcctgtactcctgccgccgaaccgggggacgacggcacgcttcacatcctggccaccacctacccggtctacctgttcaccacagcggtgaccgagggggcggaggatgtggaggtaagcctgctggtcaaccagcccacctcctgcctccacgactacacgctcaccgtcagtgacatgagggccatcgagaaggccgatgtgcttgtgatgaacggtgcggggctggaggactttatgggcgacgccctggcggcctctgacgcggcggtgatcgactgctcggagggcattgagctcctgcccgccctgggccacgagggccacgaccatgacaccgagtacgacccccacatctggatgtgtgaagagtcagcactggttatgatgaataatattcttcatggcttaggggcgttggacgagaaaaatctggattgctaccgtgaaaatgccgctgcggctgcggccttggtgccagaagatgacgcacgaatggaaaacctagcctgtccttatctgatcacgttccacgacgggtttcagtattttgctctggacaacggcctgaacctactgaagtccatcgaggaggaagagggggcggaggcctccgcagctgagatccaggaggttgtggatctggtgagggaatatgaaattccagctatctttaccgagcgcaatggctctgaagctaccgcccgggccatttcccgggagaccggctgtgcggtgtaccaactggacatgatcatgagcggcgacggcacgggcatccagccctacctcgacgccatgcagaaaaatatcgacaccatcgcggaggcattgggatgagcgtacacaagcacggaaccacagggcccggctgtgccggtacctgctgtctgaaagccaccgaccttggggtgagtttcggcggggaggaagtattgagagatgtttccttccacctgcactgcggggagatcgtggcccttatcggccccaacggggcgggaaagagctctcttttccgtaccatcctgggacaggtgcctcacaccgggaccattgagttccaacgggcagggggcgacaagacccggccgctgatcggctacgtgcctcagtctcccagctttgaccggggagacccggtcagcgtgttcgacttcttctccgccgctatctcccgctatccggtgttcctgccttccccccggagcctgcgggccagagtgggtgcatgtctggcccgggtgcatggggagagcctgctggaccggcggattggggccctctccggcggcgagctccagcgtgtgctgctggccctggcgctggagccgctgccccacattctggtgctggacgagcccctctcaggcgtggacattgacggggagaagcagcttctggacatgttggacgagatccgtacccgctatgacctgtccatcctcctgtccacccacgacttcgccaccctgggccagtttgccgacaaggtgattctcctcaagggcacggtgctgcgggtggggccgccggatgaggtgctggcctcgccggagttccaggaggtctttcacctgaacctggggaaagggaacctggggaaaggagggaggggctgatggatttcctggccgggctcctggagccctttcactggcagttcatgcgcaacgccctgctggcggtgctggtaatctcgccgctgttcggcctgctctccaccatggtggtcacaagccgtatgtcgttcttctccgacgcgctgggccactccgcctttaccggcattgccatcggcaccctgtgcggcctggccgatcccctgtggatggcggtgctgttggcggcggtgtttgccctgctgttcacctatgtgcgccgaaagtccaatatggccagcgacacggttatcggcgtcttttcctccaccgccgtggccctgggtatctttattgccaccttcggcggcggcagcttcacccagtacaacagcctgctcatcggtgacattctcagcgtggagcccgccaagatcgccctgctggcggtgatccttttggttgtggtactgctgtggctgtgctccttcaatcagctcatgctgtcctccatccaccctgccctggcggacagccggggggtgggggtgttctggcaggaggcggtgttctccgccgccatcgccgtggtggtcacggtatccatgacctgggtgggcctgctggtcatcaactccctgctggtgctcccggcggcagccgcccggaatgtggcccggaacatgcggcagtaccatttggcttccctgctgggagcactgctctccggcctggcggggctgatgacctcctattatatcggatcttccgccggagcgtccatcaccctctacctggcggtttggtttgccgtcacctttctcctgcgaaaaaaatgtatataagcaagagcaccgcggaagccaagcttccgc

SEQ ID NO: 4234 - DNA, 2120 bp, Unknown
  gut microbiota DNA sequence
cttccgttgcatgttacgacaaaagcctggttttcagaaaaaggaactatgcagatatcgcaattccatccactttggagtgccataagggtgtatctgctccctagattgatactttccccgctgacggttcccaccgataaaaagacattttgagatgaagcgaagcccacaacaaactgcgtatcgctcaggcgggcaagcgcaagtgaagatatcgtctcctcgttaaaataaaccgtttcacttacatttttcccggttttcttgcttataaggtgagcatcatggttgtttccactactggcggcctctgcaacaactgcatattccgaatttaaatcgcatgcggccatacagtctactgcacccgcattcaccaccgtctccacatttgccaccggcgtgagggtcttctgcgccttcccttccaccacatccaccacgtcgcccgcttggatgctctggccggaggcgatgggataggtgcccttgactgcgcgggaggcccccacctgctctgccgtgacggcatgggggttgtccttgttcccggtgtgggcggtcagggccttctgcaccgccgccgcgctgcccgccgggtcatagtccatcggcggcagctccgaggggggcagcgtcccgtcgtcgcccagaaccgggatatgcaggtttttacccgcgccgccgatgtagagctccccggcgtctgtcgccagcccgaactccccgggggccagggtgggcagcttggccttgctgccccgtttgatctggattttcggcatgatgccgccacctcctcactcaaatgtcccgccgtccacggtgctcagggacaggctgccgtctccgcccactttgaactccgcgcccggctttacgtggccgagctgactggaggatgcggccacgcctgtgtgggccgccggagccgcgcccacgtcggcggcggtggtgccgtgggggttgcccgtcttgatctggctgtggtcgtaggccgccttgcccttgtccccgggataggcggtgctggaggtctcgcccagggccagggagggggagatctccacatacttcgtgccgctccagcggtaggtcaggttggtgtcctcggccacatagatcttgccgtcctcgccctcctccgggaaggccgcccggttctcgaactccaccacgtcgtccacatagctggggagctggcccgcgggcaccttgccgtcgctccccagggtagcgacgccgttggccgcgcccttttcagcggctgggacggcacccacgtctccggcagccagggtgacattcccgctcaggggcttgccgttgatggtggtggtgacgggcacataggtgccggacaggtcgggcagcagggaggccagcagcttcccgcccgcctgcactacgggtacgttgccctcctccgctccggtgttggccgccgccgctgtgcccagtccggtaatcttggagctggggatgctggggatatcggagacctccagtgtctgcccggcggtcacctggcccttgttgttgaccgtgaccttggtgtacgtcccggccttgagcccggacagggccgccagcacgagctggagccgcacgtcggcggagccgtcgaagttgaccgcctccgccgtggcgtccccggccgcggagaacgcccggggcgttttcagccgttccgccgtgtccgccgtgccgccggtggggttaatgtgcaccttgcccgaggtcgtgcccacgtagacgttgccggtgtccagggccaccgccagctcgccctccgccaactccaggcgggccaccgcttcctgtaagcctctcttgatctggattttcgccatgttcattcatccttcctgtttttttgatttatttcccggcgttgccgtcaatcacaagattctggtgggccaggggattgcgcatgtgctcctccagcgtagtggagccatccgccgccgctacgctgttcccgtccacccgcaggttggtgtgggccagggccgcgccgttgtgggtctccaccgggtctgtgtcccagttccccccgtccacgtcctgcaccagcttcccgtcctgccccagcgtcgccaccccattgggcg

SEQ ID NO: 4235 - DNA, 16363 bp, Unknown
  gut microbiota DNA sequence
tgcacacggtcgatgtggaagtcgccgttggagggccacaggggattgccgcggccgaagggatgggacaggtcgacaagaatggtcttactcatgataataactcctttcaaaatggcagaaatgaggatggagcctgatcaggtaaacatagcgttggggataaaggtggatagtcctggaataaagataaacagcagtgtaatgacgatcataaccgccagatagggcatggagcccttgaatatgcccatgacgtccacatccttgggcgccaccgccttgaccgagtaaacgcacaggcccacaggcggtgtcagtccgcccatatgaagggcgagaattgccaccaggtcaaactgcatggggtcaatcccgagcgccacggcggcggggtagaacacggggatggtcagggcgatgctggagtaggcatccaggaagcagcccagaatcaggaacacgactaccgctgccaccatgaaaacgatggggctcaggtgggcctgggtgaccaggttggtcagcgcctgggccagaccggacacggtcatgaacttggcaaacatgccggagcaggccaggatcagaaacagcatggtcatgttctccaccgtgtccatgatggagcgccagatcttccggaagggggtgcgcttgacgaggcccatgaggaagaacaccagacagccgatcgcgccggcttccgcggagctgcagatgccgaagaagatgccgccgatgatcaccacggccacaattgcgatggggatcaggttcttcagggaaaccagcttttccttccaggtgaagcgctgctccacccgtgggaacagggagggcttgacgatggccgcgatcacggtaaacagagagaagccgatcgccagtgccagaccgggggcgatggcggccatgagcaggcggccgatagagtcgcccgacagggcgccgaaaatgactatcaggatactgggcgggataaactggccgatgttgccggaggcagcgatcaagccataggtcagattggtattgtagccgtaccggcgcatctccggcgcagcgatctttgcgaacacggagccggtgaccagcgcggagccgttcagcgtgccgaaggcggtgcatcccagcgtggtagccacgcccaggccgccgggaatgcggcccagccacttggccagcgtgtcgtagcactctgtactgattccgattccggttgccagcatgcccatcaaaataaacagcgggatgactgcataatcaaaggttgcaattccgctgtaggcctgaatgccgaccatggccaccgccttgggcaggttcaggcaggcgaccagcccgaaaaagcccacggttcccagcgccaccgcaatgtgtactcccatcaggaccagcacgatcagggtgaccatgccgaccagggccaaaatgattccgccttccatttagccgtcaccatccttttccgcgttctgcgtcccttccacaccaaacgcgcccagctcatcctcggaggggagctcggatttgatcaggatggggtccacctggtttggcctggcgattccgacggcgcagtataccgtcatgaacgcaccctgaatggccagcagcagccagcccaggaaacagccgaactttccgatgaatacatacaccgtcacggcggccaccgacttctctttgatcagccaggaggcccagaactggtcccaggacgctttgatcatgacaacaaacaggattgtggccagcaggtagatgaaaaagctgaagatgtgcttgatccggccgtgcagcctgtcgtacacggcgccaagctgcatgtgctgtcccttcagcaaagtgtagcccatgccggcataggccacccaggccatcagcatggtaacgatctctgtcgtcccctggatcggcgaattgaacgcatagcgcatgaacacatcgcagcagatgagcaccatgttaaacagcatcaccccggcggagacccagccgaagagcttcatcaagagctcaggcttttcataaaacgcggatagtttcattgactttgacatgccgttcctcctttatctgtcctctctgccgactcccgcacgcacaggagccggcggtacaggggcttactgtatatagggagtggtatcaaagtgccactcataacccagctcttccccggcctgcaggtaggcggacataatgccagcgccgtcatagccaagggctgtgacctcatcaatccaggtctggagggtgtcctgatagccgagggctgtctcagcccactcggccttggcttcgtcggaaagggtggaaatcgtaacgccgttgtcgagcatctcctgttcccagccgtccatctcgctctgctgccagtcctggaactcggccatggcctcgtcggcgcactcctggaagagctgctgggtcttctcgtccaaactctcccacatgtccttgttgaagcagagcacattgttattgcgcgcgcccaggccgacctgaaggcagtagtcttccacctcatagagcttgtagttgcagtagatgctgtcatagacgaaggagccggaggcaacaccggtcttgatggtctggtatagatcggccgccgcagcgttgacagggacagcgccgatggattggaaccaggggatgtagtacacgccgcccaaagtgatttttttcccctttagctgtgcgagttcttcaataggccccttggaatagagtttgtagggctcattgcccttccagcccagacataccacgttgtttttttcgtactcctcataaaactcagggtacgcctcggacactttatacattaattttgcagccaggacggggtcatcaggggcaaagggcacgcagtaggtgatctgcgacaaaggcaggttgctgggcgtataaagggtgcacaccgtacccaggtcggcaattccggagctgagcgtattcaggttgtcggtggctttgcccagcagattgtcgtaaaagaccttgaatgtaatggcgccgccggagcgctcagtaaccagattggtgaagatctcaatttcgtgggccgatgtcttgtcgtgggagtcgatggcggccacaataaactcccgtttggggtagccggactccgtgatctctcccgtggacgggttgtccgcatttccacaggcggtcagcgagagtcccagaagcatcgcacctaatacagcgcaggcaattttctttttcatgaaacagatatccctcccatttcaaatttcatgtcagccggtgcggccatcagttcacgccgtatttgcaaacacggtcagggacgtttcgattgatgtgctcctcatccgtaatggcggccatacgaatcatcgtgccatcccccatataccagcgcagcgggaaggccgcaatggtaaagcgctggcccggttactttttcaatatcacctcctgcattctccactcccatcacgttgttgcccagcagaatgatgtgcaccggttcccactctggaaaatcctcaattggcggatggccgaacggttcggtgtactccttctcctcggtattgattgagccaatgccaaatagaaccgcttgacatcctatttctatagcaacccgcgtgccaagcagcaaaaaagcgggctgctcctttttctgcttacggctccaagggatcggcggtttgcttcccggggcgggacatttgtgggatatcagcatattgttgcggaactgcgcatctgtgttgcgcacctgaaacaattgcacttttgacaatattcgtaattatggtacaataatagggacgaaaaagcgacgttttccgtggaggtgcttcaatggacagacatatacggcttgacacgatcgcagaaaagttagaggcgctctgccggcaggacgggccggtatccgggcaggccgcccaggtactgtctgaagcagtggatgaactgcatgcatttcagagggaaaatctggacttccatgagattgtggagcatgtggaccacagcattttcgtcaccgacggggaaggcaatgtgctgtatgtcaaccctgcttacagtcagaacaccaacgtccagccggaggatgttttgggccgaaacgtattcgatatcgtgcaggagggcagaatcttcaccgggggtgccagttgcgatgtcattcagaaccggaagcgagtctttcggctctccacaacctataagacagacccgcccttgatgggctataccgtcggcgttcccgtctttaacagggatggctccctatccaaggtggtggtcagcagccgtcccctgtccaccctgaagctgctgcagggcgattttgagcagttcctccacaatcttgaggaaatcaggaagcgggagcctgtgtcctccgtcaatgaaaacagcagcaccctggaggcccgccccatgattgggcactccaaggcgctggatggtatctgggagaaaatccggcatgtagcggcttccgatgccaccgtgcttattaccggcgagtccggtgtaggcaaggaggtggtcgcagacgaggtataccgccacagtctgcgcaacaaccgcccctacattaaagtaaattgcgccgcgatccccgccagcctgctggagtcagagctgttcggctatgataagggcgccttctccggcgccagcgccggcggtaaggccggcctctttgaactggcggacggcggcaccctgctgctggatgagatcggcgacctccccctggatctccaggccaagctgctgcgcgccatccagaaccgggagatcacccgggttggcagtaccaaggcaaggcgtctggacatccgttttctctccctgaccaacagcaacctgcgggaaaaggtcgccgcagggaccttccgcagcgaccttttctaccggctcaacgttattcccatccagatccccccgctaagagcgcgcccagaggatattcccgaactggtggaacacttcttggaaatctaccgcaggaaatatcagcggtccatcacgctcacgcccaagtcaatggacattctcacacgctatcgctggcccggcaatgtgcgggagctggaaaacgcattggagtatctggcgctgtgctgtcccgagggcgatgtggtacaggagagcgttgttctggatctgctgcggcaggacactgtagacgaggcgttgcagccggtatctaccctgggagatgccgtttcacattatgaaaaaaccttgattgagcaggcgcttcgaaacaccaacagcatgcggtcggccgccgaagctctgggcgtgaatgtctccaccatctcccgcaaaattaagcagtataatattcatctgccctaaagttccctctgttccgctccggcacagagcttcagttcgtacactttaccagattgatcgccgtgctataaaagggaaacccgccagaatccgtagtttctggcgggtttatcgtttggtgaatcggtcgctactcccttggttatgaaacacagttgacggccgcggccctaatttcaatggctttcagtttgattcgtaccgccgcaggccgattcagcgcatcaaggagcagcggaacgatacaagagcccgttaatcacattgcgcatttttcttcagtaatcggctcttccccacgcggtacttcacagccggatacaaggccccgttcagcggaaccaaatttctcggctataatcggttaaatactctgcgccatgggccgttacaaggattgtatccgtcagccggggcccgccgatattggggacatagatgctgggcaggagcaagtcaaccaccatgtttttttcaatggggaccgcgcttccctttgcgatgatgggatagaactctgactgccggatacccacaccgtagccaatgtgttccatcacccagtgttccccgtatccggctttctccacacagtcggcagcagcctgatagagcgctccgcaggtcacgccggggcgcagtctggcgactgcggtttcctgagccctccggagcacccggtagatctccacacatgcctccggcggcgtacccagaaagaccgtacggcacatttttgcggtgtagccctccaccgacgctcccaaatgaatcaccaccggtgcgttatcctccagcaacgcagcgccggcatagggatgcttctgcatctgtcggctatgggtcagcacctgcatccggaaaggggagccctgacttccagctttccccattgcatactccgcctcaaccaacacatcccgttccgaaatccccgctctgacaactgatagtgccgcatccattccggccttcaatgccttggatgccgcacggatgcgccaaatctcctccgggcacttgatgctgcgcagttggtagcagaccgccgcaatatcctccaccttcatctgcggcacggcctcccggaggcactggtagtccttcaggctgataaaatagcgtgtaaatcccacacggggccgctccaatcccagcttgtggagccatttagccgccatggtgctttgagtgtccgccggaaataggtagcctgtcacctttaagccgctctcccggcgcatgtgctccgcctccatccagagacaaaacagctccgccgtcccgtttgagggaacgcaaagcactcctccctccagatccgaaatccccgcgaagtagatcagattttcccggtcatagatcagggcagcgtccagtccacgctccctcagcttatcctgaagcgctgcaatacggcagggaatatactgtttcatatggcgttttcctcctcaaagtgccgttaccgccggatgtttctgtagagcaactggtggtgtccgcatgctgtcccttctccagtatacctatagatagatatacctgaggctcaaccggcctgttcaaccaccgccgaatccgtcttaaagtctttccggtcacatattgcagagacaaccacgcccgccaccagtgcccagaaagctgaaccaatccccaaaaatgagaggccagaggcgccaacgcatagcgcaaagaaagctcccgttttgtatttcaaggtgccgaatccctcattgaatgcctgaatcagtacattaagcatggccagacctgccagcacgttaaccagttcagagggaataaaagatacaaatgcaattgtaaaagaacccaccagcccaaacgctgcgaatgtgacgccattccaaaaagaggctgcatagcgtccctccttgggcccagcctcctccgatgcgcagatagcggtcataggccctgcaatatttgcattgtgcgcacccactaggccggaaatgataccgccgataccggatgctactgtcattgcattggccggtacattgtagccttgggcctttaaaacgcccattgcctgcgcgttttctgctccaactaccaaggctgcaagcggcagggagcatgagagaatcaaattggggttaaactgcggaacaacaagcatagggggagtatataccagttctcctacctcaccggcaaaggagtttgtgacaatcgccgcaatgacccctaccacgagagccgccaagactccaggaaaccctttgattacgcgtggtaccaacaaaaatgccaacacggccaacccgcatacgatgggcaaggtatttatacccgttacgatttgtgtaccaaacttgagcatgcatccgccaatcattcccataacgattggcagcggaagccagcgcatcacttttcctattaagcccgtcacgcctaaaagcaacacaatcacgccagcgatgacaaatgcgccagccgcctcctgaaaactatagcctgccagtgctgtccccatcaatgtggcacctggtatggaaaatgctccggatatgggcatcttatagtagagcgacataattgcccccaataatccgccgaaaacatatattccaaaaatccaggacacagtctctgccgtggtaaagccagccgcctcggaggccgcaatcgtcacgagacaaggacctgtgcagccaaaaatagtagaaataatcgcgctggaaagggtcgacccgttggtatatttgagcaagtcctttgctcccgctctaaatccgcatcccttttcaaacagtcggaaaccgctctttttttcagtagtgtctgcacccatgctgttttccctcttttcttctcttcaatatccagtacggtccagcggccataaggcacatatgccaccgtagcgtttgggccgtacctctccagcaggcggtaaataccttttggagatctactgatccacgggctgccaagcccatatcatgggcaattttcagatcacagttacagggaatgtgctctcagcacactacaacgtaacacactttgtaccaggccgggactctggagcggcaggatgacacccaactgttctgcacctttaaaaggtgcctggacagttgccgttataaccctcattcctacagcagagtaccatgtcctttccatgttccgagttgtctgcttactcatttttgagccaggctcttaagaatggagacatccacgccccgctggcggaaccacttgggcatgagaatttcgtccacctctttgctgacctccggcgcctttgtgatgagaagatccgccagggactctgagcagttcagcccgcccatggcaccgtcaaaaatgatcaccttatccgtgcctgtcgtcttataggcgaagtccatggcgctctccgtagtcttggctaccaccgcgtgtgacatatactcgatgttcataggctccatgtcgaacaggtcagcctgctcctgccccaccaccaccgtgggaatgtggtcggagaaaaaggcggaggggtatccggtccacgcgtagttgtgcacgcacatcttgatggccgggttcagcggcgggatatcgttcaggatcggcttgccgtttctcttgtaaaaggcctcagtgtaccaggtatagggcggcaggggggtgccctccatgtcgtagagatcctggttggccccagtgaagttggcgtagatgacgccggcggagaacacgtatggtaccgggcaggggaagtccagtacggcgatgcactcgtcaatcttgccgaatagggtcatcacctttccataaagctggcagccaacaaaggtggcccggtcgttgacggcatagaggtcgttatccgcatctacaccgatgacgccatggggacccacgttcaggaaggacgcaaaggcaaatttgctctggacaaagggactctcaaagatggcccgggcggtgaagttggcggcccgggggcccaggttctgatggtaagtggagcgggtctcgatgcgggcataggacatgccgaagggcttgaccgctttgtccacctgccggtggaagtggacctcccgcacatcggtgtggtggcagtggacaatccagtcggcgtcgtagacagccttgataccgtagagggtacccacctccgtctcgatagggatgccctcatcaataggggccacgcccttggtcttgccggggccgaagtactcgtccagctgatagcgcctgatatactcctccgtctcccggaagcgcatacccacgccggcccgcaggcgcacgtccctacagccggtcttttcgatgatggcatcccgggtggccttgatcaggatggcgtagggctggccgcccagcagggtgaagccgtggtgagaagccaggatgttgaccgactggccgggcttgatgaagctcatgtccaccttccgcagctcctccatggccacctggtaaagcttgtccagtgcatcctgcccgcccggatagatcaccgggggcagctctggaaacagttcggccaaccggagggaacacatgccgggcagttcggccacgcgccttttcaccagggatggatcaataccatactgggagggtttagcggcaatgggcataatgggggcgtgcttcaaattctcgttgcacatgggattacctcctctcctaaatctcctgattggtggcggccacctggtccagcagcttccggtcctcgtcaaaatagaagcctcggctggcatatttctgcttgaccttctccggcatggtccaggcggtgaccgtctctccataccattgccagccgtccgggttgggtttgggctggatgccggcggcctccagcagacgtagaatgggctggatgcactcgatggtacaaccggtacggattccggtgcgggacgagatttcctccggcgtgtccgctccatccagaatggcagcggccacttcctccgcccggacgccgacgcaatagcacaaaacctgctgtggatggaagtgggccttttcacacagggcgaggatcttcgccgcatcaaaccggctcacatccacaccaaccgtaaagggctcttcccgcttgaccatggtaatcgcatggaatgggcatcggtccgcacagttggcacacccccggcagtcgggttcctccaccgccgccttccgattggtgacatgaatggcatagacgggacagactttttcgcagacccggcatccacggcagatgtcgggggccacatgcgccatgatggttacccgcttcatatgctggtctctcctttttcaattcgattttgccactgtcctttcgacagattcagcactctgttttcgccagagagagggcatgggccacgtcgataatcatgtcctcctggccgcctaccatgccgcgtctgcccagctccaccaaaatgtcccggggattcaggtgaaatttttctgcggcacggtaggtatgcagcagaaagctggaatacacgcccgcatagcccagcatgagcggcgcgctcttgatgatctgcggccgctgcatgataggctccaccacgttttccgccagatccatatagctgtagaagtccaggccggtcgagtagcccagccgctggaataccccggccaccacctctgcctgggcattcccggcgcccgcgccaagcccccggcaggttacatcaatgtaatccgcgccgcactccgccgcagtcagcgcgttggccaccgccagccccagattgttgtgggcatggaagcccacaggaatgggcagcttctccaccagcagagaaatccttgcccgcacatcatccggggtcatatagcctgcggaatcggcaatgttgacgtactcagcgcctgcgtccacaaaaatctgtgcctgttccagtatcttttccggaggcgccatatgggccatcatcaaaaagcctaccggcatcatgccgagctcgcgggcggccttcagatgttggatggcaatgtccgcttcggtcacatgggtagccacacgcacgacctgtgccccattggccctggcctccttcagatcctcaatggtccccacgcctggcagcagcaaaacgcccagcctggcgtgcctgaccacctggctggctgcccggatcagctccatctccggcgtggcggaaaacccgtaattgatggaggagccggccaggccatctccgtgggagagttcgatgatgtccactcccaccttgtccaacccggaggcaatggcggtcacctgctccaccgtgtagctgtggctcacagcgtggctgccgtcccgcagggtagtatccacaatatgtatttttctgttcttgtccagactcatggcttacttgccctccttccgcatcctggcggccaccttttccgcggcggccaccgcggcagcgttgatgatatcgaggtttccggagtatttgggcagaaaatctccagccccctccacctgcacaatcaccgtcaccttattgccatctacaatgggcggtacgcgcaaagaatagccgggcacataggcctgtacctccctgacgatctggttgaccgactccacaatggccctttcgtccgggtttttcacaatggagtagatcgtgttggacatcatcaggggcggctccgccgggttcaggacgataatggccttggagcggtctgctccgcccaccacatggagggctttcgaggtggtctgggtaaactcgtcgatattggcccgtgtgccagggccggcgcttttggaggagatacaggctacaatctccgtatactcagagtccgccgcccgattgatggcgtaagcgatgggaatcgtggcctggcctccgcacgtgaccatgttgtagttgtccgtattcagctcctgcaaatggtccaggttaacacagggcaccacaaaggggcctaccgccgcaggggtcatatcaaacacaattttgcccgcctctctgaggatgggggcgtgcttcatatgtgcagcggctcccgtagcgtcaaagacaatcccgatttccgggtccctcgccactgcctcaacgccttcgatggaggtctgaaaccccaggcccgcagcccgccggattccctccgactccacgatgcccgtcatggtcttcatctccaggttccggctgcgcattaccttatacattaggtccgtgccaatattgccgggcccgatgatcccaactttgactctctccatgctgatctccttttctggttttccatctatttgtcatacacgccgcccgacggcgtggaatggcccggttcatccacaaagcgcacagtgacgctgcccatcccctggaagctgaccgtaaacacgtctcccgccttggccgggaccgccgcagtcaccgcacctgccatgacgatggagcccgccttgagggagatgccgaattgccccagcttgttggccagccatgccacagaggccgctgggttgccccacacctccgccgtggtacccgacgacaccagcaccccgttctgctccagagtcatgccggtcaggcgcatgtccaccgcaccaataggcatcatccgtccccccagcataaaccgtgcggaagagccgttgtccgctatggtgtcgggcagcctgatcttccagtccttaatgcgggaatccacaatctcaatggaaggggtcacccattcggtggcgtcgtacacatccgccacggtgatcccgggcccctggagggacttgcccaggcagaaggacagctcgccctccaccttgggctggatcagccctgacaccaagcagggctcccgctccagcagcagcatattttcaaacaggtggccgtaatccggctcatgcacatggagcaaccgctgcattcccacgctggtcaggccgatcttcatgcccaccacccgttccccggcggcctcccgccggcggacattctccaactggacggcataggcatcctcaaccgtcatctccggatgggtctgcgtgagcatgtcaatctggtaccgcccctgctccgcctcccacagcatctgcgcagcctgtttatggtccatattcttcatcctttctcctgtccacggttgtgatggtgaggctgccccatccctttccgcctccacttgtctgccagcgccgccgccagccggtccgccagagtctccttatcccagttttcctccaggccccggagcagaaccggagctgcgcacattacctcgtcgtgaggcccgggcagcgctaccatacggctggggcccactacgcccacaccgatgcggacgccatccttcacatgccggccggttccctgctgaaactttacaatatacggggttgccgccgtgggatccatgcggcagaccccctctaccgagtggtccttgtcctccgcccctacgccgccggtggtaacaatcaggccaaacccccgggacaatgcgtcatccagtttctccaccacatcctccacattatcctccatgacctcccccactgttacgtaatagccccgctcttccagctcatgcttgagaaacggggtgttggtgtcctgaatcatcccctgttttagctcaaatccagtgggaaaaacaattgcccgcctggacaccttttcctgaatttcccgcgtcatattggagactctgtccaatacggcttcaggctcctccacatccgcacagatgaggcccagaatcccgttggagtgaatataggatttatctgtcaggcacaccccgggcagggcggccagcgccgacaaaattgcccgctcctttcccataatcccagcctgcgggacattcctttccagcacgtcaaaggtgatgtggcggggccgcacatccactaccatcacctttcccttgtccagaccaagctgctccgccaccgcgtccgccatatcgctcagattggcgttggccagtgtaatttcattgacccagagctccgtcttttccagcaggttcaatcccatgcttcaacactcctccctcatcacatccagcttccagtccagcagcggggcatctacaatttctttcccaatgcagaggatgtcggcccgctccgacagctccggaatatccgtcagctttacattgccggcaaatgccacttttatgtgtccccgacagcccatagccgccagttcggacaggcagcattccagatcctcccgtgctccggtatccaccatcaggatatcagctcctccccggacagcagcctgcgtctcccaggcaaccgtggcgctctctccccggagctgcaccacctttgtatactcgtggaaagatgcacaggcggccaacgcctgggggatggagcccaacatacgaatatagtttttatccagatagatcatcggctgctctgcaatccggcagttggctccacccgtcaaaatagcaccgcgtacaagctccttgatctgtggcggcatctttttccaggaaccggacacaatttcggcgcgtccatccgccatcaggaccgctgtacgggccgcagtagcaatcccgcttgccttcgccagggcgccgatcatgcgctcctccgccagggccacctgcttggccgccgcaaccagagtgccgatgcgctccccgtgcatcaggtcctctccatccgccttgcagagctccagttcgatccccagctcatccgcctgggcctttgcagcttccgtgccggccaatacgccggcgcgctctgcggtcagagctgcccggaaccgtcttccgtatatgctccgaaaaagatcatcccggatatctctcatatccctctccttttcattattaccgaactacgttcgtaataatagctatttttgaagggaaccgttcgttcccttcaaaaaatttatgctatttgctatttaatgtacccgaggcgctccgatgtctgtttagcataatataggacatcccgaacggcctgctcccaatccagatcccacattcttccgtatggaaaggacatcgaaatcgccatctgaggctggcgcttgtgattgaaaatcggagctgcgatacagtgaaggccgggctcgatctcttcatcgtctaccgcataaccccgctcccgtacctgctccagctccttcagcagcccatctcctgtcgtaatggtatgctctgtcatctttatcaggggcctggacaggacatatttttccatatactcctcgggcagaaaggccaaaatcgctttgcctacgcccgtgcaatacatgggggcccgcttcccaatctgtgagtagacaacaaccgagctattgttatccactttgtcaatgtagatgatctctccctcagaatgggtagccaggtggaccgtggttcggtatttgtccgccagcagctggcaatagggccgcgcctccatgcggacatccatgcgggactgaacaagatttcccagctcaaaaagcttgagacccaggcggtattttttgttctctgtctgttccaagtatccaaaagccgtcaatgtattgaccagtccgtatgtcgtactcttggatagatccatccgttctgcaatttcagagatacctagttctgtatcatttgcgaagcaggagatcattgtaagggcacgtgcgaccgattgtacaattacgcctctcttttctttcccttccattgtctatcacgtctctttctgcttctgattataggtccaccgcatttccttgtcaacatttttcgttattgcaaaacgatatttgtttatatagaacaattatccgcctgtattttttaccgaccgataaaaaagcctggctttcccgcccactggccattgctgccccgactttgtatcgctgaaatacacactggtttccatctctgcctaacccgtcgaaatcttgtgttcaggcgcgtgcaatgccctgctctctggcctcctgtgcgacggcatgggccacggtgtcggccacgg

SEQ ID NO: 4236 - DNA, 13067 bp, Unknown
  gut microbiota DNA sequence
ggccttgaaacttgcgcaaccggcggttcacagggtcagccgccgtagccgtcggggtgggaggaatgccacctccaggcggaggagatgatgtcctccacattggtgtacttgggttgccagcccagcacctccatggccttccggctggaggcgatcagtgtggcggggtcgccggggcggcggccctcctcccggacggggatggggtggccggtgacccggcgggcggcctcgatgatctcccggttggagaagccctgcccgttgcccaggttgaaggcggcggaggtgttggtgcgcttcaggtagtccagggccaggaagtgggcgtcgatgagatcctccacgtggatgtagtcccggatacaggtgccgtccttggtggggtagtcggtgccgaagagggagagctgctcccgcttgccctgggccacctggaggatgagagggatcaggtggctctccggccggtgatcctcgccgatggagccgtcgtgccaggccccggccacgttgaagtagcgcagggcacagaacttgaggccatgggccaggtcgcaccacttgagcatcttctccacgatgagcttgctctcgccgtaggggttggtggggttctgagggtgggcctcgtcgatgggcacatactccggctcgccgaaggtggcggcggtggaggagaacaccagatagggcaccttgtgggccagcatggtctcgatgagggtcagcccggcagtgacgttgttgcggaaatactgctcgggcacctgcatactctctcccactagggagaaggcggcgaagtggatgaccgcctcgatgggctccctggaaaatacatcgtccaggaaggcccggtcggctacgctgcccacatagaggcggccgcccttgagggcctcccggtggcccttggacaggtcgtccaccaccaccacgtcggccccccgctcgatcagggcggccacgcagtggctgccgatatacccggcgccgccggtcactagaattgccatagcaaaaacctcgtttcttttatagtgtctccaaaaggaaacgcccgatgctctccatggcctcggtggcctttttcatggggaacatctggaatacatgccagagatccgtccacacctccagccggcaaggcaccgcggcctgcaccagccggtcccgcaggcggatggagtcggaaagcaacagctcgctgcttcccgcctggatgagggtggggggaaagtccttcaaatcgccgaacaggggggagagccggaagtcggaccagtcctggtcccgggcgtaggcgtcccgaacggcgtgaatatagttgaccgtgagcaccgggtcgatggcggcccgctcctggtaggacttgccgctggcggtcatatctgtccacggggagaggagaatgagggcccggggcagccgccgtccggcctctttgagcaggtgggtgagcaccagggccaggtttccgccggcggagtcgccggctaccaccacgtcccgggcgccgtagccctggtacatcaggtagtcccaggccttcacggcgtcctccaccgcggcgggataggggtgctccggggcgaggcggtactcgaaggagagcacctgccagccggtgacgttggccagcttggaggccagaatacgggaatagcccaggttgccgctggtatagccgcccccgtggcagtagaggatggcccggcggcggtcgtggccccggtggggacgcacccaggcgcagttcatgccgtccagctcaaagggctcccagctcatgcccgccatgggggccaccaaacggcccagcagctcctgccccttgcgctgcttctccagatcctccacattcatggtctccggcgtggcggcggtgtgaatggccttgagggcgcgcatgaaggggtccaggcggcgggtctcgtcggcctggcgctcttccggtgtgcggcgggccagcttgatgtggatacggtcctgttccatagtggaagtcctccttgtcaactgttctgattataccacagggctgccggaaaagaaagggtggatcgcccgtattccccttgccgcggaggatggaacgtggtatgataggcctagattatgttgaccggaaggggggcggagtatgccgagggacaagcggggcgaaaagccggagtggtatcccctggacaatgcgggtgtgctctattccgccctccagaaggagaaatattcggccatctaccgcttctccgccgtgatggcggagcgggtggaccgggatgccctgcagcgggccgtggacaaaaccatgccacggttcccgtccttcggggtgcgcatcaagaagggggctttctggtactacttcgagccaaacagcgcccccgggccctttgtgaaggaggatatctccaacccctgccagccggtgcgcttccgggaggacaacggctggctggtacgcttttactattatgagaagcgcatctccgtggaggtgttccacgccgtcagtgacggcggcggggcgctggtatttttcaagactctgctggcggtctacctgcgggagctggggtattccatcccaaacacccacggcattctggacgtggcggaggagccccggcgggcggaacgggaggacgcctacggccgctacgccaccgtgcgtccccggcgggagaagcgggggaaaaaggcctaccagaacaacggtacggcagagcccttctataccttcaacgtcaccatgggcttctgctcggtggcccggctgaaggagaaggccaggggctacggggtgtccatcacggagtacctgactgccgtcctgctgaaggtgatcgccgacaagcagcaccgggagcgcccccggcgggagaggccggtggcgctggccatacctatcaacctgcggggctggtttccctcggaaaccctgcgcaacttcattttgacggtgcggccctccatcgacccctctctgggagagtatacctttgaagaggtgctctctcaggtgcaccactatctccggctgaacatcaaccgccagcagatgcaggcggccatcgccgggaatgtgaaattcaccacaaaccggctgctgcagatcgtccccatcgtgctgaagaatccggttatgtccctgggctacaagctggcgggggtactgccttactcgggcacctataccaacccaggccccttccccgtgccggaggagatggctccacacatacaccatatggaggtgattctgggccaggccaccacgccccggccccactgtgcctccatgagctatggggatatcatggagatcaccttcgcgggtacccaaaaggagagcgataccgagcgggattttttccgctttctggtgcgggagggcattccggtgaaggtggagagcaaccggacggaataagccaaaggaggcccacatatgtcttactgtgttcattgcggcgtggagctggacgccacggcgtccttctgccctctgtgccatacgcgggttctggaccccggccaaccggtggataccgtctctcccaagccctttcccacccggcggggggaggtggcgccggcggccaaacaggaggtggcgctgctcattaccgccatgctcgcctcggtggcggtgtgctgcggcgtactcaatctgtttctgcgggcggacaggacctggtcgctgtacgtcatcggcgcgtcggccatgctgtggctgtggctggtgccgccactgctggcccgggggatgcacctgctgctgcggctgttgctggacatcgcggcggtggccctgtacgtctatctgatctcggtggatctcaatgggggggactggtacctggggctggcagcccccatcatcctgtggggcggggcgatccttctcctgctggggctggtgctgcgggtctaccgccggtcggccctcactacgctgacgattctgatcggcagcattggagtctttgtgttcggaatggagttttttgtggaccgctggctgcaccaactgtggagcccgtcctggtccctggtggtgctcaccatctgcatcggaatggtgattccgctcatcattattcgccgcgtccccgccctccgggaggaggcgcgcagaaggttccatctctgaaagatgtgcttgacagatccacagcgcggaagttagaataggagagagaacgaaacacgtcgaaaagcgggatatcccgcttttgcgcccggcaggccgggcgcaggagagcggtgtgtggaggaaaggagaacggcacgatgaatgaaggtaatatccctggaaaaaatgaggctctgatctccctgattctgggtattgtgggcctggtggtcgccctgttcgtcaacggtattttcggcatgattcttggtatcgccggccttgttgtgtcctcgcgctccaagagcatgggctataacgacagcttgcggacggccggctttgtgctctctgtcctgtcggtagttctgggcggcattaccctggtggcctgcattgcctgtacggctggtttgggtattctgggcgcctctctgtactaagaaggggaaacgaaatgcggcagccggtgtggctgccgcattttttggaggaaagatgcgatcatgctcccatatctgtctctctttgggcggttgatgcccacctatggcgtgctggggatggccggactgggcttcggcctgctggctgctctgctgcgctgcaagcgcttcggactgtcccgggacgactgcgcctacctgtatattttgggggcggtgggggccctggtgggggccaagctgctctacctgctccccctcctgccccggctggctgtggagctgcccctgctctgggaggagccaggggagttctatgcccgctatctctccggcggcatggtgttttacggcggctttttcggcggtgtggcggcggcctggggggcggccaaatatttaaggctccgcctgtccgacttcttcccggtgctggtgcccgccctgcctctggtgcacgccgtggggcgggtaggctgtttttgcgccggctgctgctatggacgggcggctccgcccccctggggcatagcattcactcacgccattgccgggcccaacggcgtgccccttcttccggtgcagctttgggaggcgggggcggagctggtgattttcgcctttctgctctggtatgccgggcgggccgccgggccggggcagatgctccgggcctatgtgttctgctatgccccggtgcggtttgtgttggagtggtttcggggggatccggcccgggggatgtacgggcccttttccacgtctcagtggctcagcttggttgttctggccttggccctggcgtggcctgtggcggggcggaagctcaaaaaatacgtccgtgaaagggtatcccagcaaaagggcaacagagacaagagcgattcagcgcattcataagaaccataggaaagaggaaacagccagagctgacgcgccaaaaagggccgctggctctggctgtttaaatttccggtttcatgacagcaggaggacttttagacaagacttattttacatttgaacctggctttgaaccagtaaagaggtatcggcagtcccggcgctttttcagatgagccgaaaatggcgcagcgcctgttcaatccctttttcgtccacacttgccgtgacataatctgcggcatgctttaccgcttccgaggcgttgcccatggcaactccaattcccgcgtaagccagcatgtcgaggtcgttttccgcatcgccaaacgccatgcattccagccgcgagagaccgaagcgcgtgagaaagcgccgcatgccagccgcctttcctccggcctcggggatgatgtctacgccgccctcactccatctcgccagcttgcagcccgtggggagcagagccctcagaagggggtcctcttttctggagcaaaaggccgtggcctgatagaccggtcggccggtatagggggcgacctccgggataggggtggagatttccgcctgcgcctgccggacggcgtcggtgacgcggttaatgtagatgcgttcctcctccaccagggcgaggggcgggccatccgcacagaataggtctgccagcgcctgcacggcttgcggcggcagcggagtactggagagctgctgttggctgctgtccaggcagagctgaccgttcagggtgatatagccatcaaacgccatctcccccaccgggaggctccgcagctccagaatgtgcctgccggtggacagaaacaccagggttccaccggcacgcagcgcgcgaatacaagcccttgtgtgcggagaaatccggccggtccggtgggagagcagggttccgtccacatcaaaaaagatggccttgatcatgatgaatcctcctctgccgggcggcatccagatattcagtccaccgggggcaggcgctgctccgctttgacttcggccctgtcccggtggacggtagaggccggagcgatggcatcccggccgaatttgtcccgtatgccgtccatggccttttccagcttctccagcttgtcccggcggggggcggcgccggcggcgaacagatcgagctgctcgcctgcctcgccctcctccaccagggcctgggcggtgagagtgagggcccggaccggggcgttctccctccaggcggcgcggatgagctccatagccacctccgacagctcacgggccacataggtgggggcgctcagccgcttttggcggcagatgtccttgaaattggggtcacggatggttacctggagggtggtgcacttgaggccgtggccccgcaggcggacagccacctcgtcggccagctcagtgactccggcgtggagctccgcccatcccaccagattgcggggaaaggtgagtccgttgcccaccgatttggggccgggctgctcccgggcgggcaccacgggggaatgctccgccccagtagcgtagtcgtggagggtgcagccctgcctgcccaggatggaggcagcggcttcccggtcgaggcgggccagatccccgatggtgtgcacgccgtagtgctccagcgcggcggcggccgaccgccccacaaagagcagggaggtgatgggcaggggccagagcagctcctggtagttctcccgggagatcaccgtggtggcgtccggctttttgtagtcgctgcccatcttggcgaagatcttgttgaaggatgcccccaccgataccgtcaggcccagttcctcccgcagcacccggcggatctcgtcggccagggccttggcgtctccgccgaagaggtggagggagccggttatatccagccagctctcgtcgatggagaagggctccaccaggtcggtgtaccgctcgtacaccgcgttgacccgcctggagtagtcccggtacttccagtggtgggcggggaggagcaccagctccgggcacttgcgccgggcctgccagatggtctcggcggtctgcaccttgtaccgcttggcgggctcgttcttggccaggatgatcccgtggcgggaatttggatcgccgcacaccgccaccggtctgtcccggagctccgggtggtccagcagttccaccgaggcgtaaaagctgttcagatcacagtgcagaatcacccggtccataccgtccgcctccttgcagctccattataaaggaagggacgagagaagtcaaacacatgttctaatccccaagagaccaccgggcggagcgggcggaaaagcggcccagttctcccgacccgtcgtagagcagacaggccgcataggggccgtcgtggaggttgagggccatccgctccagccagcgatccaccgccaccacatcatagtagtccaccggcggataccgccggacggtgttatggtgcgccatggactcacctcccgtcaaattgggccagctcggccagcagctcggggtgggcggacagctcttgatccccatagtagcgcagatagaacaccacagtcccccggcacagaaggacgtcctgtccgaagccgccctcctcggtgatcagaactgcgtcggtgtccggcacgtccaggggcgcgacggtgtaccgctccgggatttcggcatagaaggtgtgccgggaaaagagatcccgtgcaaaaggctccgctagggcggggagggagagacggtaccaatccagccggaaactggtctcgtagtctccgtccgccatgttccgttccacctcatactgttccggggccaggacagaccagtcgaagcggacatagttgtccaagtccaccccccgccgctccaccgaccagacggagggggcggcctcaagcctgggccgcccctccagctcctccagggcgaagtcggggaaggggcggttcacggtcgcagtctccccctcccagcgcatgccacgcccggctgccaggacggcaaagctgagggccaccaagataaaggagccggccagacaggcggcgttgatgcgggcggaacaccgccagccggagcgccggggttcctttccggcccgcagccgccgccgaagggcgaagaaggaggagaaggagcggaaggacatataaatggcgatccactcggacaggatacagagaaaaaggttgtccccgcttccggtgaccagggacagtaccggctcatcccaggccaaaaggagccatagggggagggcaagaatgaccagggcgcagattagcatgggggtggcgaaccaccgaaccagccttgccagcttgtccagcccgtacccccgtaccaccgggtcggtgtgcagctccggggcgtctggttcccaggttctgaacagggaaaagcctttgcccatgtatccggtcagctcccatcccagggtgcggcagtgctccataccctccgggcagtccagggtaccacggggttccagccggtagcgtaccgccgccggttccccccgccggaagtgaaagaggaaggcgtcactgtggtcgtagtgtaggccccgggcggccatggactccagccagccctcgatgtgatccaggtccatcccgtcaaccaggcacagtctgcgcaccgtcctcggcttcatagtccatcgccctcctctcctcctccgcgtccgccagacagctccgcaggcggacaagctcttcttcgtagcgctccagcccggcgtccgtcaaggcataggtgcgtttgcggccctctacggcggtctcccggatcagccccacctcctcaaatttggccaggatggtgtagagggtgcccggccccagccgcacccggctttgggtgactgcggagatatattcggcgatctccgtgccgcaccgcgcctgccgcaacagggccatcagtacatagaacatggactccgtcagggtctccaggattttgcgtcccatcgcctcgcctcctgatatcgcgcttcgatatcgtctatggatattgtaatatcgaaggacgatattgtcaagcataaggacggcggataccgggcaggtatccgccgcagactgtcgataaaccctccaacggaaggattcggagggaaagatagtgtgaaagaaaaccgtcagggttgtctttcgcgtccaatcaaacgacttttgagcacttttttgaagtgctgaaaaatccagcagcttgtcgaaaagactttttcgacaagctgcggcggataccagagtggtatccgccgcaggagggagatcagccgaaaaagcggttcagatcctcctccaccgtgccgatgccggcgatgccgaaggtatctatcagcaccttggccacgttgggggagagaaaggcaggcagggtggggcccaggtggatgtttttcacgcccaggtggagcagggccagcaggacaatcaccgccttctgctcataccaggcgatgttatagacgatgggcaggtcattgatgtcgtccaggccgaagatctcctggagcttgagggcgatgacggccagggagtaggagtcgttgcactggcccgcgtccagcacccgggggatgccgttgatatcgcccagctccagcttattatacttgtacttggcgcatccggcggtgaggattaccgtgtcgcggggcagggccttggcgaactcggtgtagtaatcgcggctcttggcccggccgtcgcagccagccatgaccacgaacttgcggatggcaccgctcttgacggcttccaccacctggttggccagggccagcacctggttgtgggcaaagccgcccaccagggtgccccgctccagctcaatgggggaggggcagcgccttgcatgggcgatcagggcagaaaaatccttgtgtccctggcggtcggccccgatgtgggggcagccgggaaagcccactgccccggtggtatagagccggttcttgtagctatccttcgggggcaccagacagttggtggtcagcaggatggggccgcggaaggcctcgaactcctccttctgctgccaccaggcgttgccgtagttgcccacaaagttgggatacttctgaaaggcgggatagtagtgggcgggtagcatctcgccatgggtgtaaacgtccacgccggtccccacagtctgctccagaagctgctccaggtcgtggaggtcgtggccggagaccagaatggcggggttatcccgcacgcccaggttcacccgggtcacctccgggtggccgtaggcgctggtgttggcatcgtccagggcggccatcacgtccacaccgtacttgccggtctccagggcgagggcggtcagctcctccgcggtgagggagtcgtccagggtcttggccagggccgcctggagaaaggcgtccacgccgggggcggacttgccgtaggcgttgacgtggtgattgtaggcggccatgcccttgagcccgtaggtgatcagctcccgcagagagcggatgtcctcgtcggcggtggacagaacaccgaccgcctgggccttggccccccagtcgccggagccgtcccagcgcgcggcgtcggacagccccgccccgtccagccgggagcgcagggcggcattccgctccagagtggcgcggatgcgggcctgaagtgcgtcatcatcaaagttggcgttggtgatggttacaaacaggttttcggtcaccagccggtcgtcctctgggatgatggcctcgccctggttccgcagggcggtcgtgagctggcagagaccccgggtcacatagacgagcaaatcctggagcgcggcggtgcgggcgctcttgccgcagacgcccgcccgggtgcagccggtgcagccggcggtctcctgacactgataacaaaacatgtaaagtcctccttgtacgggcggaagtattggaactgtccgcaagtatagcggaggcgcgggggaatgtatgttgtaattgcaacagaaaaggggatttgctgtggaaagtggcccgaccgaacggacaaaggcccaaaagactcttgagaacggactcccagtgtgttaaaataaaaataaaccatttaatttatctttattgggggtggacgggatgcctagggtcgcttattcggaggaggaacgggagcgtatccgggtggcattggttcgggtggcactcgatctgatgacaaagcaggggattcagcatacaaccgttgagcagatatacagaagggttgggatatcacgcacgtttttctactcctttttcccgaccaaggaggatctgatcgtggagacgctgtacctccagcagcccaaaattgtggcatatgcgcgaaagctgatggcagatcctgctctgagctggcgtgatggggtgaggcaattcctccatgcctgctgctatggcgagaagaatgggattgcggttctgaccatcgaggagcagcagctcatttttaagcgcctgtccaaagagagttgtcagatgttccgcgaaaagcaggcccgcctgtttggaaccatactggagagttttggaatcagggcgaatcgggcaaatatcagcctgtttaccaatctgagcctcacggtaatggtcatacgcagggcgatcccggacacgcttccgctgtttgtgccggaggccgccgatgaaacggtggagtttcagatcaacgcgatcgcagatgccttggagatattgaaagagcaggactgatggaattggaaaatccgtccaaatattgaagtacgatgtcaaattcgggcggatttaagtctgctatagataaagataaattataaatttaattcttatttgagtgttctttatatgatatatgtttaggaggagtatgcaatggggttttttagcaaactgttcaagggaccggaaattgatatggaaaagagcgatgcaaatgcaaagaaaatgcgtgcgctgtttcaccaagcagtagggggcggggaggattacaggttgatatttggctataccgaggatgtaagccggttcaactatgggttcgtccacgggagtaaaacaaagattgggaatctgctggtcggttggaatgaggagagtcagacaattgtagtcgttcctacggttccggatctttccggctgcggcgagccggtctattaccgccgctccgaaattttgaaggcatatcgaaataaatatcccactgacgcattcattatctatcctgataagaaaagctatattggcatccacgcctatgactggttggaggacgaaacattgtatgtctatgtgtctcaggagaaagaactggcggcatttacagaattttttatgaactgctttgcaacgaagtgagacacagttccagaaccctatacatagaaaataatttcaccaaaagggaggcgtatacacgaacgcctccctttttagcaaaaaaagagacttgccttataaaagcaagtctcttggtggagataagcgggatcgaaccgctgacctcttgaatgccattcaagcgctctccccatacaagcgtgtagcgaaccctctaaaagaggtg

SEQ ID NO: 4237 - DNA, 57611 bp, Unknown
  gut microbiota DNA sequence
aattaagtttcattttgcgagtgggaatgaggagatttcattctgtctccggctcttgcggtgctttagccgggaaaacggtgcttttaagaaaaaattttttgtatctgataatactttcccaattcacacctcttggatttcagtcagatcatcacaggtctttaagtgcaacgcatagcttattaataacaaaaggtcttaccgatttttgcaaatcggtaagacctttttatgttttatgattgattctttcataattccaaacgaaaaaccagtaacagatcagcggccaaatttctgataaaggaaaactacctagtctctgctacggggtcctatgttattcgttcccgttgagttgccactgggcactgtggctctgtagctccaccatacgacggtagagtcctcctttttccatcagctccgcaggcgtgccctgctcggccacccggccattttccagcaccacgatgtggtccgccccggccacggtgcgcatccggtgggcgatgaccagcaccgtcttgcctgccagcaggcgggagagggcgccctgcaccttggtctcgttctctacatccaggctggcggtggcctcgtccagcaggacgatgggggcgttcttcaaaagcgcccgggcaatggagatgcgctgccgctccccgccggagagcttcgccccgttttctccgatgggggtgtcgtatccctggggcagacggcggatgaactccccacagttggcggcctccgccgcggtccgcacctcctgatcggtggctcctcgcttgcccaggcggatgttctccatcacggtatcgtcaaagagcaccacatcctggaacaccatggagtagtcggtcagcagcgcctccgggtccacggtggagatgtccacgcctcctaccctgatggtgccctccgtaacatcccacagccgggcggccagccgggcgcaggtgctcttgccggagccggagggccccaccagagcggtcacttcaccctcccgggcggtaaagctcacatcgtccagtaccttcttcttgtcgtaggcgaagcccacatggtcgaacacaatgtcgtggcccttgggctggaacacctcggccccctctgcggtgggcgtatcataaatctcgttcatgcggtcggcggacacctgggacacgaacagctctgcgatgagggccaggctctggtcgaagggggcgtacacacgggtgatgaccagcaggaacaaaaacagcagcatgaagtcgatctgcccggagaggatcaggctggcccccgccaggatggtggtggctacccccaggcgcatgatgacgctggccgcattgacaaagatgccggtgcccagctcgccctggatggtgaccttctcatggtcgtcgatcttctggttgagcccggccagatagcgcgcctcctggttggtggcgcggatttcccggacattttccaacgcctcctggatgccgtcggagacacggaccgcggcctgtttcgtccgttccgaggcacgggcggagatcttccgggtgccgaacaacaggccgaaggccaccggcaccccccacaggcaggcgatggtcagccgccagtcatataccagcaggcacaccgcgataatggccgtggagatgtaggccccgtacaggtaccccagcacatgggaccagacgtgctccatgcggttcacatcgcccatgagagtctcggtgagatccgccagatcccgcttgccgaagtagcccaagggcagcttgcgcagccgctccgccaggctgagacgggtggacttcacctcgttatagaccaggccgtaagtggcgtggtactgctgcaggtgggtcacgaaggacaggatgacgaatgcgattaccagcccaagaaagagcgccgggccgggcagcggcgctccgtccgtcagggtccccatcaggccgtacatcaacaggtacaggatgcccatgccgcccatgacgaccagattgacaatgaccgtccagaaagcgccctttttggtgtttctcacgccctggtcggtgagggcgtatttccgctgaaactttttagagaacatttattttgcctccccttcgctggtgatcttccactggaccgcctggttgtagtccgcccacatccgggcgtagaggcccccggcggcggtcagctcctggtgggagccctgctcctcgatgcggccctcctccaacaccagaatcttgtccgcgcccacgacggtggacaggcggtgggcgatcatgataacggtgcggccccgggtcagctcggagaacgccttttggatcagcgcctcgttctcggggtccgcgaaggcggtcgcttcatccaggaccacaatgggcgcgtcctttaagatggcccgggccagggcgatgcgctgctgctcgccgccggagagataggtcccctcggagccgatcagggtgtccatgccctggggcagcttctccagaatgtccccgcactgggcggccatcagcgccgcgcgcacctgctcccgggtggcgtcggggcgggcggcccggacattttccaagatagaggctttgaacaggcggctgttctggaacacaaaggcgatctggtccatgagcacatgggggtcgatctgccgcacatccacgccgcccaccttcaccgcgccggaggtggcgtcccagaagcgggggatcaggctggcggcggtggtcttgccgccgccggagggccccaccagggccacggtctgtcccggctccgccgtgaaggacacatgggagagggcgggcgtctctgtaccgtcgtaggtaaagctcacgtcctcaaattccacacggctgctctggggggacttgggatgctccggcactttcagctcgggagcgcccatgacctgatcaatgcggcccagagcggtgccagccagcataatgcccgatgcggcaaacatgattttggcaagggccgtggagatgatggcggagaacaccgcataaaaggcgaagttcgtgacaaaccccgcaaagtcgcccccggccagggcacccggcgccaggaacagggccgccggaaccaagaacacaaaggccccctcggtgaaggtcaggttgacggattggggtgtccggcaaatatccgcctggtagtgctcggccttggtgctgtagtcctcaatagcctcctggaacgccttgaaggagtagacggtctgctggaagatcttgaccaccgggatacctcggacgtactcggtgcccgccttggtgatgcggtccagggccgcctgatattcccccaggatttgggcgtttttaccgcccatcatggagaacatggccacaatggagatcaccgccgccagcaggcaggccgcccccatccgccagtcaaagacgaacatcatcaccagcatggtgatgaacagggtgatggtgcccacgatgtccgccagattgtgggccagcagggtctccgtgtcggccgccgccgcgtccagccgcccgcggatgaggccggaggcgttggagtcgaaaaagcccagcggggccttcatcacatgggccacgccctgcttgcggatgttggccgccgtgcggaaggccgccagatgggtgcacatcaatcccgcgaagtacaggacgataccggccaccgcaaaggcaaacgccagccagccatattgggcgacgctctgcgccgccgtccagtccggcgccaccgcgatcaagtcccgggccgccagccagatgcagatatagggcgccatgctcagcagcatggacaccgccgacagggccagccccaggaaggtcagccctttgtggctgcccgcgtagtccagcaggacggccacatcgctctttctcttctgcttcatgaaaaaacctcctcttaaagttagcataaactaaccatatttcaaaaagataggggattattcccccatcagttttgaccaaccagcggtgtaaaacgcccgcaactgatccacatcccgcatcgcctgatcccggggcatatcgtgaaccacgatctcaaagatgccattgaacatcccgctggcgatgatatggcacagggatttgtccagcaccgggatgtcccggcccaggcggcggagcacctccatgtagcgttgggtgtactccacctctacctccaccatgttatggacgaagtgctcatagctggtcccctccgcacagcagagcagcagcttcaccggctcccggtgggcgcagatatagtccaccatccagtccacacatctaccggactccaggcccatgtgctccgactgctccttttccggcagctcggcaaaggtagtctgtgcttccataaagcggcccatgagggccgcggcgtggggctccacgatggagttgaacagggcctccttgctggaaaagtagccgtaaaaggccccggtggtcaccccggcgttctttacaatctgccgcagggaggctcccagaaatcccttgtccagaaattccgccaaagccgcctgctgaattttttccagtgtagcagtggaccgctcctccattcaaacttcaccgccttataacagtgttatataacggtgttattataccattgagcggaaagggtgtcaacttatctgaaaatactttttgtgatcatatcagctacaaagttgtaggcgaaccagcccaccgctgtactgtgacaggacacaaggtatacggtatcgggcacagtgtgccgcttgttctatatagttacgaagagttctctgtccactctgccgatgttctgctggaaagggatttgacatacagagtttttatacagcctttgttttcggaggcagagcagtatggctttcctgctgggatggcttttgcttaaaaattgagggttgacgattgaagaaaagccatataaaataatatcaaaaatatttgatatgaagagagctttatggaaagagattatagggcggcggctcgggtattcaaggcgttgtgcgatcccaaacgcttggccattttggaggagctgcgcggcggggaaaagtgcgcctgtgtcttgcaggagcccatggagctgacccagtccgggctatcctaccacatgaaggtgctgtgcgagtccggcttggtggagagccgtcaggagggcaagtggacccactaccagctgagcaggacgggcagggagtacgcggtgaagctgctgctggagctgactacgccggttacagaacaggggacaccgcttgaatagcgggagcggaacacgccgtcacagtagatggcgtgttttccagcaaagcatcaaaatattttgatctataatacataaagggaggcggaacgatatggagttatggagcctgtttcaggagcagattttgggcatgaggtggctgaacgagtggctcggacgcggcctgtccgcgctgggcctggatatccatggacggctcggcggcagtgtacagtttttcctgtatgacagcttgaaaattacagtactgctctgtgttctgattttttctatttcctatatacagagctatttcccaccggagcggagcaagcacattttgggccggctccacggcgtgggcgccaatctggtgtccgccctgctggggacggtgacgcccttctgctcctgctcgtccatcccgctgttcatcggttttaccggcgcggggctgcccctgggcgtcaccttttcctttctgatctcctcgccgatggtggacttgggcagtctggtgctgctgatgagcatctttgggactaaggtggccattttctatgtggtggtagggctggcgcttgccgtggcgggcggtacacttctggagcggctgcacatggagaagcatgttgagcaattcgtcttttcggccggcagtatggacattgagtcgcccgagctgacaaggcgagagcgggtgcggtacgcaagggagcaggctgtgtccaccttcaagaaagtagccccctacatcctggtgggcgtggggctcggcgcggtgatccacaactggatacccgagtcatggattgagactgttctgggcggcagcaatcccttcggcgttgtcctggccgtgctggtgggcgtcccgatgtatgcggacattttcggtacgatcccggtggcggaggccctgctcgccaagggcgcgcagctcggtacggtcctggccttcatgatggcggtcaccacgctgagcctgccctcgatgatcatgctccgcaaggcggtgaagcccagactgctggggctgtttatcgccatctgcacaggcggtattatcctcatcggctatctgttcaacgtgttccaattctatctgatttccatttaggaggtaacgaaacatgggactgttcggaaaaaagaaaaagggtacgcccccgccctgctgtggccgtacccctgaaacggcggtgcgggtgggagcggacaagaccgccgccagcgtcaaggtgctgggctccgggtgcgccaggtgcagcgccctggaagcggccgtccgtgcggctttggcggagcttggggtggacgccgccattgaacatgtgacggacttcatgcagatcgccgcctatggggtgatgaccaccccggccctggtggtgggaggccgggtggtgtcctgcggccgcgtaccgggccaggcggagctccgggagatgctccaggaggccctggaaaaagaaacgctggaacagggccctgcggtgtgatatactggccccagtatcacaatgggaaagaggctgggacgaatgaacctatcaccgaaccaaatactcagactggcccccaacaaggtggactacctgatccccgggggcgagatgatcaacgagtttctgggggaggggccgggggcgcgggtgtgttcccagatgtggatcgcctccctggtgacctccgccctccagcccggcactgccacggggctgtcccgggtggcggggacggacgttttactgcgggactgcctggcggaaaaccctgcggcctggctgggggaggctcacgccgcgcgctggggggccagcctgggctttctgctcaagctgctccactccagggaccgcctgctgctccagacccatccggacggggcgcgggcgcggaagtatttcggcctgccctccgggaaggatgaggcgtggtacgtgctggacacccgtccgggggcgtgcatctggctggggttccggcccggcgtcacgccggcgtatttccgggggctgatcgagcggcaggacacggcggccctgctggactgcctgcaccagatccccatccgtccgggggaggtgtacttcatcccggcgggcacggcccacgccatggggagcgattccctggtggccgagctgcaggagccggtggatatcaccctgcgggcggagtacatccgcccggacggctcccgcctgccggtggagagcatgtatggacccgccggcatggacggcctgctggactgcttccattttgactgcctgccccgggaggagctgctggcccggcaccggttccgccccgcccccggggcggaggagccctggaggaagcggctgatcacgccggagcagaccccccgcttctatatggatgaggtggagctgcgccgggaggcctatgggagcgccctctgtgtcaaccgtgggttccaggtgctcctggtgctggagggagaggcggagttccagtgggagggcggttccctgcgggcccgcaggggcgaggagctctttgtcccccacggcgtggcctcctaccagtgtacggcggaggggacgtgccgcctgctggagtgcgggcttccgggcgcgtgaagcggctgcgaaacagaggggcggagcgccggccggcgctccgcccctctgtttcgctcattttccccaggagaacaggccctttttctcatagggctcgcagctcaccgactgcaccgtgtagccggtcgcgtcgataacctggcgcagccttgcctcgtcgataggttcctccgccaccacgacggtctgtttcctgctgtgggaggaggtgaccttcttgacggggaaggccttgcggacggcgtcatttacatgggattcacacatgccgcacatcatcccgtccaccacaagagtatactttgtcataaaaccgcgccctttccgctccgctgtgccggaatattttgttagcagatactaaccgatcgtagcatagcggagggaaactgtcaaggggagggccgcccgccgccctcgtccaccagggcgcggatgagggcctcgtcagcgcgggagtggagcgcgccgtcccaccggaggctggggccgttggggcagtttttcatacagccggtgatgcggtaggtgaagcggccgctggcgctgacgccgcccgggcgcacgccgtaggtctcctccacaaaggcggccagacgggccgcgccccggccggagcagcgggggccgccgcacagctccaggcggtggggggcctcctcggtgcgcaggccggggtaacgcctgatgatggcggacagaaaggtatctctgagggagagggcggcggcgatctccgccagatcggcggcgggcagtgcgccgccgcgctcctcctgcacctcccgcagcagggccaccagcgccccctgctcccccggcgccccctggcggcggtaataggcgagggcctcctccagtgtccagtcctgtgtcatgcgtctgcctcctgtctgtcgtttccctcattatgccgcatttcccgggaaagatccaccccggacagggaggacaggggaaaggggggctgggccagggggcgcagggcgatggagaggaggagggccgggttgtcatccgccgcgatccggttggagcggagggccccgcaggcgcggcagcggtggatgagcgcccactcgccccccttgcgcacccacacgcccaccggctccataatcccccggcaggtacaggcccggtcgccgggctcctcgtctacgtggaggctggacagacagtgggggcagtggttgcggtgccggctggcggccccctctggggtgaccagcgcgccgcaggccttgcaggagaaggactccccgcagggttggcggcggtagtccggggcgggcttggcggcgggggacgcgccccggaaaccgggggtgtccagccagagtgtgccgtccggcccctgggagagagagacggcagtggtggggcggaggggggcctgcaccccggccagacgctggatcagggcggtcttgccgcaccccgggccgcccagcacggccacggattttccgcgcagggcggggagaagcccggcgggaggctccagggcggagccccaggccaggctgtccagctccgcgcggagcggctccagccggcgggccagggcgtctccctcctccggggccagccggtcccagtggctgacaaagagcccggcgggcaggcccgccgcccgggcggcctccagcgcccactccgggagggcgaaggcgcgaagcagggagggggccgcgcacacggccagcacaaaatccgcgttggcggccagaagggcatccccggagccgcggcggctggggcggcgcagggcgctggtccgggggaggatgcgcgtcagacggtactggccgccgcccaggacctccgcctcggcccggtcgcccacggccaggctatctttctgccggagcagccggccagacagcaggcaggggagggtgcggcccgcgtggagcacgacggcctgccggttcatgacgcccgccacgcggacggtgagaaggttggattggttcatgggtatcttgcctcgctttcgcgcccattgtagcagagcgggccgcgcggaggcaaccgcaaagacggtaccgaaaaaaagctgcgccggagcgtgcttcgctccggcgcaggactatggctccagcaggccccggcggcccagggtgagaatccgctggatgctctttggggcgagaaaatagcgggcggacagctcgtccacgcccagaccggcggtgtagtcccggaaaatggcccggttgcgggccagggtctcctccttccgccgggtgcgctctccccacgcccggcggtgctccgcccgccgggggatatacagataaccgccgtccaggtagccctgcagggcctccagcagctcggcgggcagcagctcggctgcgttttgatagcgcatggtgctcctccaaacttgatggaatcatttggaatgagcaaaggctaccagcgggtgggatacggcgccgaagccttcgctcaggcgccgcgcacagaatcacggttcatccgttctgatactcctttccaggtgacaaaaaacgcccgcggagaaccggcgcgccaaaggcgcgggcacctccccgcgagcggaaaatcccccataaggacaggggcgcatggggcggtccgtaccgcagttctccggtttgggcaacacaaacagagagacctccgcccctctccaggctgcgccgcaaaacggcgaatcgcttatacggacatccacacacctccttggtatgaagctaggataccaccgggcggagcatatgtcaaggcttgcggcccgcccgccggggcggtataataagtaaataatccaatacaggaaagaaggagtccaccatggtgacaatggcacagaggatcgaggcgctgcgcaccgaggccggcttggcccgggtgcccgcctctctggcgctgggatttcccaaaaacgcctttgagaagtttgaaacgggccgccagacccccacgaaggagcagcaggaaaagctggcctcctatttcggcgtgtccctgttttacctccggggggagagcaacgaccgtacccggcaggaggactggatgagtgaggggtactctggggcagacgaggagccggtctaccggcccgccccagccccaaagaagatgaaagcggaggcgcccgcccagggggccaccatgctggacgccctgttcgggggccgacaggccagggagcagttccgcgccatggtgctggaggtgctccgttcccctgaggggcaggaagtggtcgcccaggccgtttggaaagagctggccaagcggaaataagccttttgaaatgcctgttgcgaaagcagcaggcattttgcttgttttggcggggagatcaccccgccatataccgctcacgggcggaacggcggagggagaaaggcctttccgccgttctcctccaccagctccggagaacccttggcctggaactgatcggcataggcgtgcaggcgctccagagagtctacggcccggcagcgggcgctgagctggtcctgcacataggcggggagctgattgaagtattcctccgcgccgggatcgcggcggaagagcgcgtagagatccgtatagaccggacgcatgaaatcacctcccgcatagcatgtaccagtggaggtgcggctacccagggaaaatttgcagggaacaaatgcagccttgacaatcggggagaactttatataattgatatatcaattattgatatatcaagaaaggggacgacggaacgtggagcgaaccttccatatgctgctgtaccgggcgtttcacgcccagcgcaacttcctgaggcccagcctgggcgagctggggctggggcctgggcagcccaagctgctgaactacctgatgaaccgggggccctgccgtcagcgggaactggcggactactttgagattgaccccgctgcggtgtgccggatgctggactgcctgcaaaagagcggctttgtgacccggagggcggatgggcagagccgccggagagacgtggtggagctgaccgaggcgggcaggcagatcaacctggactggcagaggcgctgccgggtcatggaggaggccatgctgagcggcttcaacccggaagaacggcggcagtttgccgattacctgtcccgggcctaccggaatcttcgggcagagcgggaggagggaacggaatgagggagttgaggcggctgctgggctatctggggccgtaccggcgggatctgctgatcgcggcggtgatgatcatcctagagactgcatttgaaatggtgatccccgtcctcatggcggacatcatcgacgtgggagtggccaaccgggatgtggcggtgatcctccagaggggaattcagatgggcgtctgcgccctgctggccctggccacggggctgctgtacgcccgctttaccgcccgggccgcctatggctggggcgccaacattcgtgaggcccagtttgagcgggtgcagaaatatgccttttccaacctggacaaatttgagacctcctcactggtaacccgcatgaccaccgatgtgaccgtgctccagaacacggtcaatggcggttatcgcccactggtgcgcagtcccgtcatgctggtcatgggcgtgggcctctccttctggatgaatcccaggctggccctggtgtttctggtgtgtgcgccggttctggggggcgtcctctttgtcatagtgcgccgggtggcccccatgtacggtcggctccagaaggcggtggaccggctgaacaacgtggtgcaggagggcctcaccgccatccgggcggtcaaggcgtttgtccgcggggagtacgaggaggagaagtttcagggggtcaactctgagctcatggagaccagccagcggaccttccgcctcgccgtgctcaacctgccggtgttccaactggtcatgtataccgccgttgtgctcatcatgtggctcggcggaaacatggtgctcaatagcggcctccaggtggggcagctcaccggctttctcagctatgtgctccaggtgatgaactccatgatgctcatttccaacgtgttcctgctgctcacccgttccctggccagcgcccgccgcatcagcgaggtgctggacgagaatattgtgctggattcgccggaggatgcggtggaggaggtgcccgacggcagcgtggagtttgaaggggtctccttcaaataccacagcggcgcccgggagtacgccctctccggcgtggagctccatatcccggcagggcagacggtgggcatcctgggcggtactggctcggccaagactaccctggtgcagctcattcccaggctgtacgacgccaccgaggggacagtccgggtgggcggccgggatgtgcgggagtacgatctccgggctctgcgggacgcggtgggcatcgtgctccagaagaacgttctcttctccggcaccgtgcgggagaatctgaggtgggggaaaccggacgcgagcgacgaggagctgtgggcggcctgtcgggcggcctgcgccgccgaatttctggagcggatgccaaagggcctggacaccgacctgggccagggaggcgtgaacgtctccggcgggcagaagcagcggctgtgcatcgcccgtaccctgctcaagcggccgaaaatcctgatcttcgacgactccaccagcgccgtggacaccgccactgaggggaagatccgcaccgctctggcagagctgagggatgtgaccaagctcatcatcgcccagcgcatcacctccgtgatgcacaccgaccagatcgtcatcctggaggacggccgggtgcatgcggtgggcacccacgagagcctgctggcgggcgatcccatctaccaggagatctacgcatctcagatgaaagggggggaggaccatggcgtcccggcaactgagtgctaaaaaacccaaggacctgggccacacgctgcgcaccctgctgtcctacctgggacggcacaagctgctgttcctggccgtggcggtgctggtggccctcagcgccctggctaaccttcttggcacctatatgatccggccggtggtcaacagtctggcggccggcagcctcaacaccctggtgctgggcgtggcggtcacggccgccatctacggcgcaggggtgctctctgcattgggctatacccaaatcatggtgaaggcggcccagaaggtgctctacgacatccggcgggatctgttcgcccacatccaaaccctgcccctccgcttttttgacacccagcgccacggcgatgtgatgagctacttcaccaacgacgtggacacgatctctgaggcgctcaacaacagctttgccatgctcatccagagtacgatccaggtggtgggcaccttcaccatgctgtttctgctcaattggcagcttaccctcgtcgtggcggtgttttatgtcctcatgttcctctacgtccgcttcagtgggaggcggagcaaggcctattacaagaagcagcaggactgcctgggggagctggacggctatatcgaagagatgatggccgggcagaaggtggtcaaggtgttcaaccacgaggaggaaagcctgcgggcgttccgggagaagaacgaggccctgcggaaagcgggcaccggcgcgcagagctatgcggccaccatgattccggcggtggtcagcatctcctacgtcaattacgcccttgtggcggtgctgggcggcatcatggcgctgaagggcatgaccgacgtgggcagcctggccagctatctggtctttgtccggcaggcggccatgcccatcaaccagatgacccagcagagcaacttcctgctggccgcgctggccggagcggagcgggtctttgaggtgctggagcagccgcctgagaccgacgaggggcaggtggagctggtcaacgtgaaggaggagggcggaaccatgaccgcctgcgccgaaaaaaccggccgctgggcgtggcgcaggccggacggcagcctggcgcccctgcggggggatgtgcgctttcagaaggtggacttcggctatgaggcggggcagcccatcctgaaggggatcagcctctacgccgagccgggccagaagatcgccttcgtgggctccaccggcgcgggcaagaccaccatcaccaacctcatcaaccgcttttacgaggtgcaggggggcggcgtcacctacgacggcatagacgtgcgggacatcaaaaaggacagcctccgccgctccctgggcatcgtccttcaggatacccacctgtttacgggcaccattgccgacaacatccgcttcggcaagctggatgccactcagaaggagatcgagcgggccgcccgcatcgccaacgcggactccttcatccgccgattgccccagggctatgagaccatggtgacctccgacggcgccaatctgtcccagggccagcggcagcttctggccatcgcccgggccgccgtggccgatcccccggtcctgattctcgacgaggccacctcctccatcgacacccgtaccgaggcccttatcgagaaggggatggaccagctcatggaggggcgtaccgtctttgtcattgcccaccgcctgtccacggtgcgcaacgccgacgcgatcatggtgctggagcacggccagatcgtggagcggggcagccacgaggccctgctggcgcagaagggcgaatactatcagctctaccgtggtatgtttgagttgagctgaccgatgccctttttgtgaaactccttgtaaaaacacatggattgtgttaatctgtagcaaaggaactgctgcagaaaggaaagacttatgaacatttatgagtccgcagaaaactatctggaggccattctcagcctgcatgagcgccatgggctggtccgctccatcgacattgccaatgaactgcacttttccaagccaagtgtcagtgtcgccatgaaaaagctccgcgagagcgggtatatcgagatggacaaggacggcttcatctccctgctgccctcgggggaggagattgcgcggcgtatttatgagcggcacaagctgctgacccagtttttcatccggctgggcgtcgacccggaggtggctgcggcggacgcctgcaaggtggagcacgacctgagcgaagagacctttcagaagatgaaggagcacgccttggggggaaagctgcccgaaatggaagggtaggaacgtcaaacaataaaacggccggtgacacacgtcaccggccgttttgtatggacttataccgcggccagcgcgccgcccagcgcacggcagctctcggcagcggcgtcgtccggggcctcgttgcagatcacgggctcggagaccaagttgcagccggcgctctcgcagtcctcggcccaggtgcgcatccactcgccgtctccccagccgtaagagccgaacaggccgatggttttgccgttcaggcggggctttaccgcctcgaacatgggctcaaattcggcctcctccaactgttcggcgcccatggacgggcagccgaaggccagcgcgctgtagctggaaatcaaatcggcgctgaactcgccgggggtgaacaggtcggcctggccgcccgcgccctccgccacaaaattggccatggcctcggtgttgccggtgccgctccagtaaacgattgcgatcttacccatgattgaaccatcctttctgaataccgttctgaatgaaagtacgtattgtatcaagcagccgcgatgagctgagtgatcggggttccctccgcataccggcggcgaaggaccgcggtacagcggtggtagcgctcgaagcgccggcgggccgcctggggatcgccatagcacttccagcagccgcagaaggtgtagtccctgcccttatggcggatgaatcccttcacgtcatccagaggatagcccagaaagacgccgatctcgtgggggaattcctcctccagacagaggcgggcggccaactgccgcaggcagtcgccgggcgcctcccacggggtgtagcccatagcgcgcagaaaatcccggtgctctctgcggcccagcacctccgccagatcccgctcccggtacaggtagagcaggtaggagcccgtgcggcggcagcccttgaggatgaccagccgcagtccccgggcggcgaactgttgccggagcgcaaggaaccggcgcgcgaaaagggcgctgtccctgggacagaagcggaacaggctggcgggctttaccccagccagagtgggggagcagtgctcgatcagcgcctcttcaaaggtcatgtctgggactcctctcttagttagtcattactaattagtggactggaaatggcggttagcaattactaaccgcataacaaacaataccacgcctgcctcccgttgtcaacccaaatttttgcacttgggggagatggggggcaaacgccgcacccttgacagaatagggcaaaataggctacaatttttccagataagcagcactgggaggcggggcggcgggccgctccgcctcctgccgccctgcgcgtgaggagtggacaagagccgtgaagattgcattcgcccctatggaggggctcaccggagccctgtaccggcaggcccattgccgctggttcggcggtgtggaccgctattttattcccttcatcactcccacccaggatcaccgcttcaccaagcgggagctgcgggagattctgcccgagcacaacagagggctgaccgccgtgccccagctgctggtgcggagggcggaggacttcctgtgggcggcgggggagctggcggccatgggctacccggagatcaacctaaatctgggctgcccctccggcacagtggtggccaagggcaagggctccggctttctggggctgccagaggaactggagcggttcctggacacggtctttgacgccgccccctgcgccgtctccatcaagacccggctgggtctgcgggagccggaggagttcggccccctgctggcgctgttccagcgctatcccctggcggagctgattgtccacccccgggtgcagaaggacatgtataaaaacaccccccgccgggcctattttgcccgggcgctggcggacagccccttcccggtgtgctacaatggggatctctataccgtcccggcgctggaggcctttcaggcggagttcccggcggcggagcggattatgctgggccggggtctggcgggcgatcccgccctggcccggaaggccgagggcggcccggcggcgggccgggaggagctgcgggcctttcacgaccaggtgtacgagggctacgccggggccttcggcagccgccgcaacgccatgctgcggatgaaggaggtctggttctacctcatccacctgttcggggacagccagcggcacgccaaggccatccggaaggcacgggacaccgacgagtacgagggcgccgtggcggcggtgttccgggagctggagctgttgcccgagctgcggccggagtggtgaggccatgagctggtgggtttatatcctccgctgcggggacggaaccctctacaccggtaccgccgccgatgtggagcggcgtctggcggcccaccgccgggggaggggggccaagtatacccggggccgggggccgctggcggtggtctaccgggaggagtgccccgaccagggggcggccctccggcgggaggcggccatcaaaaagtaccggcgggcggaaaaggaagcattgattacagactatgcggaaaggcggagcaggatgaaaaaagcggcatttatcggaacgggaaacatgggcgcgcctctgattcaggcggcgtgccgggccgtgggggcggagcaggtggttgtcgccaaccgcacccgggccaaagcggaggccctggcggcggaactggggtgcgccgtggccgaggacaaccgggcggcggccgcccaggcggaatatgtctttctgtgcgtcaagccccagatgatggagggagtgctctccgagctggtccccgccctgggggatgggcaggcggtggtgtccatcgccgccggtctgacctgtgagaccctgcggggctggctggcgggagcgcaggggcggcctgccctcctgcgggtcatgcccaacacccccgccgccatcgggaggggaatgctggccctgtgcgccgaggcgggcacggcggaggagcgtctggccggagtggaggcccttctggcccccgccgggcgggtggagcgcatcgccgaggggcagatggacgccttttcggcggtggcgggctgcggccccgccttcgtctatcccttcatcgaggccctggccgacggcggcgtaaaggtgggcctgccccgggggcaggcgatgacctacgccgcccagatggtgctgggcgcggcggccatggtgctggagagcggcaagcaccccggacagctcaaggacgaggtgtgctcccccggcggctccaccatcgccggggtggccgccctggaggagcggggcttccgctccgccgccatccaggcggtagaggccgccttccgccgcaaccaagagctgggcaaggtgtaagacgtggggggaatcgtacagggccgctttgcccccagccccagcggccggatgcacttgggcaatgtgttctccgccctgctggcgtggctgtcggtgcggcgggccgggggcgtcatggtgctgcggatggaggatctggatcccgaccgctgccgggcggcgtacgccgagcagttggccgacgatctccgctggctggggctggactgggatgagggctatcagaagggcggggcccacggcccctacctccagagcgggcggacggcgcggtacgccgccgccttccgggcgctggaggagcggggactggtctacccctgctactgcacccgggcggagcgcctggcggccagcgccccccaccgctccgacggacaggcgatctactccggcaagtgcagacacttgacagcagaggagcgcacccgactgggccagacccgctgtcccgcctggcgtttgatcgtgcctgaccaggagatttcctttacagatggcttgcaagggacgtaccgggaaaacctgctccgcgactgcggggacttcattctccgccgctccgacggggtgtacgcctaccagctggcggtggtgtgtgacgacggggacatgggggtcacccaggtggtgcgggggcgggatctgctggactccaccccccggcagctctatctctatggactgctgggcctgacgccgccggaattttgccacgtacccctgctgctggcccccgacgggcggcggctgtccaagcgggaacacgacctggacatgggcgccctgcgggagcggttcaccccggcggagctgaccggccgcctggccttctgggctggacagaccgaccggccggagccggtgactccggcggagctggcgggctgctttgaatgggcaaacgtccccccgggggacatcacggtggagcagttctaagaacagaaaggggcgggccggaatgttccggcccgcccctttgttgcgcgcggcgcgcattatcccggcgtgaccacccacttgaggcagtgctcctcgtgggccccaaacacccggtagccctccaggatctccgacagcggcccccggtgggtgatgaggaaatccgtccgcagtttcccctgggccagcaggctcaccagttccgggccgcggctggcgtctacgccgccggtcttgaagaccagattcttcccatacatggcgggcagggggagcgtctggttttcctcatacatggcgaccagcgccacggtgccgttgggacgggccagccgccaggcggcctggaaggtgtcccgcctgccagcgcactcgatcaccccgtcggccccccggccctccgttgcggcggccacggcggactccagctcgggatcggcgggggcgagggccagcgctaccagcccctgctccagtgccagccgccgccgccaggggtccggctccacgccgacgacgcgggccgcgcccagcagggcggcgcactccgccgcgcacagccccaccggccccaggcccagcaccaccgcagtgtctcccggctggaaggcacacagctctgccccccagtagccgctggccaggatgtcccccacaaagagggcgtcttcgtcgctgagggcgtccgggatgggggtgaggccggtgtcggcgaagggcacccggacgtactcggcctgacagccgtcgatgcggcaacccagctcccagccgccgtggacgcagttgttgacatagccccggcggcagaaccagcactcaccgcagaagctctcgcagcaggcggccacccggtcgccggggcggaggttggaaatcccgtttcccacggcctccaccaccccgacgaactcatggcccagcaccacgccgggccgggcacggggtaccgcgccgttgcggatgtggagatcgctggtgcagatggtggagcgggtcacccgcacgatggcgtcgcgggggccttgcagggtggggacgggccgccgctccagggagagcgcgccgtcccccttccagaccagagcgttcatggtgtccatagaggtcactccctttccgatgcaaacacaacggcctcaaactcaaagccctgggaagccggttcgcgcctgtccgggcgggctaggcccagcgtgtcgtaatattcgtcggtatagtgcagcttgccgccgtcaaaggatgcctgtacgcccttgatgtaggaaaaggggtcttccatgggggtgagacggaagtcggcggcgatgcgctccagcaccgcctgtgcatacggcgtgacggcgttttccggggcgcggagataggtgtcgaactgctcccgcgtccagtctcctgcctgctccaaagtggtagtggagccgcaggccagaagcaggcgcagaaagtcccggaagctgcctgccagggggcggacatgctgctctccggcaggcatggggttgacggcaaacaccatatccccatagccgcggatgcggccgtagtggatgccgtcaacgccttcccagcccagcacggtcaggccctttggcgtacaaaaatagccgccctggctggggcccggcccaaggccgatgggggagcagtccagtcccagctccaaaaactgcttcagcagtgtcacagcaatccctcctgtccactccagtgtagcatatccttccgcttgcgtccatggggaaaagggggtaaaatggggaaaaaacgcgaaggggaggaagcggcatgtatatcgccgatctgcatatccactccaaatactcccgggccaccagcaaggagctggagccggagccgctggatgcctgggccagaaggaagggcatcggcctggtaggcaccggcgacttcacccaccccgcctggcgggccgagctgcgggacaagctggccgaagcggaggagggactctataccctgaagggggccgggccggacgcgccccggttcgtaatcaccggggagatcagctccatctacaagaaaaacggcaaggtgcgcaaggttcactccctgattctcctgccccatctggaggcggcggagaccctgtcccgccgcctggaggccattggcaacctccactccgacgggaggcccatcctgggcctggactgccgggatctgctggagatcaccctggagtcctgccctgatgcggtgttcatccccgctcacatctggacgccccacttctccctgttcggggccttctccggctttgacaccatcggggagtgcttcggcgatctcaccggccatatccacgccctggagaccgggctctcctctgatcccacgatgatctgccgctgttccgccctggacggatataccctggtgtccaactccgatgcccactcgccgtccaaactggggcgggaggccaacctgctggacacgggcctgtcctacccggagctggcccgggccatccagaccggggagggctttcacggtaccattgagtttttccccgaggagggcaagtaccactttgacggccaccggaactgtggggtgtgcctctccccggtggaggcggaggccgccggaggggtgtgtccggtgtgcggcaagcggctgaccaccggcgtgctccaccgggtggagcagttggcggaccggccggagggctatgtccgcccggacgccaggccctttgagagcctggcgcctttgccggaggtgatcgccgcctcggaggggggctctgccgcaggcaagaaggtgggcgccaagtacgaggccatgctggcggccctggggccggagttcaccattctgcgggaggtgccgctggaggacatccgggccgcggccgggccctgcgtggcggagggcatccgccgcctgcgggcggggcaggtggtgcgccgcccggggtacgacggggcctatggtgtgatcgagctgctcagccccgccgagcgggaggacctcaaggggcaggtgagcctctttggcgcggaggctcccaaggcggccaagacggcccggggcagggtggcgaagcccgcacggagcggggaggagggggcggcccccaccggggggctgaacggggcccagcgcaccgccgcctcggcggaggaggccacggtggcggtgctcgccggacccggtacgggcaagacccacaccctggtggagcgggtggtctggctggtggaggagcggggggccaagccctcggagctcaccgccgtgaccttcaccaaccgggcggcaggggagctgcgggcgcggctggaggggcgtctgggcaagcgggcggcccgcgccatgaccatcggcaccttccacgccatctgcctggagctgctgggggacgtgcccctggccggcccctatgagcagcgggcggcggcggccgccgctctggcggagctgggccggaaggggagccccggggcctttctccgggcgatctcccggcacaagacgggagcggacggcggggacgacccggcttttgccctctatcaggagaagctggagggaaagctggactttgacgacctcctgctggagaccctgcgccagtgggagggcggccggtcggaccggcgctttacccacctgctggtagacgagttccaggacatcgaccgcctccagctccggcttctccgggcctggcggcgggagggcggcacctttttcgccatcggcgatcccgaccagtccatctacggcttccgcggggcggacgccggctgtttctccgccctgggggcggagcggacggtgaggctgacggagaattaccgctccaccccggagattctcgccgcggccctgccggtggcggaggccatcgatggcgcgccccggcgcatggagacccacagcccccacggggcggaggtgcgtctgctcaccgacgagggggatcgggcggaggccatcttcgtggccaaggagatcgcccggatggtgggtggcatcggtatgttggaggcccaggcgttgggggccgcccggggcgcgcggagcttcggggacatcgcggtgctctaccgcacccggcggcaggcggccctgctggaggagtgtctggcccacgacggcattccctgcgtggtcaccggccgggaggatttcctgttggacggggaggtgcaggacgcgctggcgtggcttgagaggcagcagggggagggaaagtcccccgccgccctcctggaggagtggacggcccaccacaccccctctggcggggtggagcggctgcgcaatatggcggtgtttttcggggatgtgcccgcctttctccgcaacctgaccatcgggcaggagggggatctgctgcgccgggccgggctgagttatgccgccggagcggtgaccctctccaccctccacggggccaagggcctagagtggccggtggtattcctgtgcggcgttggggagggccgcattccgctggagcggaagggcctggacaccgatgaggctgaggagcggcggctgctctatgtgggtatgacccgcgccagagaggagctggtgctcctcagcggcggagaaccctcccgcttcctggcggggctaccactccgtcaggatacggcccacgccccggtgccgcgtcccctaggggtgcaactgagcctgttcaagtgaaacgtgtgccggatttcacatgcgggagtggttgaaacgtataacattcccggggggagccttttcagagccgccctgctcagaatgcccaggcggctttcagccgccggagggccggggccatgtccacggcggcgatacgggtatagcccaggatcagggcgggaggtcggccggggggcggcggggtgagatcacaggcggagaggggggccacccctaccccagcatccacggcccgcgccaccagctcggcttcgctccagcggccgtccatccaaaggagcagatggaggcccgcgtcgcctccggcgaaggacccaacccgcgtcagtccagtgtcccgggcggcggccagcagcgcttcccgccgggctttgtagcgggtgcgggtgcggttgaggtggcgttcaaagtggccccgctccatgaagcgggccagggcgtactgctcaaaggaggggacggtggaggagtagaaccagaaatcccgccgccaccgctccagcaggtgggggggcagcaccatgtagctgatgcgcagggaaggggccagactctttgcaaaggtgttgaggtaaaccacccgctctccgccgtccaggctttgcagggcggggatggggcggccggagaagcggaactcgctgtcgtagtcgtcctccagaatatagcggtcgggggcggcctccgcccaccgcagcagggcctgccgccgggctaccggcatgatgatgcccaatgggtagtggtgggagggggtcacatgaaccacccgcaccccggcctcctccagggcatccacccgcaggccctggccgtccagcgggagggggcggacggcagcgccgcagcttgtaaggatgcgctgggtcttggtgtagccgggattttccacgccatagcccccctcccggcccagaagctgtaccagaaggccaatcagggtctccgacccggcccccaccacgatctgctccgcgtccgcccggatgccccggaagcgatacaggtgctccgcaatggcccgccgcagggcagggaggccctgggggtggggggaggccaggaggggggcggcctgctcggagagcacctcccgcatgagcttggcccaggtggcgaagggaaagagggcaatatccaccgcgctggtggagaagtcataggggagggccggcgtgggcggggccggcacggacagggtgcgggccggagcgggagagcggtgctcctcctgtacggcctgaacaaaaaagccccgcttgggctccgagcggaggtagccctccgccagaagctggccgtaggccccctccaccgttaccacgctgattttcaggtgggctgccagcgcccgcttggagggcaggcgctctccggcggcgagacggcccgcctcgatctccccccggatatagcggtagagctgttcgtagagggggcggcgctggctgctgtccaaaataggcgtaaacatggagacacctccaaactgacctgattattcttgttaattatcgtatcatgaaccgggccaaagcgcaagaggggcggcaaagtccatcgaaaaccgtcccacaataaaaaatatagcccgccctgcagccgtatgaaaggccacgccacggacatactgaacacagattcagtcggtcaaagggaggcagcggccatgcagggaaaggtagagatctgcggtgtcaacacatctaagctgaaggtcctcaagaatgaggagaccatggagctgctgcgccgcaccaaggagggggacatggaggcccgggagcagctcatcgcgggcaacctccgcttggtcctttcggtgatccagaagttctccaaccggggagagaatctggacgacctgttccaggttgggtgcatcggtcttataaaggccatcgacaacttcaataccgacctggacgtgcgcttctccacctacggcgtacccatgattatcggggagatccgccgctacctgagggacaactcctccgtccgggtgtcccgctccatgcgggacacggcctatagggtgctccaggctaaggagaaattcatcagcgagcaccagcgggagcccagcatcgaggagatcgccaagctgctggagctcaagcgggaggacgtggtctttgccctggacgccattctggacccggtttccctctatgagccggtgtactccgacggtggggacaccatctgtgtcatggaccaggtgaaggactcaaagaataccgacgagagctggctggagcacatcgccctcaaggaggccatgaaccgcctctccgaccgggagcggcacatcctcaacctgcgcttcttcgagggcaagacccaaatggaggtctccgccgaggtgggcatctctcaggcccaggtctcccgcctggaaaagagcgccattaaccagattaagaaaaatctgtaggtgggaaaggcgctcttttccagcgccgcaggtgcggcgcgcaagcgttttgcgcagcaaaaccttgccccggcggaatttacttccgccggggaagaatcaaatccgggccccatccgccggatgcgcggatgggagaaagagcgtcattaaccagattaagaaaaatctgtaggtgggaaaggcgctcttttccagcgccgccccggcggaaaggcagggagcagggaaaatctcataaaaagaggcagcaaactgccaatccccgtacggaactattttccgggcgggggttggcagttttgctcctttcatggtaaaatgggacagaaaaatgacgaaaggggttcttttttatgagctttaccctgccgcagtaccatgcgcccgacttccaggagacccggttccagagcgcgccggaggcccggtttgagccggcccccaaggatggggtggctccggagggctaccacgccaccaccatctatccggagtatttcaaggtgggggggcggtggctgctggctgaggagagccgcatggactgcgtggccgccctgcgggacgggaagatcgccgcggtggagtttcgcaacctgaaggccggcgagccggtggcggtgggccgcacggaggacgcctccgagggcatctatgtctatcccttcggctttgccgaggagaagggggaggcggagacctttgcattccgccagggccgctcccgggagaccgcgtactccatggactacgactccatctatgagctgctccgccacgagaaggagcatggccgcatcctgtgggtgatggggcctgcctgtgccttcgatcacgacgcccgggcggctttcgccgccctggtgcggggcgggtatgtccacggcctgctggcgggcaacgcactggccacccacgatctggaggccagctacctcggcaccgccctgggccaggacatctacacccagaagagcatgccaaacggccactataaccacatcgacaccctcaatgccatccgcctgtgcggctccaccgccgccttcgtggaggcgggcaaggcgaaggacggcattatctacgagtgcgtgcgcaaccacattccttacgtgctggtgggctccgtccgggatgacggccctctgcccgaggtctatggaaacgtgtatgaagggcaggacgccatgcgcgccctggtgcgggaggccaccacggttatctgcatggcctccaccctccataccgtagccaccggcaacatgaccccctcctaccgggtggtggacggggtggtgcgcccggtgtatttctactcggtggacgtgtctgagtttgcggtgaacaagctccgcgaccggggcagcctgtcggtgcgcaccattgtcaccaacgtgcaggactttgtggtcaatgtctgcaagggcgtactgtaaccgaacaaacggcttgggagccgggctgaatgcccggctcccaagccgtttgtgtcagatcagccccagcgtgcggagcagatagagccagagggtgagggtaaggatgctgaaaaaggtggtgagcatcaccgtactggcggtgagggtgccctcatgccccatgctgcgggccatgacgaagctgctgacggtggtggggctggccagcatggccagggcggccaccagcttgtcgtcccgtactcccatggccacggcgatggggagaaagagggcggccagaagcaccagcttcacggcggtggcggcgaaggcgggcttccagcggcccagggccttcttcagatcgaaggaggcgcccagggccatgaggcccaggggggtggcggtagcggagaggctggacaccgttttttgcagaatctgaggctgggggatgtccagcagcgtccacaccagaccggcggcgatacccaggatgatggggttcgtgacaatacccttgagggctttctttaacgcggcccggttgaggccgctctgctggggactggtgagggagagcaccatcaccgccgccacgttgtagagggggaccgcgccgatgatcaccaggctggccgccccagcggtgccgtagagattctccagaaaggcggccccaagcagagcgatgctgctgcggtagcccacctggatgaattccccccgcagggggcgctcccggcagaacaagctgagggctgcggtcagaaggatggagcccagggtggccagaaagcagaagagcacaaaggggccgtcccacacggtgaagaagtcggattccaccagatccttgaagagcatgaccggcagccccaccttgaagacgaaatcgttgagcttgtccgcaaaggcctggctgaaaaagcccagcctgcggaacaccaggcccagcagcatcagcagaaagatgggggcggtggcgttgaggcagtaggccagattctccagcatggaattctcctcccggcatggtcgttttctctattatagacgcattgttccggcagtgcaagaaagttaccggcaggtaagcgggtataggacgggccgggcggcacatagagtgtgccgaagggggagtgtgccatggagtgccgggtttcggagctgcggtataaggagattatcaatgtgtccgacggcagccgctacggctgggtgggggatgtggaggtggatctggagagcgggcaggtccgggcgctggtggtgccggggcgcctgcggctgtttggcctgctgggccgggaggaggaccgggtctttccctgggaggcggtgcgccgcttcggcgcggacaccattctggtggagacacctcccctcagccgcctgggcaaggggaattgaggttgccaggagagggggggacgtggtatactactactttagagtatagaaacaggagggaaatcccatgtgcggtattgtcggatttgtcggacgggaggaggccgcccccattctgctggacggcctctcccggttggaatatcggggctatgactccgcgggcatcgcggtttacggcaggcgggagggcctgcaggtggtcaaggccaagggccgtctccaggtactccaagatctggtacaggggggcaggacggtccacgggacactggggctgggacacacacgctgggccacccacggggagccatcagacgtcaactcccacccccaggtcagcgagagcggccggtttgcggtggtgcacaacggcatcatcgagaattacatggagctgcgggagtttctccagtcggaggggattaccttcgtctcccagacggataccgaggtggtggcccaactgctggaacactactatgacggggatatcctggacgcggtggtgaagacactgaaccgcatccagggggcctacgccctgggcattgtctgcgccgactgccccgaccggctcatcgccgcccggaaggacagccctctcattctgggctatggggagggggcccactatctggcctccgacgtgaccgccctcatcaagtacacccgggaggtgtgctacctggatgacggggagattgccgagctcaccgccgaccacctgtgggtctatgacgcctatctccggcccgtggagaaggagcgctgccacgtggactgggagatctccgccgccgaaaagggcgggtacgagcacttcatggccaaggagatcatggagcagcccgaggcattccgcaagaccgtgtttccacgcatccaggaggggcgggtggtgctggatgagctgaacctggagccggactacctgcgggagctggacaagctctatgtgatcgcctgcggctcctcctaccacgtgggcatggccgccaagtataccctggagcggctgctgcgcaagccggtggaggtgacgctggcctccgagttccgctactgcgaccccatcgttaccgacaaaaccctggtgctggtcatcagccagtccggcgagacggtggacaccctggccgccctgcgggaggccaagcgcctgggagcccgggtgctctctatcgtcaacgtggtgggctccacgatcgcccgggagagcgacgacgtgctctatacctgggccgggccggagatcgccgtggccaccaccaaggccttctccacccagcttgcggtggtgtacctcatcggcctgtactgcgccgaggccctgggcaccctggacgaggcggagtacgaccgcattgtgtccgagctgctgctgatccccaccaagctggagcagattctggacaaccgggcggacatccagtatttcgcctccctctacttcaaccacccctctatcttcttcatcggccgcaacatcgactacgccatcggcatggagggctccctcaagctcaaggagatctcttacatccactcggaggcctacgcggccggcgagctcaagcacggcaccatctccctcatcgagccgggcaccctggtggtggccctggccagctatgtcaagctctttgacaagaccatgagcaacgtggtggaggtgaagagccggggggccgacgtgctgggcctcaccgtggacgcccgggcggcggacatggccaagacggtggaccacgtgatccccgtccccgacacccaccccctgcttctcccctccctggacgtggtgcccatgcagctctttgcctactacgtggccctccagcgaggctgcgacatcgacaagccccgcaacctggccaagtcggtgacggtagaatgaggggggacggaatgaaaaggctcactgctctgctcctggccgcggcgctggccctgtccttggcggcctgcgggccggagggcaaagcggcggataccgtccgctacggcctatccaatgcctgggacgctctgatgccctacaacagcccctcggggagcaactactcccgcatcatttacgacaagatttacgaccgcctggcctatgtccatgccgacggcaccctggagccccgcgcggcgtcctcctgggagagcgccgacggcgggacggccgccctgtttcacctggacgagcatgccgccttccacgacggcactctggtgacggcgaagcactgggcggataccattgccctcctgaccgacccggcctgccccaccctggggcggtcggcctttgcggtgctctccggcaccgacgacaccggcgcggcggtgccgggggaggccctgggagcggaggcggtggacaagtacaccctgaagctcaccttcaagacccccaccacgccggaggacttcctgctggacaagaaccgggagtactacgttctgcccacccatctgctggaggggacagcgccggaggacgtgatggagctggcgctgtgggacgagcctgttggctccggcccctgcaaattcgtctccgagacgccggggagccagctagtgctggaggccaacccggactaccaactgggccgccctggctttgatcggctggtgatcacggtcattgacaagtccaacctgctcacctccctgatcgccggggatctggactactacgcctttggaggcaacgtgtccgtggaggacgccgaggtggcccgggccgccgggctggaggtgctggagggcacggtgcccaactccttctacgagctgatgctcaacaacgagaccatccccagcgccgcggtgcgccgggccatcgacctggctctggacaaggaggccctgtgcctccataccgcccagggcctgggggagccggcggcctccgatctgaccccggggacggggtatgacagcggcctgacctgggccagggatgtggacggggcgaaggccctgctggccgagggaggatacgacgggcgcacctacaccctggcctgcaccgccaaccgctccggcctggccgccctgatgcagcaggagctggcggaggcgggcatcaccgtcaccatcgagacggcggactcggccaccctgttcgccggcatggcggacggcaggtacgatatggccatcgccagccacacccccggcgccctgcccctgtggtttaccgagagccgctttaccgccgacaacaacctgttccacgtggcggagctgacgccctacacccaggccatcgccgccgtcaagggggcggcagagcacgacgagcggcaggtgcgggtggaggagctccaggccctgctggccgcggagcggcccttcatccccctgtggtttgggcggacgctccacgtccagtcccccacggtggacggcatcgactacccctcctccgccttctccaacgagaacgtgtgggactgggtgtaccggggctgacggaaccgaacaaatgagaaaacctccgtagggccgtaccatccggcccgtgccgcccacgggcggccggaagtgcaggaggaagaagatgggacgctatttccgccgccgtctgctgacggcgatccccgtgtttttcgggattacctttctggtttttgtacttttaagcctctcgcccgccgatgttaccgacctgggagagggggcctccggcggcgcccagcaggccgcgctggaggaggcgctggggctggacaagcccctgcccgtgcgctatctggcgtggctgggggggctgctccggggggagctggggcagtcctacctgagcggccggccggtggccggcatgctggcccagcgggtggggccgtccctgctgctgaccggcaccggagtgctgctggccattctgctggccctccctctgggtattctggcggcctggcggccccgctcgggctgggatcgggcggcctccgccctgagcctggtgagcttcggcgtgcccggctttttcctgtgcctggtgggggtgctcctcttctcggtgctcttgggctggctgccctcccagggcatgtatgagtacggcgtgttcactggcgtgggggacgtcctgcgccacctggccctcccggccggggtggtgtgcgtcagcggcctgggggagctggtcaagcagacccgctccgcctgcctggagtccctgggggaggactacatcctcaccgcccgggccaagggcctgggggagcgggccgtcatggtgcgccacgccttccggggggcgctgaccccggtgctcaccaccgtgctggggcacatcccccacatcataggcggctcggtggtggtggagcaggtgttcggctggccgggcatgggcagcctcctcttctggggcattgagaaccgggactatccggtggtcatgggggtgacggtggtcatcgccctggcggtgctcctgaccaacctgctcctggatctggcctacgggctggccgatccccgggtgcgctatgggagggggtaggccggtggagcgctgtatgctgtcccggagcccctgggagcggttccggagcgaccggcgggccgtggcctgcttgctgattctgtgcgccgagctgctggcggtgctgctcctgcccccgctgctggggctggagcccaacgccagcgatctgggggcgggcttctgggcgcccccctccgccgcccatcccctgggcaccgacgacgtgggccgggatctcctggcccgcctgctctgcggggggcgggtgtccctgctcatcggcctgtgctccgccgccctcagcgccctggtggggattcccctgggcctgctggcaggctaccgccggggggcctgggagttctgcctcatgcggctggccgacgtgtttcagagcttccccagcattgtgctggtgctctgcctggtgtccctggtggggccgtccgccctcaatctggtgctggtgctgggcctgctgggttggacgggcatcgcccggctggtgtacggcaataccctctcggtccgggagaaggagtacgtcctggcggcccgcgccctgggggggcggacagggcggattctgcggagcaatgtgctgcccaacgtgatcgcgccggtgtggtgcgccctccccctgcgggcggggcgggccatcctctccgaatccagcctgagctttctgggggtgggtatccgcacgccccaggcgtcctggggcaacctgatccagtacgccgccagcctgcctgtcctcaccgggcggccgtgggtgtgggtgccgccggggctgtgcatcatcctgaccgtgctgtgccttcagggcattggcgacggtctgcgggacgcgctggaccccagatatggcggacacagggggaaatagcaggattttcttttcaacacggcctgttttgtgctataatcaattcaacagaacgaagcggccccggtcattcggactggggccgcctgttttatttgtgagagggggctttcatggaatcaattctgttactttgtgcggtggtcattgtcatctgcatcgtcgccagccgcctgtctcagcgcctgggtgtgcccgccctgctgctgtttctggcgttgggaatgttattcggctcggatgggctgttccgcatcccgtttgataactttgaggcggcggagcgtatctgctccgtagcgctgattttcatcatgttctacggtggtttcggtacccgctgggaggcggcccggccggcggcggcccgggcggtggtgctgtccaccctgggcgtggcggtcaccgcgctgctcacagcgctgttctgccacttggcactgggtttttctgctctggagagctttctgaccggggcggttatcagttccacggacgccgcgtcggtgttttccatcctccgctccaagaagctgggcctgaggaaccacaccgcctccctgctggaggtggagagcggcagcaacgacccggcctcctatatgctgacggtgatcgccctctccctgatgggggtgggcggcggcggggcaatcccgtggatgatttttgcgcaggttgtctttggactgggccttggggcggcggtggcggggctgtccattctggtgctccgcaggctcactctctccgacgggctggatactattttcgtggtggctgcggccctgctctcctttgccctgcccgccgtggtgggggggaacggctacctgggggcctatctggcgggcatcctgatcggaaacgccaaaattccccataaggcggccctggtccactttttcgacggacttacgggcctggcgcagattttgatctttttcctgcttgggctgctctccttcccacggcagctcccggcggtttttctcccggctttggccattatggtgtttctcacctttgtggcccggcccgctgcggtcttcctgctgctggcccccttccgctgcggggtacggcagtgtctgctggtgtcctgggcggggctgcggggcgcggcatctatcgtgtttgccatcatggcagtggccagcggggccgccatcggctacgacctctttcacatcgtgttctgcattgccctgctctcggtggcggtgcagggttcactactgcctctggcggcgcggaagctggacatggtggacagtgctgagagcgtcagccgtaccttcaacgactaccaggaccagcggcagctccacctgacccgcttccctatcggcgcgggccacccgtgggtggggcggaccatcggggagtgtgagctgcccgccgacgcgctggtggtgatgctccggcggggcagcgagaatgtgattccaaacggagataccgcaatccaggcaggggatcttatggtgctcagcacgccgctctatgaagacgatgacggggtcagcctgcgggaggtgcctgtggcggagcacggggactggattgggaggccgatcaaggagctgggtatcccggcggaggtactcatcgtcctggtacgccgtgccgacggcaccactgtagtgcccaagggcgggacagttcttcagcagggggatatgctggtggtcaacgagtgggaggaaacctaacataagagaagcaagaggtgtcgagcaatggagacgttggatctgtcgcggcgcggggtgttgctgaatgacgaacagttggggccctatccactggaaaagctcaagcgggtggagcgcctgaccgtggatatcgtggaggattcaccccgggtggatgagaaggagatggcattcgccaagtgccgcctggggggcttcggggatgtacttaagaagaggatggaggattttacggttcgcgtgcccattggggcgtcctattaccactttcagaagtaccttaacgactacccggaaaacgaggtcgcgccggagaaagcgcccctgccggaggatacgcgtatcgtgacacggcacattaaaaagatggcctatttcactggggcggagatggtgggagtgtgcgaggtgccccgggatgtgtattacgccaccaaggtggacggcacgccggtggagcgggtttaccgatacgcggtggtgtttctggtacgcacccagttgcccaccattgcggcctcccacggggacgagtggctggatgacaccgttgcctatcaggcatatcagcggctggcctgcatgtccaacaccttggccgactatatccgccgcctggggtggccagcccgcagcgatgcttttaacaactacgtgaccatcatgccccggttggtggccctggccgggctgggggagttttcccggctgggtatcgtggtcaacccctttgtgggggcggctttcaaggcggccgccgtgctgaccgacctgcccctggtgcccgacggccccatcgacttcgggctacagcactactgttccgtatgcaaaatctgtgccgagcagtgccccatgcacgccatctccactggggaacaggaggagtaccgcggctacatgctctggcggaccgacgagcgcaggtgtgtggcccacggggcggccaacccccacggctgtacctgcggccgctgcgccaaggtgtgccccttcacccggccggactgcgggccggagtgcttccaggactgggacggggatctgtccgtgctctaccgctcggtagaggcccggcggaagttcctggccagccacggctatgtggagccggaggaggagcatggaaagtggtggctgccccatgtggtccgggatggaaaaattcagtacggcggcgatttcgactacgaggtgcagaggcgccacatggaacggaccagataggcggcatggccggaacagaggaggcggacaacggtggcaagaaccattgatctggaggaacggaaacaatttcgcgtgctgctcaacccggtacgccaggatatcattcacctgctgcggcgggcgggacggcccatgacggccaacaccgtggcggagaaaatgctgctctcacccagcgcggcccagagccacctgaacaagctggaggagctgggcgtggtggagctgggagtatgtacggcgccggacggccggcaggcgacctattaccggctggccgatgtggagatccggctctgcctgggccggaaggacggctttcagggggagcgggaggcgctggccgcccaactggtggacggcaccttccggggcgtgctgcacgccgccagccagtgcggcgagccggaacagcaggaggatctccagttcctgttcggcgcgctccatctcaaaccggaggagcgggcggagctgctgggactgattgacggctacctccgcacccacagcgtgcctgaggggggcgtggagcactgggagtatgtgctcatggcctaccgggcggacgaggaatagaaaaaggaggcctgcggctttaccgcaggcctcctttgtatgtttaaaagtgttgcgcccctttgcggtattcgatgtggagctgtccccggcccagggggatgtccagagcggagggccggggggccggggcgctggaggcccaggcggtgtcccgcaccagggcgtccatgcggaagacggacaggagcaccccggccagggcggcgtccaccaacaggaagaagacgccgtaggacaggaaggggagggagagcacgcccagcggccaccagcccaggttatagagccagtagatggccgcctggaggaacaggggaaggaaggccgacagggcgaggagcttgcccgtgcggctgtggagggcgcggatgcgccggagcagcagggcggcaaagaggacgatcagcccggcggcggcccagaacacccaccggcccaggccctgggcggcctccgccagcaggagctccgaggaggagcctacaaaaagggagggcaattcccccatgcgcagtcgctcgtaaaacaggtcgggccccaggaaagcgtctatgcgccaagcagcgtactccaggtgccgcaggaagagcagggggaggatagtcagagcgggccccagggcagccagcagattccaccgccgctttccccggaaccagcccagccccacggccgccaggagtaccagcagcatactggcctcgctgaccagccaggaggcggaactgggagccagccaggcgaagagggggagcgccaggacggcggccccgcagagcaggacggcaagcggccctttgccccgcagggaggccacaagggcggcgtaggggacggggaggagcagagtggaatagagcgcaagctgataaccgggataggagtagaaggggagaagtggagtgcagagaataggacccagacagagaaggagcagcgccgccgccggagcccatttccgccgcagaaggagggtgtagtcggaaaaccagagtccggtcaaaaccccggcggccagcagcaggcccaaaacctgccgccggaagtagaagacgtccttggcgtcccccatgagcccggcggcgaagagctggagcagcacgcccgcggcaaagagggccgccacagtgatcgccagcccccagcggttccgggggcggtgaaggcggtccagctcccggcccaccgcctccggctcccccatctcggccaccgcgccggccagggcctcttccgggctccggccctccgcctcaaaggcggcggcctgatcggcaatatggtcggacagctcccgcaggagaacccgccgggcccgccgccagcggatctggccgcccaccgtctccagatattcgttcacgcactcacgcgccacagggattccctccctccagcacgccgcgcaccgcgtcggcgtaggcgtaccagcccgcctgctgttcagccagggcggcccggccgtcccgggtgatggcgtaatagcgccgggtgcggccattggcaaccccgtcgctggaggttacccagccctgggcctccagggagtggagcaggggatagagggtacccgccttgaggtggaacacctcgttggagcgcgcccgcagggcctcgatcatctcatagccgtacatgtcccggccctccagcagggccagcagcagcatgcccatgccgcccggagcggtgcggtcatttgccatattcctcacctcataaatagattatctatgtatagtatagatagattgtctatctatgtcaaggaaatcttcaatagagctgggatgggcgtccggagccgcaggcaaaaagcagccccctccgaccggagggggctgtgccactgcttcaggagaggaggttgaccaccaccatcactgcgcccaggatggtgagcaccacgccggtgacccggttaagggccttggcggaagcccggttagcaaagacggcggcaattctggcgcccagaagcgtgaccaccacacacaccgtcagggcaaatacatccagcccgccgccgatggccacgtgggagaccgcgccggtgaaagcggtgaaggtcatgatgaacacactggtacccacggcggtcttgagttcatagcccagcacggaggtgagcaccaggagcatcatcatgccgccgccagcgccgataaagccgcagatgaagcccaccacgctgccgcaggccagggactccgcgatgcggcgcccgcggctcttatgggcggagctctccttggtggtcatcacgggacgcacaatgaatttgatgcccaacagcagggtcatgaacacggagaagccgcccatggtggcgttgggcaccagggaggcggcccagctcccgatcagggtgaataccagcaccgccgccagcatgaccagcccattgcggatatccagattcctgtttttgccataggtataggccgaggccgctgaggccagcacgtcggaggccagagagatggccaccgcctgataggcgggaaagcccaggaaggtgatgagcatgggggagatgacggcggcggcggacaggcccgccaggccggttccgatgccggcccccaggccggcgacgacgcagacgatgaacttgacgagcatgacttggcctcctttgtatacctaatttattataatgcgaaatattatgttgtcaagaattcctttacaggccggcgtccgctgccgtataatgggagcagcaaggaagtgaaccgacatgaaaactggaatcgttctggagggcggcgcggtgcgcaccattttctccaccggcgtctgcgacgccctgctgacgcgggatctgctgccggattatgtcatcggcgtctcagccgggattgcctatggcgtcagctatgtgtccaagcagagccgccgcaacctggacattatggtaagctatatcaacgacaagcggtatatgggcttcggcaacctgctccggcgggacaaccgggcctattttggcctggatttcgtcttcggtaccataccaaacgagctgattcccttcgactatgacacgtttgccgcctatcccggcgaggtggaggcggtggtcaccaacctggacaccggaaaggcggagtattttccggtggagcgccgggatgaccggtttaagctattgcaggccacctgcgccctgccgttcctcttccctgttttcgatatccagggtaagccgtgtatggacggcggagcggccgacgccatcccctatgagcgggcgctggagagggggtgcgagcgggtgatcgtggtgctgacccgggagcggagctacgtccggcggccggaaaagctccagcccctcatcgacgcggcctaccggaagtaccccaggttctgcgataccatgcgccgccgggcggacacctacaacgcctcccgggagcggctgtttcagcttgagagggaggggcgagccctcctgttcgccccacacagcacggagggctttcaccgcaccgaaaaggacgtggagaagattcgggcgctgtggaaggacggctatgacgagggcatggagcggctggacgaggtgcaggacttcctgagcggctcttgagcttacaagaagcggcgggcggcgcagaggcgccgcccgctatggattttccagcgccgcccgctgggccaggagcaacccgatggcgtcccccagcatggtgaagaaggcgccgagcaccgctgcctgggcgtcgctcttgcccgcggtgagctggatggcggccagtgcggcgatggccagcagcgcctcgccggacggcccggagctcgcctgcatcccaccaccccctggatcagcatatgggcggcgaggccgccctgtgcgggaaatgcgcaatatcatgcaagaaacaggcggagggacgtgctatactgcttttatctcagacagaggagtaccctatggaacaggaattgcggcgcgtgtactacgatccggagctgggagtggaggcatgtctctttcagggcatcgaccaggggtttccggagcattttcacacctattatgtcattggaaccatggatcgggggagccgggaggtgaccatcgcgggggagacccgccgccttgcccccggtgagctggtattctttcagcccggcgagccccatgcctgccgtccggtgggggaggagcgcctggactggcgggggctccacgtgccgcaggaggtcatggagcgggccgctgaagccgtcaccggccgccggtttgccccccatttcacgcccccagtgttgcccgggagcgaactgaccagtctgttccgggaggtatgggagctggcggcgggggagcagggggagctccgccgggaggaggcctttctcctgctggtgggccgcctgctggagcgatgcggcggctgtccccggccgccggaggaggtgcggcctgaggtgcgggcggtgtgtgactatctggaggcccactgtgaccggcgcatcacgctggagcagctctccaccctggcggggctgagcaagtaccaccttctgcgctgcttcacccgccagaaggggatcaccccctaccgctatctggaaacggtgcgggtgaaccgggccagggccctgctggagcagggggccgccccgctggacgcggccctgcgggccggctttgccgatcagagccacttcaaccactttttcaagatcctgaccggcctcacccccagccaataccgggccgtgtttgcggcggaacagggggagatgtgaaccgggggggcatgacggggcacgccgcagccctgctgaccatcttcctctggggcaccacctttatctccacgaaggtgctcctgaccggcctgcggcccgtggaggtgctgttcctccgcttcgccctgggctttgcggccctctgcctgctgtacccccggcggctccggctggccgggcggcggcaggagctgtggttcgcggcggcgggcctgtgcggcgtcaccctctatttcctgctggagaacatcgccctgacctgcacgctggcctccaatgtgggggtgctggtgtccgtcagtccgatgctgaccgccctgctctcccacttcctcctgcggcgggagcggctgcgccccctctttttcgcggggctggccgtggccctggctggggtggcgatggtgtcgtataacggcgccgccgtgctggagctgaaccccagaggcgatctcctggccctgctggcggccgccgcctggtcagcctactccctgctgacccgcaagctctccgccttcggctacccggtggtgcagaccacccgccgtacctttgcctggggcctgctgttcctgctgcccgtcctgccggtgctgggcttccggcccgggctcgggactctgacggagccggtttacctgctcaacctgctctatctggggctgggggcctccgccctgtgctttgtcacctggggctttgccgtggggcggctgggggcggtcagaaccagcgcctacatctacctggtgccggtggtgactctggtcacctccgcgctggtgctgggtgagccggtgacgcccctctcgctggggggcgcggcgctgacggtggccggactggcgctgtcggagtgggagccgcgaaaggaggggcgtaagggcggagctgagtgagttcaagtgcgccctggtaccggacgagtggcttctgcccgcggggaacaggggcgctgttatggcgtcgaccctgggtgggcccccaaagcggatcaaccgtcccgctggcagcctgcccctgttccaataagacgaaaagaggattccgccgggcggaatcctcttttttatgtgcggctcagccggcgctccaggtgggccaggaaggcggcgggctcccggttgagcaccagctcctcgggaaagtccagctcgtccagcagggcctgggcatattgatggccgcccacggcggagacaaagtgggcatcgctgcccaccaccaccggtacgccctcccgccggcagtgcttcagcatctccgtcacgttggcggtggagtttacccgggaacaggcgggggagagggaggtgttgttgacctccagaagcacgccgcgctccccggcggcccgcaccagcgccggatagtccaggggatagcggccgtcgtctgggtgtcccaggatacagatcttggggcagttgtccatggcgcggaccatggccgctgtattctcctccggtccgccgccctggggcatgcaccagatatgctggctggcgatggccatgtccagattgttcagcagcttgggggagagatccaccgtgccgtcaaagtccatcacgttgagctccgcgcccatcatgacccgtacgccgtagatctcccggtcgatgacccggaagttgagaaagtagtccttgtgggtggttagctccatgccgggggcgtggtcggtgatgcagatgagctccagcccccggtcggccgccgcccgcaccatctccagcagggtgcagtaggcgtgcccgctggccaaggtatgggtgtggctgtccagtcgaaattccatacgttcactccttttttcccatctatcatacccaaaatgatggaaaaaggcaaggggccggacagaagcctggccccttgcgcgtcagataccgtttccaccgttccacttccagtcccggatttcgggcatgtcctggccgtgggcggtgatatactccttgtgctccaccagcttgtccttcatgagctgaatgaggaaggccccccggttgcccaattggggcagccgctttaccgtgtcgatgaccagattgaagcggtcaatgcggttgagcacccgcatgtcgaagggggtggtgatggtgccctcctcccggtagccaagcacgtggatgttcttgttgtgccggcggtaggtcagctcgtgcaccagggaggggtagccgtggaaggcgaagatgatgggcttgtcccgggtaaagatcacgtcgtaatcctcgtcggtgagcccgtgggggtgggcggtgtggggctggagcttcatcaaatccaccacattcaccacccgcagccgcacctcgggcaggtggcggcgcaggatggtcaccgctgccagggtttccagcgtgggggtgtcgccgcagcaggccagcaccgcgtcgggctccgccccctggtcattggaggcccactgccagatgccgatgccgtgggtacagtgcttgatggcctcgtccatggtgagccactggggccgggggtgcttggaggccaccatcacattgacgtaattccggcttttgatacagtggtcaaagacggagagcaggcagttggcgtcagggggcaggtagagccgcaccacgtccgccttcttgttggccacatggtccaggaagccggggtcctggtgggtgaagccgttgtgatcctgctgccacacgttggaggacagcacgtagttcagggaggcgatgtcctgccgccaggggagctgccgggccaccttgagccatttggcgtgctggctcaccatggagtccacgatgcggatgaaagcctcgtagctgttgagaaagccgtgccgcccggtgagcaggtatccctccagccagccctggcacatgtgctcggagagcatgctgtccataatgcgcccgtcggcggacaacccctcgtcggtggagcgcagctcggcgttccagcggcggtcgctggcttcaaaggcggcggtgagcttgttgctcagggcctcgtcgggggcgaagatgcggaagttgcgggccttctggttgagcttgagcacgtcccggacatacttgcccagctccgccatgtcctccgccaccgcctcgccgggggcgggcacctccaccgcgtagcgggtgaaggagggggtgcgcagatcccgcagaagcatgccgccgttggcgtgggggttggcgcccatgcggcgctccccctggggggccacggcccgaagggcaggcaccggcgcgccctcggcgtcaaagagctcctccggccggtagctgcgcagccagcgctccaatacctccaggtgctccggatgggcggcgtccaccgccaccggaagctggtgagcgcggaaggtgccctcggtgggcgcgccgtccacctccttcggacaggtccagcccttgggagagcggaacacgagcatgggccagcgggggcgggcggtctcgccgaactcccgggccccctgctgaatgcgctgaatctcccgcaccgcccagtccagggccgcggccatcttctggtgcatctgggcgggctcgtccccctccacaaagcggggggtccagccgcagcccttgaagaagtcctccacctcctctgatgtgatgcgggagaacagggtgggggaggaaatcttgtagccgttgaggtggaggatggggagcaccgccccgtcggtgacggggttgaggaacttgttggaatgccaggcagtggccagcgggccggtctccgcctccccgtcacccactacgcaggcggcgatcagggtcgggttgtccatcaccgcgccaaaggcgtgggccagggagtagcccagctcgcccccctcgttgatggagccgggggtctcgggggcgcagtggctgccgatgccgccggggaaggagaactggcggaacaggcggcgcataccctcctcgtcctggctcacgttggggtaaaactcgctgtaggttccctccagataggtctgggccaccaccgcgttgccgccgtggccggggccggagacatagatcatgttcagctcatggcgtgtgattacccggttcaggtgggtatagataaagttttggcccggcaccgtgccccagtggcccaccagggtgcgcttgaggtgctcggggcgcagcggctcccgcagcagagggttgtccagcaggtagagctgtccggccgccaggtagttggcggcgcgccagtaggcgtccagcttgcggagcatgtcgggggtcaaagggccctttttggacatgcgggtggaggttttaacgatcaccttcgtcttttccttgggggcttttgccaatcgaatgacctccttgtgtcggcttttgtactgcttattataaccgatgggactatactgtcaatagagtggggtcaaaatccctcttaaaagaaaaaaccgggccggaagcagcggcttccggcccagaggggaggtggtatttattcctccataccggccagccggccccgtgcggtgcggcggtagagcagcagggcggtgaagcaggcggccccctcggacaggaggaaggccagccacaccagagagggccggagcgcgcccagcagcagggccagcgggaaaaggagcacaagctggcgcagcagggaaaccaccaggctggaattggccgctcccagggcctggagggcggcacagaggatcaccgacaccccggcgcatacgaaggagagggcaatgaggcgtagggcggagataccctcggccagcacggcggcatctgcgtcgaacagacggaggagagggccggggatggccagaaaaaccacggtgcccacggccatgatggcggcggagagcaccagggcgaaatggatgaccccagtgatgcggctgcgctgccgggcgccgtagttgaagctgacaatggggatgagagcgttgttcaggccgttgaccggcatgaagaggaaggactggagcttgaaataggcccccagaatgaacacgccggaggcggtgaacagtgggaggatcagattcatgcccaggttcatcaccgtggccagggcctgcaccaggatggcggggacgcctacacgaaacatggtgcggatgatggcgctgtccgggcggaagccccggaaggagaggcgcacgatggagctgcgccgcaccatacacagccccaccaccatgcccaccacctggcccagcacagtggccagcgcggcgccggccacctccatccgggggaaggggccgatgccgaagatgaggagggggtccagaatcagattgatgaccgcgccgatgccctggatgaccatagggcccacagtgttgccggttgcctgaagggtgcgctctccggcaaactgcatgcagatgccgacggaggccccagtgacgatggagagatattggatgccgtagtcgatcacctggggctgcccgggggcgaagagctccataaagacaggagccaggcccacccccaggaccagaaagaccacccagcagaccagatagacgaagtagccgttggccactacccggttggcctcgtcgggccggtcctcccccagccggcgggccagcaaggcgttgaagcccacgccggtgcctacgcacacggcgatcatcagggtctggatcgggtagacaagcgccagggctacaaacccgtcggagctgagctgggccacgaacatgctgtccaccagattatagagggcctggatcagcatggacagcatcatgggccaggccatattcagcagcagccggcgcaccggtatgaccgccatcttgttttcctgcaaagcaattcctcctgatcaaaaaagacgggtaccgaggacgcgcctcgatacccgtctgccgcacggcgtggcagcccgtgcggctatagctgtttggtgtagcgcagatccacgcaggtcatgtcgtgggggaagggaatgtgctcctccgtcccgtcccaggcaaagccgtgccgggcgtagaagcggcgggccccctcgttctcccgcaggacaaagacgtagcagttgaggtagccgtcggcccggagacggcgcagcgcctcctccatcagcaccgagccgtagcctcggccggtgcaggcggggtcggtgtagaaggagatgatctctccccagccccggtaggcctcgccgtggatcaccagcccctcgctctggcggggactgggccccagccgcaccggtccgtaggtgcagcagcagacgggagtatccccgtcgcagagcaacaggccccggcaccgcccggtggcgtagtcctcccggaaaaagggaatccagtgatcctcggtgatcacgtccctcaggtagtcgtcgggcacgtggccggggtaagcggcgtgccagccccgggcgtgaatgcggctcatggccgcaaagtgttcctccgtgcaggcgtctatgatgcgcagtgaattcataagcagacctcgtttagcgagtggatgagccgcccgcgccgggtggcgcgtacaagcgttttgccggaggcaaaaccttgatgccgggcgaattcagttcgcccgcgcagataaaaaatcggggcccccgcccggcggaagccgggtggggaactgcggctcatggccgcgaagtgctcttccgtgcaggcgtccacaaaggagagggccttacacatgagcggcctccccagcctcccggcgctccgcctcctgcttggccaggccccgggcgttggccagcatcagcttgatgcggttttcctgattgatcttggtggccccgggatcgtagtcgatggccacgatgttggagaagggatagtcgtccttgagcttgcggatcatgcccttgcccacaatgtggtttggcaggcagccgaagggctgtgtgcagacgatgttgggggtgccggagtggatgagctccaacatctcggcggtgagcagccagccctcgcccatcttgttgccctcgcccagatagccctggatgaggcggcggagatcctcgaaggtgccgggagcgcggaagccgcccttcttcatggcggcgatcatggcccgctggcacttctccacatagcccttgagcacttggcacacctttttcttcacccacttgccgccgtagatgttcacgtccacctcgcggttgtagatcttgaagatgatgaagtcggtcaggccggggaccaccggctcggccccctcggacaggagaaactcctccagattgttgttgcccaggggggagtatttgatgtagatctcgcccaccacgccgacccgtaccttgggctccccggccacggggatggccttgaaggcggccacaatgcggtcaaagttggccaccatgctcttgaaggagaggcccttgccctggttcatggcctccagaagctgagtctccacggcctcgatggtctcgtcagtctggccccggctgacctcgtaggggcggacctggttggcggtctgtacgatgatgtcgccgtacatcatggcgaacaccgccttgcgcagggtgttgagccccaacttgaagccggggttgggctccaggcccgacaggttgaccgagatgacggggatatagctcagacctgctttctccagcgctttgcgcagcagatggatgtagttggaggcccggcatccaccgccggtctgggtgatgagcagcgccaccttatgcatgtcgtacttgccgctcttcaccgcgtcgatgagctggccgatgaccagcagggcggggtaacaggtgtcgttgtggacgtacttgagcccctcatccacgatgccccggtggttggtggtgagcatctccacgtggaagccctcggtctccagaatccgggccatcaggccgaagtgcaccgggagcatggtggggaagaggatggtgtactcctccttcatctccttggtgaacagcagccgtccgttttcgtcgtatactaattctgccataacgggtattcctttcgcttgcaatgggagcgccgcgcgctcaaagggggttggcccccaccgactcccgagccggcggcgagctggccgtcaatgacggcatcaaactcctgttgtgctataaaaagtcgggatggtcagccccgggcatcctgcgcctggcgggcctccatggcggccatcagggagcggatgcggatcttgaccgcccccagattgctgatgtcgtcgattttgagctgggtgtagagctttccgcccttttcaaggatgtcccgcagctcgtcggtggtgatggcgtcggtgccgcagccgaaggagaccagctgcaccacctgcatgtcgggctgggtgcatacatagcgtgcggcgttatacatacggctctggaaggtccactggttgagcaccttccggggggcatagccctccagatagctcagagcgtcctcggtgaccagcacgaaaccgaaagaggtgatcagatcgttgatgccgtgattgatctccggatcgatgtggtagggccggccgcaggccacgaggatgggcatgtggtggtcccgggcgtggcggatgtacttcatgccgatctcccgcacgtcgtggacataggcgtcgtaggccgcgtaggccgccttggccgccgccgcggtctcccgcctgggaatgctgaaatgctcctccatgagctgggcgatgcgcttttcaaagtccttgtgccgccacaggcccacgtaggggttgaggaatttggtctgcttgagcaggggaacgttggcggccagcagctcagggtagtaggccaccaccgggcagttgtagtggttgtcgccgatgccctcgtcgttgttgtaggacatgcaggggtaccagatggcgtccacgccctcctccaccagggcctccacatggccgtggagcagctttgcggggtagcacacggtgtcggacgggatggtgtgctggcccttgaggtagagcttgcgggaggactcgggggagagcaccacctcgaagttgaggcgggtaaagaactcgaaccagaagggcaggttttcatacatgttcagcccgaaggggatgcccatgcggccccggacgccgtttccgctccccttgccctggagggcgcggagcttcttgtacttgtaggtcatcagatcggggttctccacctttgccttgcccagggggcgggagcagcggttgcccgagatgaagcgccgcccgccgtcaaaggtgttgacggtgagggagcagtggttggtgcacaggttgcaggtggtgggcttggcggtgtgggagaaggactgtagagcctcctcgctcaacagcgcgcttttctccagatgcagatccctggcgtagagggccgcgccgaaggcgcccatgatgcccgagatggtgggccgggtgacgttgcggcccagctcctgctcgaaggcccggagcaccgcgtcgttatggaaggtgccgccctgcaccacgatgtgctggcccagatcgtcggcgttggcggcccggatgaccttgtagaccgcgttcttgacgatggagatggacaatcccgcggagatgtcctccacgctggccccgtccttctgggcctgcttgacgctggagttcatgaacacggtgcagcgggagcccaggttgaccgggtgcctggccagcaggcccagcttggcaaagtcggcgatggtgtagcccagggccttggcaaaggtctcgatgaaggagccgcaaccggaggagcaggcctcgttgagcatgatggagtccaccgcgccgttgcggattttgaagcacttcatgtcctggccgccgatgtcgatgatgaagtccacgtcggggttgaagtggcgggcggcgctgtagtgggccaccgtctccaccagcccggcgtcgcaggagaaggcgtttttaatcagatcttcgccgtagccggtgacggccgcgcccttgatggtgatgcggttgccgcacagcttgtagatctcccggagctgctccagcacgatggccaccggattgcccaggttggagtggtagtaggtgtagagcaggccgccgtcggcggtgatcagcgcgattttggtggtggtggagccggcgtcaatgcccagccaggcggcgccggtgtaggtgtgtatgtccacctcgggggggtgcatagcgttgtgacgggccaggaaggcgtcgtactcctcctgactgtcaaagagggggggcatggtgtccaccaggcccacgctgtccacgctcttctccagccggtccagcacctcgtcaaaggagcgctcgccgtagtcggaggagcacagggccgcgcccatagcggcgaagcagtcgccgtcctcggggaacacggcgtggtcggcgtccagcttcagggtctccacgaaccgctgccgcaggcccatgaggaagtggagggggccgcccaggaagacgatcttgcccttgagctcccggccctgggtgaggccggccaccgtctgatccaccacggcctggaagatagaggccgccacgtcctccttccggccgccctggttgaggatgggctggatgtcgctcttggcaaagacgccgcagcgggaggcgatggggtagatcttctcgtggcgcaggctcagctcgtccagctcgttcaccgtcacgttcatgagggtggccatctggtcgatgaaggcgccggtgccgccggcgcaggagccgttcatccgctcctccagcgcgccgccgaaaaagatgattttggcgtcctcgccgcccagttcgatgaccgcgtcggtgtcgggtatgtactggttgacggcggcggcggtggcgtacacctcctgcacgaagtcgatctccgccgccttggccacgcccaggccggccgagccggtgatgacgatgcgcacctgccggccggcgagccggtccgccagagagcgcagagtctcggcggcccgctcccgggccttggagtagtgccgctcataggagcggaacagcagtttgttttgttcgtccagcagcaccaccttgacagtggtggagccaatatcaatgccaatacgaaggctcattcgattcaccttatatcctttatcagaattcgtaccgtacataatatatcaaaatttgattttttacaaccccaaagcggcgaaatacaggatgttccgtagtcggaaggaatctccgtcggattctgaaatgctgttgacaaataatattatacagaatataatattggtgaaatgaaaggaggcggcgtcatgacctttccattgggtgctcccctgttggatgcctgcgtgctggcggtgctggagaaggaggacgcctacggctacagcctgacccagcggatgaaggaggtggtggaactgtccgagtccaccctctatccggtgctgcggcgcttgcagcagagcggatgcctgacggtgtatgacaagcccttccaggggcgcaaccggaggtactacgccatcaccccggcggggcgggccctgctggcggggtaccggaaggagtgggcgcgctatcgggggcagattgaggaacttttgctggacgaaaaggaggagcggcatgaataaggcggaattcctggcgggcctgcgggacgcgctggcgggaaagctcccgtccggggagctggaggacgtgctgtcctattatgaggagtatttcgccgacgcgggtgaggagcatgaggcggaggcggccgaggggctggggtcccccgcctccgtggcggcccaggtgctggaggggcggacggggcaggcgccctccgcagcgtccgccgaaaggcggccgaggcggctttggcccgtcgtactcggcatctgcgccgccgcgcttctgctcctgggcgtgggcatcaggctggtattcctggcccaacggatgcccgacgcaccggcggcaggggaacggcagccggttgcggcaggacaggagcctgtggtggtggagcaggacccggtttccacaccgccggaaaacaagttggagctggagccctttaccgccttagacatcgatgtgggcattggtgatatccgcatggaggagggggacggctggtatctgagtctgaccagcggtggccaagacggagacggcacaccttaccggctgaaccacagccagagcggtgacacgctggagatctggagcacaccggagaatatatcgggtgacggcagcccgaagggcgaggtggtgctcaccgtcccggagggaacggtgctcaatcgggcggagatctccataggtgtgggcgcgctggactggagcggctgcgccgtggagggcctgctgcgggccgagagcggcgtgggcgggctggatgtgacggctccggtgggggaggccgagctgatctccggcgtgggcgacgtggccctgagagcggcgggaagcggggcggactacgcctaccagttgaccacgggcaccggcgaacttcaggtggacggggagaaagcgggccccttcttcgcgtccggcggcgcgggggacagggtactgactctctccagcggcacgggggacgtgtgcctggactttacagacgaatagccctttcatggaattttaatgttttttacggttgcggattaagaaaaacgtgttatgatctctccagactcgaacgagaggacggagcatatgacacgagaggagtatctggcccagttgcgggccctgctcacggggcggacgccgcccgacgagctggagcgcattctggcctactacacggaatactttgacgaggcgggcccccagggggagggacgggtgatccgggaactgggcaccccggccgagctggtgggccgcgtcctgggagcacagcggagccggacggttccggcggagcgggattgcccgccagagggcaccgcccgggagcggcacggcttgggtacactgtggaaggtgctgctggccatctgcgccgcccccatcgccatcccgctgatcctcgtggtggtggcgatggtattgggccttgtcgtcctgatcctcgccctggtggccggagtggccgtgggcggggtggtggccatcggggcgggggtctttaccgcctgcgcgggcttttcagtgctgttcagcgcgggcctgcccaccatgatgttcttctgcggcgtcggcctgctgtccagcggcgtggggctgctcctcatcgcgggcagcttcctgctggccgggctgtgcttccgcggcatggcggcgctgctgggccgctggctgaatcgaagggaggtgcgggcatgaacatgccggcaaaggtatgcctgggggctggtgccttcctggtcatgtcgggggggttgctggccatcacgggctttgccatgggggcacagacccacctggacctcgactggggcagggcacataaaagcgaaacgccggtggataccggcgctccccatgtggaggaggggacggcgctgccggccttctcccggctggacgtggatgtgagcattggggacgtg

SEQ ID NO: 4238 - DNA, 287 bp, Unknown
  gut microbiota DNA sequence
gaagcgattatttccgaagatgtgttccgtcaagtacaggagcagatttgcaacaggcgcagacggcagaagaacggcacaacacagatattttccgggctggtaaaatgtgcggactgcggctggtcgctggcctatggtatgaacagccagaacaaaaatccctatgcccactaccattgtagcaagtacgggcaaggattgcaccagtgttccatgcactatatccgctatgatgtgctttacgcctatgtcctttcccgtctgcaatactggtctgtgctggc

SEQ ID NO: 4239 - DNA, 1321 bp, Unknown
  gut microbiota DNA sequence
cgctgaaaaagcagcactacataacctattccaaacttggccggggaaaccttataaaattttcaattatcggctggaaaacctcaaataccgcgttggaatataattacccatgtctgaaggacgtgggctttttctttttcccgatagcagccgctcatgaactcatcagcttgggaaaagcgtccgaaatggatattgttctggacttgtggctccataccatttatcaggacagccaggtgcaaggctccgataaaggcccggtcgtatatttccggaatggaaccggaaatccgcttaccaatttttcagacctggcgctccgctggggagtatcaaaatctacagtaagcagaattttcaacaaactggaaaagttagactatctctccctgatctcctttcctggcagacacgggagcgtcatctacctaaataactacctgtcaacaatgtttcaagtatcagatgtcatgattgacaaagaggaggtttctatggcttttaatattccattacatattccggctgccagcctggaggcagacacatcgcctatccgggatgaacagatttgcgttccaaacgaagaaaatagcgtttcaaaaccgcacatgcgggcgatggtccgaaaagtggcaaaagtccttgctacacaagggattccatgctgtgagtgttccagaactatatataagttatatcccttatccgactgcatggaaggtaattataggtattctctaagggtcatatgtccggacggccgggaagggtatcactttgaactttgcctgtcaccggtacgaaccgatgatgaaatggccggaagaaaattcactggaggacagcgtggaaaaaatcaattcatgggaggacatgtcaatgcgtaaaaaatcatctatccaaaatgagacacctgtaaacaaggacagtgccatatatcacgataccagtaagctactggaaagttaccgggatgcggtgtggaatctggaattggccgttcagcaggtccgccatagctttgaaattgagtttggcagctcgattgaggagtttctggactccatttatctggccggggccgatgtgggcggctccaaactggaggaatacgctaagagcattgagagaagcaacaaaatgctcaatacgctcatggctgccgtggatctgctccggacaaagcataagcacggagagcaatactactggatactgtactattcctatctttctccccaggagctacagaacgtagaggaaattattgaaaagctcaaaccgcatattgccaacatatcgcagcggactt

SEQ ID NO: 4240 - DNA, 121230 bp, Unknown
  gut microbiota DNA sequence
aagagcaccgcggaagccaagcttccgcggtgctcttgcttgctttttatgcctgaatcgaatctaccagggcgtcggccagggcgtccagctccacggccttgtcgtcggagagggaggaggccatactcaaccgctcgttgaggacgatcatgtttttcatctcctcatcgatgaacttctgcatgagatctccggacttgcaggcccaggagccgttctcgataagggcgaaggtgcggttctggaggttgagggccttcatgtcctccaggaagttcttcatcaccgggtagatgcccaggttataggtgacggaggccagtacgatatggctgtacttgaaggcttcggagatcaggtaggacacgtgggtgttggacacgtcgtacaccgacacattggtgatgcccttctcacacagcctggcggccagggcctgggcggcggcctcggtgttgccgtacatggaggcgtaggcgatcatgacgcccttttcctccggctcatagcggctccacttgtcgtacttgtcgatgaagtagcccagatccttgcgccacacgggcccgtggagggggcagatgaacttgatctggtccagaatgccggcggccttgcccagcagcagttggatgtgggggccgtacttgcccacgatgttggtgaggtagcggcgggcctcgtcaatccagtcccggtcgaagttgacctcgtcggcgaagagcttgccgtccagggcgatgaaggagccaaaggcgtcggcggagaagagcgcgccgttggtggtgtcaaaggtgaccatggcctcgggccagtggaccatgggggcacccacgaaggtgacggtgtgcttgccgaagcagtgggtgtccccctccttcacctcgacacactcgtgctcgtcggggtggaagccgaactgccgcatgagcatgaaggacttctcggtggagatcaccttcaccttggggtagcggcggaggatctgctccacgctggctccgtggtcgggctccatgtggttgaccaccagccagtccaggggcttgtcgcccagcaggtggtccaggttgtcctggagctggcggtaggcggaccagtctaccgtgtcgaagaggacggactgctcgtccagcagcagataggcgttgtaggaaacccccctggggatggggtggatgttttcaaacaggtggagccggtggtcgttggcccccacccaatacagatcgtcggttaccttgcgcacgcaatacattgcgattcctccttctgttcgttaggcctcaatgaactggtccttgccctcggcgcactcggggcagacccagtcctcgggcaggttctcaaacagggtgccgggggcgatctcggcgtcctcgtcgcccagctcagggatgtactcatagccgcagccgccgcagacatagcgcttgccgatgggctcgggcttgggggcgggaggccgcttcatcttcaccatggggggcgccggctgcttctcaccggtgtccagggcggcggccagcaggggcaggatctcgttgacatcgcccacgatgccgtagtcgcagttcttgaagataggggcgttgccattcttattgatggccacgatggtggaggcgtccttgatgcccttcagatgctgggtggcacccgagataccgcaggcgatgtataggttgccggtaaacttctggccggacatgcctacatagcggctcagaggaacatatttgagcgtctcggccaccgggcgggaggaacccaccgcggcgccggcagctttcgccaggttctcaatgagcttcatgttcttcttgtcgccgatacccttaccggcggaaaccacccgctcggcctggttgatgggggtgtccatggggatgcccacggtaaagtcgtgtccgtccttcttcagtgcctccaccagggcggccaccttgtcctcggacgctccgtcccggaaaagctggcgcttgcgcacgccggtgatgggggcgggctttttggctacagagcggctgccgccgccgctgcccttggagattttgccgatgagatgggaggcaatcaccacccgctgaatctcattggtgccctcgtagatggtggtgatcttggcgtcgcggtacatccgctccacgtccatacctttgaggaaaccagtgccgccgaagatctgcaccgcgtcgttggtgacctccagggcaatgtccgaggcgtacatcttggccatggcggactccatgccgtagggctcgtggtgctccttcagctcggcggcggagtagatgaggaaccgggcgcagcgcagcttggtggccatgtccgccagcttgaaggccagggactgctgggcggcgatgggcttgccgaactgaaccctctccttggagtactccagggcggactcataggccccctgggcgatgcccagggcctgggctgcgatgccgatacggccgccgtcgagggtggccatggcgattttgaagccgtcaccctccttgcccagcaggttttccttgggtaccttcacatcattaaagatcaactcagcggtagaggaggaacggatacccatcttgtcatagtggtcgccaaactcgaatcccttccagcccttctccacaatgaaggcggagatgccccgggtgccgatgtccggggtggtgacggcaaagaccacataggtgtccgccttgggggcgttggtgatgaagattttgccgccgttgagcagccagtggtcgcccttgtccacggcggtggtctcggtgccgccggcatcggagccggcgttgggctcggtgaggccgaaggcgccaattttttcacctctggccaggggcaccagatatttcttcttctgctcctcggtgccgaaggcgaagatcggccaggagccaagggacacgtgggcggacagaatcacgcccgtgccgccgtctacccgggacagctcctccacggcgatggcgtagctaatggcatccagccccgcgccgccgtactccttggggtaggggatacccatcaggcccagctcccccagtttttttacggcttcggccggaaactcattggcctgatccagggagaaggcgatgggcttgacctcctcttcggcgaaggcgcggatcttggcgcgcaactgttcatgcgcttgggtcgtctggaacaacatgttgcttcctccttacacataattaaaagtggataaaattagtccaatttgtaggcgaaaaaatcagtctgccggacccaaaatgtcctccaaagtgtgggccttcagttccgcattcagcttttcctgaatgcctgtcagatggcagtgaaccgtacagccgccatggctggcccgccagggacaggaataggtgggatccatacaactgcttaggcgggaatcctctcccatagcggtcatcaggtcgtagagagtgacccggttgagctctgccgacaggcgacagccaccttcggcgccgcgggctacttccacaaatccggccctggcaagctttttgagaatcttgtgtgcaaaggactgggggaccagctcccgctccgccgcctccgccgctgtacggcgctccccatcccgcagggtgcgcagcaggcgcagggcataatcggtttcgcgggtaatcacagccgctccactcctttctgattggtctggctacaacatatcattttggataaagtttgtcaagtataattttccaaaatcgtcacaatgtaaaaaaacgcgcggcatgttttggcatgccgcgcgctgaggtcaggattttcagcccagcagatggatgctggtgatcaggccggagaacacaatggaaacggtggagcacagcttgatcaggatgttgagggagggaccggaggtatccttgaaagggtcgcccacagtgtcgccgatgacggcggccttgtggcagtcggagcccttgccaccatgggtgccgctctcgatgtacttcttggcgttgtcccaggcgccgccggcgttggacatgaacacggccaccacgaagccggtgacggtgacgccgcccagcaggcccaccacggcctctgcgcccagaatcaggccggtgaccacgggcactacaatggccagcagggaggggaccaccatctcatgcagagcgcccttggtgcagagatccacacaggaggcgtagtcggggtcggccttgccctccatgatgccggcgatctccttaaactggcggcgcacctccaccacgatggactgggcggcccgctgcacgccgctcatggtcagggcggcgaagaggaaggtgagcatggcgcccacgaacaggcccaccagaacggcggggttagtgatggagagatccagcgtgtccaccttgaccttcaccacgtccacatagctgaccagcagggccagggcggtgagggcggcggagccgatggcaaagcccttgccggtggcggcggtggtgttgcccagggagtccagggcgtcggtgcggttgcgcacctcctcgcccaggccgctcatctcggcgatgccgccggcgttgtcggccacggggccgtaggcgtcggtggccagggtgatgcccagggtagacagcatgcccaccgcggcgatgccgatgccatacaggcccttggagaaaagctcgccatagttggccgcattggtggtcagggaaccgccggcggccaggaaggagacgatgatggccacgccgatgatgacgatgggggcggcggtggacttcatgcccagggagatgccgccgatgatggtggtggcggcgccggtctcggtggagtcggccaggccctgggtgggcttataggtgtcggaggtgtagtactcggtaaaatagccgatggcgcagccggccaccagacccgccagaatggcgatgtaagggccccaggagcccatgatgtaataggtgacgggggcggcgatgacggcggccagcacggcggcggtgtaggtgcctttgcgcagagtagccagcagggacttctgggtggcgttctccttggtgcggatcaggaaggtgccgatgacggagcacaccacgcccaccacggcgatgatgaggggcagaagcatggcgttccaggtcaggccatcggcggcgtaggcggaggcgcccaaggcgaaggtagccagaatggagcccacgtaggactcatacaggtcagcgcccatgccggccacgtcgcccacgttgtcgcccacgttgtcggcgatggtggcggggttacgggggtcgtcctcggggatgccggcctccaccttgcccaccagatcggcgcccacgtcggcggccttggtgaagatgccgccgcccacgcggccgaacagggccatgaaggaggcgcccatgccgaacatgaccatggtctgggcgatctgggcggcctcaaaccctgcgatgtacttgagaatgtggaaccagatggacacgtccagcagacccaggcccaccacggtgaagcccatgaccgcgccggaggagaaagccacgttcaggccccggttgaggctctcatgggcggcgttggcagtgcgggcgttggcggaggtggcaatcttcatgcccacaaagcccgccaggccggaccagatgccgccggtcaggaaggcgaaggggataaaccagttgtccagcatcccgactcctgccaaaattaacaaaatgacgaagacaatgataaagatctttgcaacggtagtatactggcgcttaaggtaggcatttgcgcccttacggatggatgcggccagcttttgcatcagttcggtgccctctgagaacttgagcaccttcttggcttgggttaaggcgaagattaatgcaattaatgcacctactaagccgacccaaaacaggttttccaacaactttccccactcctttttttctttggaagccttgtaacacaaggcttccagcgttaagagacaatataatattaacgcaaaaaggggtgatttggcaagtatatcttaagataagaaagcgtcaaatcctaggatttgacgctttcgacaaaaacgaatgattggtttaagaacgcttccatgcatttctgctaaagagaacgagaacaggcagaacctccaggcgcccgatcagcatacacagggagagcaccagcttggagaagccggaaaaggcggagtagttgcccatggggcccaccagctccagtccggggcccacattgccgatgcaggagactacggcggtgaaggtggtgccaaaggagaagttgtccaccgacaccagcagcgtggcccccagggcgatgaaaagataggctgcaaaaaagagctggacggagcgcaggctgtcctcatctaccacccggccgtccagcttgaccacgttgacggagcgggggtgcaccacctgccggatctcccggcggatgcacttgagcaggagcagaacgcgggagcacttgatggcgccgccggtggagccggcgcaggcgccgatgaacatgagcagcaccagcagaatccgcgaaaactccggccacaggttgaagtcagtgctggcgaagccggtggtggagataatcgagcccacctgaaacgcggcgtggcgcacggcggagccgtccgccggatacatgggccagatgttgatggagatcaggagggtgctgaaagccaccacggccagaaagaagcgcagctcgtcgctgcggagcgcctggtgtaccttgccgcagagcagcaggaagtagagggcaaagttgatggagaagatcagcatgaagagcgtgatgatgacctcaatggcggggctttcataggccgcaatagacaggtttctggtggagaagccgccggtgcccgcggtggcgaaggagtgaaccaggctgtcataccacggcatgccggcgattcgcaggcagaagacctccagcagagtgagggcgcagtagatgccgtagaggattttggaggactggctggtcttgggtaccagcttgctcacaatgggcccggggctctcggcgcgcatcacatgcagggtccgtccgcccaggctgggcagcagggcgatggtgaggatcagcacccccatgccgcccatccagtgcatgaaggagcgccagaaaaggattcctctgggcaggggctccactgcggtcaagatggaggcgccggtagtggtgaagccggagaccgactcgaagaagcagtccacataggaggggaaaaagccgctgaaaaagaaggggagggcgccgaaggcgctcatcagcagccagatgagggccacggcgaaaaagccctcccgggggaaaaagtggtcgttgctgcgtatgagggaaagggcgagccccactgctcccgtcatggcaatggacaggaggaagggaaggggattttcgcggtagaacaggcagaccagcagggggaggagcagcgcgcctgcctctaccagcagggttttgcccgtcaacttgaagaccaggcggaagttcatgcgtcgcctcccagctccagaagggagtcctcaaagatgtcgttgagatccagaatcccgtggttgcgggatatgacgatcacggtgtcaccagcggcgatggaagaggagccgtcagggattacgatacggccctggtgcaccaggacggcgaccaggatgccaggcttcaggcgcagctctcgcaggggggtgtcccggtttcgggtggttgcattggccacaaattccatagcctcggcgtggccgtcggcgatcttgtagagggcgttcatgacgctgcccttggagttctgcataccgcgtaccacctgaagaatctgcccggcggtcagcagcttgggggagatcacgctgtccagcccagcggcgtgggcgatgccggcataattctggcggttggacttggccaccaccttgggtatgccctgctgcatggcgtagagggagataatgaggttgtcttcatcccggtcggtgagggctacgaaggcgtcggaggcggtcacatcctcctcttccagaagttcctggtcggtgccgtcgccgcagatgaccgtggccttgggcagtacctcgctgagatggcggcagcggtccagactgcgctcaatgatctttacgtgtatgccaagccgctccagaatggcggtgaggtagtgtgcgattcgtccgccgcccaccagaaatacgttgcggcacctgggattgtgccgccccagcaggcgaaagaaggcggtcaggccggtaggctggccgatcagatagagccggtcccccacctggggcacaaaggaaccgtcggggatgaccacatctccctccgcccgctcggcggcacagaacagcataggaagggactggagctggccgctctgggcggacaggggatgtcccaccagaaagtcctcctcccgcacccggaagccaatcagctccacccgaccccggcaaaaggtctccagattggcggcagggggaaagcggagcagacgggcgatctccgccgccgcggcgttttccgggttgatgaccaggtcaatgcccagggcctccttcagcagggagagctccatagcatattctacattgcgtacccgggcgatcgtatacttggcgcccagccgcttggcggtcaggcagcagaccatgttgacctcatccatactggtggcggcgatcagcacatccgcagcatccacacccgactctctcagggcggaaatggacgcgccgttgcctttgacacacatgacatccagggcctcagaggcgtggcggagggcggcgtcgttggtgtcaattacggtgatatcgtgctcctcctgagagaggtgctcggccagggtaaagcccaccttgccgtcgcccacgatgatgattttcaagctccatacatcctttcagagcgcccggaggtgccccacaacacattacattgcatgctaatcttaacgcaatcttaacacgcatgcaaggacattatgcgtaatttgccgaaaaagagcccctctccacagggagagaggctctttttcggcttttataccgtccattcactgtgcaccaggccgaccagataccagtaaccctgatagcattcaaacaccagtttgagagaacaccagtcgtatccggccatctgttcgtccagaccgggaaagtgatactccacaaaacgtccctccggataggcggaggccacattttccagcgcgtttccctgcatcagaacggtgtctaccgccgtctcaggggcggcagtatagtcggcattgaagacgtagcgctcaaaatactcccgtccggtcagttcaatgggggcgccggtgccgtcctcaataccccacacataagggatgtcgtcctcgggcaagacgacgagctgggcggggaggagattgcggtcacaactgggctccaccgtggagtaaggcgtcagggtaacccctttctccgggtgcaccagcgcggccagggcctcataatcgctctccttcagcgcggcgagaacctgtccggcacggtcggacaggcaggaggtgccggcgtcggccggcgcggcctggtagagggtagatataccctctacctcaatagcgtccagcgcggaaactgcgggatactccgctgcggtggcacggaccgagttcaggctggcagaggagatcccgctgccgaacagggtgcccagtgcaagcccgcccaaaagggcgatcagggcaaatagcacggccttcttcatccggtacacacctttcctgtcaggggaaattcacaattctttattttaaaagcagcacacaaaaaaagcaacaacaaaaggttacaaaagctaggatgcttttgtatatcttgcaatgatggaaaaaaggaggtataataaaaaatagttttttgtcagaacaaggaggattatcatgcacgaacacgagctgcaatttcatatcaaatgtaaggccggcgacgtgggccgctactgtttcctgcccggtgatcccggtcgctgcgagaagatcgcagcctactttgataacccggtgaaggtacagagcaaccgggagtacaccacctataccggaacccttctgggggagaaggtgagcgtctgctccaccggcatcggcggcccctctgcggtgatcgccatggaggagctgcacaacatcggcgcggacaccttcatccgggtgggcacctgcggcggcatcgccctgcccgttaagagcgacgatgtggtgatcgccaccggcgcggtccgccacgagggggccagccgggagtacgcccccatcgagttccccgccgtgtccgactatgaggtgcagactgccctggtgcaggctgccaaaaacctgggcaagccctggcacgccggcgtggtgcagtgcaaggattccttctatggacagcacgaccccaagcggatgccagtgagccaggagctgctctacaagtgggaggcgtggaagcgcctgggtgtcctggcctccgagatggagtccgccgccctgttctgctgcgccgccgccttgggggtgcgctgcggctcctgcttccacgtcatctggaaccaggagcgggaggctgccgggctggatcaggaggagagccacgatctgtccgccgctctggaggtaggcatcgaggccgtcaagctgctgatcgaagccgaccgggccgcgaaggggtgagccgcagaaccgctccgccctgcctttgcatagtgaaaaatgcctggaaccatgtggttccaggcatttcttattgcttattttaccgttttcagcgcccgcatggcgttgagaatggcgatgacggacacgcccacatcggcgaacaccgcctcccacatattggccgcaccggcggcgctgagcgccagcaccaggaacttgacggccagggcgaagacaatgttctgacggacgatggccagggtgcgccgggcgattcgaatggcgtcggcgagcttggagggcttatcatccatcagcacgatgtcggcggcctcgatggcggcatcggagcccaggccgcccatggcgatgccgatgtcggcccgggagagcaccggggcgtcgttgatgccgtcgcccacgaaggccagggcgcccttgggggagacctcgctcagcagagcctccacacgggtcaccttgtcggcggggaggagctgggtgtgtacctcgtccaggcccagctcctgtgccactgactcacccacggctttggcgtcgccggtgagcatgacggttctgcgcacaccacaggccttcagcgcagtgatggcctccttcgcgtcgggcttcacctcgtcggagatgacgatgtggcccaggtagaccccatcggaggccacgtggacggtggtgcctacccggtggcaggggtgccagctcacgccgatgtcctccatcagcttgtcgttgccggcgcagatctggcggccgtccactgtggcccgcacgccccggccggacagctcctccacattggatacccgggaggtatccaattccttgccgtaggcctccttgagagagcgggagatggggtggtcggagtagctctccgccagggcggccagctccagaagctgcgcctcgccgcagtggtcgggatggatggcggtgacgttaaacacgccgcgggtcagagtgccggtcttgtcaaagaccacgagttccgttttggccagtacctccagatagttgccgccctttaccagaataccgtttttagaggccccgccgatgccgccgaagaaggacaaggggacggagatgaccagggcgcaggggcaggagaccaccaggaagttcaaagcccgctggatggagtccacccattggatggaggtaaacagggggggcaggagggccagagccacggcggccagcaccacggcgggggtgtagtaccgggcgaacttggtgatgaagttttctgccttggccttcttgctggaggagttctccaccagatccagaattttagccacagtggactcctcaaaggccttggtgacccgaaccagcagcaggccggacaggttgacacagccggagatcacatcgtcgccgggctgggcctcccgggggagggactcgccggtgagggccgcagtgtccacattagaggtgccctccagcaccacgccgtccagggggatgcgctcgccggccttgatgacgatggtgtcacccaccgccacatcctcggggtctacctgccggagctgaccgtccacctcaatgttggcgtagtcgggccggatatccatcagggaggtgatggacttgcgggactggtccacagcgtagctctgaaagagctcgcccacctggtagaacagcatgacgaacacggcctcggggtattcgccggtggccagggcgcccacggtggccaaggccatcagaaagttttcatcaaagacctggccgtgggcgatgttgcgcacggcccgccacaggacatcccaggcaatgacggcataggggatcagaaaggtgaacagccgcagccatccctccgtgggcaggaggagtgcgaccgcaaagagcactgcgctggcgaggacgcggaagagcattcgcttttgcttcttggacataggacatcgctcctttgaaaaaatccgggacggccgccgtaggccgtccctggtgcggtcagcggacgatggtacagtctggctccacctttttgcacaccttgacgacctcgttcagaatttcatcaaaccgggtgtcgtcggcgtccagggtcagcttctgggtcatgaagctgacggtggcgtcgtggacgccgtccagcttcttgatagcggcctccatcttggcggcgcagttggcacagtccagatcaatgagcttaaagtgctttttcatggtaaagtctccatttctttatagaatatgcagaggcagcagctccgccacgtgctccatcccctggtccagtatggtgcgcacgtgcccgtcggccagagaatagaatacggtcttgccctccctgcgggccttgaccaacctgctctgcttgagagagcggagctggtgggagatggcggactgggtcatgcccaggagctgggcgatgtcgcagacgcacatctctgattcaaagaggacgtacaggattttaatgcgggtggagtcgccgaagattttgaacagctccgccaggtcgtagagaacctcctcatccggcatgttctggttgacctggttcacgatggcctcatgcacatgcatgtactcgcagcgttccacatccttgggttccggcatccgatcacatcctttctaaaacacatgagttattgttcatgtgttattatatgcttgattgttcaaatgtcaataggttttgcaaaaatatttttattgcccaccaggtgatctggcggtatgattagaaaaaaggagggaaacacgaatgaagcgagacgcaaatccggagaaggggctggaggctctggatcagtgtgaatacatggttctggccatgaccgatggagagggaaagccctactgcatccccctcaacggggtacgggtgggggagaagatctatttccactgcgcaaaggcaggggagaaggtggactgtctgcggacccatccgcaggtctgcctgaccgcggtgggacaccagcgggtgatccaggccatctatgagacggagtaccagtgcgcagtggtacgcggcaccgccggagaggtcacagacgagacggagatgcgggaggccctctgggctctctgccgcaagtacagcccggactgcctggagcgggtggaacaggtgattgacgacagctttgcccgggtggccatctggaaaatctgtattgagtccgtcagcggccgctggagggactacagcggccagggctgaccagaggcgcgtatgtggattctatatgcctttgcctccgcgttctttgcgggagtgaccgccgtcttggccaagctgggcatggagggagtcaattcccatctggccacggccctgcgcaccattgtggtggcgctcttcggctgggcaatggtttgggtggcgggctccagcggcgcagtcggggcacttgaaccgcggagctggctgtttctcatcctgtccggtctggccaccggagggagctggctgtgctattttcgggcgctccagcttggagaggtcaaccaggtggcccccgtggataaatccagcactgtgctgaccatgctgctctccatcctgttactgggagaggcggcccactggaatactttattggggatggggctgatcctggccggcaccctggggatgctccagcggaagccccgggaacgggcctcctccggctgggggtggctgccctgggcggtgctctccgccgtgtgcgccagcctgacttccatcctgggcaaggtcggcatgaccggcgtggactcctatgtcggcaccgccatccgcaacatggtagtgctggcaatggcctgggctctggtgctcgggctggggctccagcgggagattccgacgctgagccggaaaaactgggggtttctggctgtgtccggcgtgtctaccgggctgtcctggatgttttactaccgggcgctccaggaggggccggccagcgttgtggcccccatcgacaagctgagcattctggtgacggttggcttttcctgcctggtgctccgtgagcggctgagccggcgggctgccgccgggctgctcgtgctcacctgcggcacccttcttctgctgctgtagcatgaaacagcgccccatggcttttgccacggggcgctgttttggcctaaacagaggcagctgcgtttgtttttttccgtctgcggcggaggaacagcagggcgagaagtaccgccgcagccgcggcggccagtacccaggggagaagggttccgcttccggaggcgctgagcagcagagtaccggcggtgggggcggtgagcaccagatagctgccatcccgctccgcctcgatagggacggcggagccgtcctgaagcagggcagcgcgcacagagcccctaagaccgtcggcgcatacccgcagcgtcacggtgtcagggagctccgccccgtccgtgatctggtagtcataggcggcagcgccgtctaccggctccggccgctgtgccagctccagccgtgcatcgggagagaatgctccctcggcgagaagcagggggcgttctccgccggaggagatagtggtcacccagtcctcgtagaccgcctccaccgtcaggctccgggtgatgtggttgtggtcaaagggagcccaggtgccatagcgcccgccgtcgctgggtacttccgggaaggcggcggggtccaggctgccgccgtagggcacctccactgtgtccaccacctgctccccggcctggaaggtgacgcggaaggtgagaaagtccgccggaattccctcgagggcggagaaggcgccaaaggagaggggggcggtctgtccggcatagtcgatgccgtcaattccgactgccttctcctgaaggtaatagttgccggaaactgtgccgtcagcccagccggccaccgcgcccagacgttcgccgctgccgtcgatgcgggtcatggcgatgcagtccgcgatatccctgccctcgccggcaatgccgcctaggctgctgtccccggttacgtcggcctgggcggcacaggagcggagcactccccgggagagccccgcgataccgcccgcaaaggagccgtcgtcggcccccacgggtcccatactggtgcaggagagggcagcgcccacctcgccccggcccaggacaccgccggcgcactcgttcttggcggtgacggggccacggttgtcacactggtagaggatcgctttgagcagagcggtggtatccaccagcagattttcactgtccagctccagattctcctcggggtccagggagagctcaggggagaccgctcccgcaatgccgcccacgttggtgtcggcctggatgccgccctcattccggcagcctaccacccggcccgggccgctctgagccccctcggccgaagtgttctccttcaccgtcttttccggaacctcggtcagttccacaatggctttccgggcctcgtcaagctgcccgatgatagcagtggtggtggcatgcagctcctggttggcctggccggccccctgggtcatctgatccacccgttggctgatgtcatccaagtgcccgtccagctcgtccaggcgctcctgtcccttgtcgcccaaggtgcccagatagccgttcaggacatcctcgatgatatcggcctggctgttaaccacccggagctgctccacgctgccctggctgaagtccttgacatggccgttcagggcatcgagggccttttccagcgcccgggcggcccggtccatgtcacggcgggcgtcgcccatctcatctccggcctcttgccacagcgctgtcagacggtccgccaagtggaacgtgtcggaacccatggcctccagatggccgctgatgcggctgaggtgcccgttgaaatcgatggaacccacatcccagcgcttataggcatccaggatgccagccagatccaggcgggccgcagcctggagggcgtccttgacaaaggactccagccggtcggtctcgtccgcgatctgacgcagctccgacacaagaccgctgtgttcccgctccagtgcgtccagcgtggaggagagactgtctccggtgtcggacaggctgtcctccagagtgccggtcagatttttcagccccttgcgtagggcggtgagctggttgcctacctcgtccagatcggcgctggcccgccgggtgaggcggtccacctcgtccagcaggccgctcatggccccgttgatggtctggaccgcgtcgtagacctggtcggcggcggctgaggtgtctgtgttgaaatcgctgcccgttccgtggattacgtcctggatggcggagagggagccatggatagcggagatatcgtccactgcatctccggctgaggaatggatttggccggagagctgagtcatgagggtggaaagggaggccagggcgccgtccagccgctccatggggtcctctccgtaggtgagggtcacgtagggctcaaactggcccacgatgccccctacgtccttacgccccaggatctcaccatcgttgaagcagcgaagcagcgcgccgttctgaatcccggcgatgccgccggtgttgtatccggtgtgggcgtagcccacagcggcgtgattggtgcagtcggccacggtgccggtattgcgcccggcgatgcctccactgttggtggcggcatcgtttccaccagtgttgacttcccccaggttagtgcagctctggatcatgccctcattgcgcccggcaatgccgccgctgttggtgtttccggtgacagaggcccggttggtgcagctccgcaccacgccggagctcccgttgacgcctaccagtgcgcccacgtcctcatctcccgtcacatcgccagtgacggcgacttgttccactgtgccgtggttctcaccggccaggatgcccacctgcgactgggagccgccaggggccactaccccgtccagagtcagattttttacgacagccccctcgcccagcgtgcggaacaggcctaccttggaacccttgtccagccaggcgaagccggaaatggtgtgtccggccccgtcaaaggtgccgcggaacacgggaatggtggaaaagccggtaccggccagggaaatgtcggcggccagcaccacggttaccccttgagaccaggtatccgaggtgcagctttgggccagcttgagcagcccgctggcatcatgaatggtgatggtatccccctccgcgccggcggggggcagcagtcccaggcagaataccagggccagcagcagggcggcgccccgttttgcatagttcatcatggcgttattcctccgtttcatccagttcctgccgcttgctctcaatgagggcatccacgctgccgtggagcacgcccttgaactcgccgtcaatgaaaccggacacgtggccccggacatgtccgtccagacgcatggtgccgttctggaagcgctgtttccggtcccggttgagggtaatggcggtgcgctcgataagggcgtcgcccagcaccaggagctggggtagcacagtcatgaccaggacgatggaggtcagggtgccacggcccagggtatcgccgatggaggagataatggtgtcggtggacagcttgccgatgagaaagccggccacagtcatgatggagccggaagtaagcacggtggggaagctctggttgagcgcctccacggcggcggcccgacggtcaagcacggtcttgagctgtaagtagcggttggtgatgacgatggcgtagtcaatggtagcgcccatctgtatggcgctgacaatcaggtaactcataaaaaacaggttggtacccgtcaggaaggggaaggagaagttgatccaaatggagccctggatggtgagcaccagcaggatgggcagcccagcggacttgaaggtaaacagcaggatgaccaccacaaagagcacggtgagcacactgattttcaggttgtccccggtgaaggaggcggccagatcccgggcgttggtggaattgcccaccagcaccacatcgtctccgtagtattccgcggcaatggcgcggatctggtccaggagggcataggtctccgccccctcctcggggagatcggcagtaaagaccatccgggtccactgttccccttggagctgctggagtccgtcgtccagggtatcctgcaattcctccacctggctggcctgctctccgctcaggcggataacccccttgtccttctgctccagcaggaactggaacacatccagcaggggcacggaatagtcgtccgtgtcctgaaagatagcgccgtattcctccacgctcaggccgtaagcctggtagagcagccgggccagctcgatgtccacgcccgccagctcggcaaactgccggggggtcagcttgtcggtgaggtagcggccgtcctccacctcaatgttggccaagccggtggcggtcgtcacgttgtccaaggcctccacccggcggagcaccgcaccctcgctgtcgtagtccccacggggaaccagtacggcaatggtgttggtatagccgaaggtctcgttgatcttgtccatggcgatacgggtctccggacggttgcctgagttggtggaattggtggagaatacatagtcgcactggttggagcagtaaatgccgccgatgacgcacacggcgaacaccgccggaagcacgaagcgcagcttcatgatgaggcggccccagcctgcgatggagggcactaggtttttgtggcgggtcttttcgatgccccggttgaaaagcatcagcagaccgggcatgagcagaaacaccgacagcatggagcagacaatgcccttggacaggacgatacccatgtcgaagccgatgcggaactgcatcagcatcagggccaccaggccggagatagtggtgagggaggaggaggagatctccacgatggccttgctcagggcggcaatgtccgcctctcgggcgtccagaccgttgtcccgctcctccatatagcggtggcagaagataatggcgtaatcgatggccaaggcaagctggagcaccacggcgatggcgttggtgatgaaggaaaccgagtcaaagagaaagttggtgcccatgttgaggatggcggagaccacaaacacaatgagaaagaccaggacctccagatagctcttggaggtgaacaggagtaccgctacgatgacggcggcggcaatggccagaatgaccgtcatctcctgcataaggctgtctgagtcgtacggatcgccgctggggaagacgtagtgatcgtagggcgctaccagctcctttacggccgcgagggcggcgtccgcctccggactgccctccttaccggtaaaggagacggaaaagagggcggaggagtccttaaagtggtcggtactgtcgtcaaaggcgacggaggacacgccatccagctccgctaattgagcggctaccttttcggcttggcggtaggtcacattggagagcatgacctgagcggaggcgtaggtggtgaactcctcgtccataagggtcagcccccgtcgggtctcggtttcggcggggagataagaggtgatgtcattgttgaccaccaccttgtcaatagagctgccgcaaaagagtaccgccgccaggaagaccagaaagaaggcctttcgcttgtcgacaatgaaccgcgccagcttggttacaggggtttcagagcttgatgtttgtgacatgggtgggattccgcctttctaaaccgggagctcgggttgaggaatgaagtgctctacatgccgaagcagcacttcgtctggaacgtctgcaccgctggagagccaccagcggatcagggcgagcaggccgccggcatagaagcgggccgtcagctccgggtcaaacccggcggccggggcgctctccgacagctttcgcttcagcgcatccgtaatgatctcgtccagcacgtagaactctgctgcgccctggacggtgaggaacatccccctgtgggacttcaggaaggagagcgcgttgtgaaaaaggaccataaaatactcccggggcccggtacgtgggtccagggaggggtccaccggctcgaagtatttctgtagttcgtccacagcatagcgcagcagggccagcttgtcatcgaaatgggcgtagaaagtggtgcggtggaccatggcgcgctggcagatatccaccaccgagatttcactcagcggacgctcctccagcagggagagcagggcgtcggcgaggagcttccgggtacggcgctgccgcagatcttcccggggctggctggtttgtttcaatgggatccgctccttattctgggatgggaagaagtgtagcacagacaaaaacaaatgtcaagataaacaacatatgtagattaagtgaaacacacggaactttttctgttgaggattatagggatacaaatggaaccgagctgtgcgagagggcggggaatgagagacaaccgccctctttatataattttataggtgcgcaaagtaggtttcgtgcaaaacaagtaaaccgaagccggataacccattgacgtagtaggagattgttgctatactaatttaatccatattgattggtgggaaagcttgcgctgcatggaagcagtaataagagaagaaaaaggaggggaaacgtgtggagctgaatgtggacgaggcgttgcgttatctgggcatcggcggacaagcagccgagtccattcgagcgagtgtggctgctgtcgcagacaagttaacggctgctatacagcccagatacacctaccgcgtgtgttcccttcaaaaaacagaggccggattcctgctgccggaggccgagctggtccttccgggcgcggacgcagcgaaaatgctggagcagtgcgatcaggccgtgctgatggcgtgtactctggggacacagtttgaagccctcttgcgtggggaacaggctcgtgatatgtccagggcagtcattctggctgcctgcggcagcgcctgggtggaggccgggtgcgaccaggtggagcaggaactggcgcattgtcttccgaaccgctacagaacggaccggttcagtcccgggtacggagatctgccgttgtctttgcagccgaagatctgcgccgcactggatacccaaaggcggcttggactgtatgtaacagagagctatttgatgaacccatccaagtcagtcaccgccatcatcggcttgtccgactggccccagatggcccgcatccgtggatgcgcatattgttcgatgcgtgagacctgcaaattgcgcgtgggaggaaaacactgtgggaattgagatacctcaaaacaaatttttgatcctggacggcgctatgggcaccgttctccagcagcggggactgtctccccaaggccggccggagctgctgaatctgacggagccggagctgctgaattccgtctataaagagtacatcgccgccggaagccaggtgatttatgccaacacctttggtgccaacggcttaaagctggccaagacgggccacagtgtggaggaggtcgtgggtgcggccatcgccgtggcaaagaaagcggcggccggtaccgggaccctggtggcgctggatgtgggcccgcttggcgagctgttggagcctatgggtacgctgtcttttgagcgggcatatgacctgttccgcgaaatggcggaagctggtgcaaaggccggcgcggacttaatcgtggtggaaaccatgacagacctgtacgaggccaaggctgccctgctggcggccaaggaggccgcccacctgccggtgtttgtcaccatgtcctttgatgccggcggccggactttcaccggctgtacggtcgcctccatggcccgtacactggagggcctgggtgcggacgctattggactgaactgttcgctggggccagacctgctggcgccgctgctgaaagaactgtgtgagaatacccgcctgccggtcattgccaagcctaacgcgggcctgccggacccggtggatggacactatgatatgggaccggaggactttgcccaggctctgctgacctgcgtggaggctggtatctccatcgtgggcggctgttgcggtacatccccggaatacattcgtcggctgacggcagttctggaaggaaaaaagcccgtatcccggcactataacaacaccggtcttgtctgtacccctgtgacacccatccgactgaatggtgtgcgggtgattggcgagcgtatcaaccccaccgggaaaaagcgtttccagcaggcactgctggaaaatgacctggactatatcctggatgtgggtgtccagcaggaggatgccggagcggacatcctggatgtgaacgtaggcttccccggtgtgaatgaagtggttatgctgcccagagtggtaaagaagctgcaaagcgcgatcgctgtgccgcttcagctcgattcctccaacccggacgcactggaggcagggctgcgggtctataacggcaaggctgcggtgaactctgtcaacggagagccggaggttctggagcgtgtgctgcctattgtgaagaagtacggcgcgtccgtggtgggtctgacgctggataaaaacggcatccccaaaacagcggaagagcgggtagccatcgcccgccgcattctgcaggctgctttggaccacggcatccccagagaggatgtgtggattgactgcctgaccctgacggtctcggcccagcaggagcaggctgcggagacgttgaaagcggtgcggaccatccgggaggagctggggctgcaggtggtgctgggcgtgtccaacatctcctttggcctgcccaaccgcaagctgatcacgcagaactttttgattcaggccatgcatgccgggctgactctgcccatcatcaacccaaatcaaacggagatgatggacgcggtggcggcgtaccgtgtactctccggagaggatcgggagtgccgagcctatgttgcccgtttcgcggcggagtcccctgccgtgcaggcagcgccgaaggcggatgccctgacgttgggcgatgcggtcatccgtgggttgaaggccgatgccggaaagctggctgccaaagcgctggagaccgaggatgagctgtctctggtagaaaaccacctgatccccgcactggacaaggtgggagaggactatgacaagggtacggcattcctgccccagctgctcagcgccgcccaggcggcacaggcagtattcgaggtcatccggagctctatcgccgccaagggcggtgtgcccgtgaagaagggaaaactcatcgttgccactgtgcagggcgacattcatgacattggcaaaaatattgtgaaaaccgtactgggaaattacggctacgaggtgttggacctgggccgggatgtgccgccggagaccatcctgcggacggttcaggagcagggggtgcgcctggtgggcctgtccgccctgatgaccaccacactgcccgccatggaaaagaccatccggttgctgcacactatggaggagcccccggtcatctttgtgggcggcgcggtggtgacgccggaatacgccaaacaaatgaatgcggactactacgccaaggatgcccaccagtcggtggagatcaccagaaaggtcatgggatgatggatatccgcacctatttatcgcagggaaagccattgctgtttgacggggctatgggcacttatttcgccgcccatccgggccgggctgaggaacgctgtgaacgggccaacctgacccgcccggaggaaattctgcgcatccaccgcgcttatttgcaggccggctgccgggccatcaagaccaatacctttgccatcagtggagatctctccgatgggaacgatgaaaccgcctgcgacatcgtaaatgcggcctgccacctggcacggcaagccgctcaaccctatggggcttatgtatttgcagatctgggccccgcgccccgtgaccacagccgcgccccggcagatctataccagacgcaggcgcagtggtttctggaacagggggtgacccattttttggtggaaacgctgtctggtgacgaggggctcccggaattggctggttggttgaaggaaaaaaatccggatgcgtttcttatggtttcctttgccgtggaccatagtgggatgaccagcgccggacgtttgggcagcgagctgtatcgctttgcatcggaactggctggggtggatgcagtgggctttaactgtgtttctggcccccgccatttgctgaaatacattcagaccctggagctgagcgataagcctctgactgtcatgcccaacgccggttaccccaccgtgctgggccgccgcacggtattcggcggtcagcctgactactttgcagggcagattgcacaaatcgttcaggctggcgcctccatcgtaggcggctgctgcggtactacgccggaacatattgcccagacggcgcaggctttgaaagagccgcttcctaagtgcaccgtttctgctccgaaaaagctgctcaaacctgcggccaatgcgtccaactccctttgggagaagttggaggcgggtaagcgtgtcattgccgtggaactggacccacccgtagatgacgacagcgcgggcttttgggagggggtgcaggccttgcggggctcgggggccgatgcggtgacgatcgcagattgtcccatcggtcgcccacgggcggacagcagcctgttggcctgtaaaatcaagcgggatattggtatagagccgttgccccatatgacctgccgtgaccgcaatctgaatgctaccaaggctctgcttttgggcttgtccatggaaggggtacacaatgtgctggtggtcaccggcgaccctatccctaccgaggatcggaacgaagtcaaaagcgtattcaatttcaactcccgcaagctggcccgctttgtccatatgctgaatgaaaataccctgcgtaccccctttcgtatctatggcgctctgaatctgaacgcccgcaattttgatgtggaactgcggcgggcacaggagaaagaggcatgtggtgtttccggctttctgacacagccggtgttgtccgccgaggcgctggacaacctgaaattggcacacaagactctgcggggcaagattctgggcgggatattccccgtggtgagccaccgaaacgcctgttttctgaacaatgagatttcaggcatgcgggtgtgcgatgagatcattcatttatatgaggggaaggaccgtgatgcagcggaagctctggcggtcaccgtttcgacggcgattgccaaagagatcttcccctacaccgacggttattacctcatgaccccgttccgccgggtggcgctgatggagcatattattcaaaatattcagcaatcgtgcatttcataagcaaggaaaaggggccgttcgtgtgaatggctccttttttgctctggtcggttctttaacaggtctttataccagatcaatcaataatgaaattacctattgacatcataggaaataggtggtagtataatcccataaaccaactgagtaaattggttttagaggggcgtgcaaaatgagcaatctgtttcaacaactgttgcgcagcaatttccgctgtggacgaatgctgaactcccgggcactggatttggccgggtggatcggtatgtcctccactcactttgttgtgatttaataagatcattacatggccatatctctttgtccgggagcgaataacgccccggtctttttgtatctaaaatcaaactataaactgaaagaggtataaaccatgaataacaattataagtttgaaaccctgcagcttcacgttggtcaggaacagcccgatcccgctacggattcccgtgcagtaccgatttaccagaccacttcctatgtcttccgcaactgcgcccatgcggcggcccgcttcgggctgacggatgccggtaatatttatggccgcctgaccaactctacccaggatgtgctggaaaagcgcctcgcagcattggagggtggcgtggcggctctggctaccgcttctggtgccgccgccatctcctataccattcaggcgctggcccaggctggcgaccacatcgtggcgcagaagaccatttacggcggcagctacaacctgttggcccacaccctgccccagttcggtgtctccactaccttcgtcaactctcatgatcttacagaagtggaaaatgccattcaggataacaccaaggcaatttatctggagactctgggcaaccccaactctgacattccagacatcgacgccattgccgccatcgcccacaggcacggtctgcctctggtcatcgacaataccttcggcacgccctatctggtccgccctattgagcacggcgctgatattgtgctccactccgccaccaagttcatcggcggccacggcaccacactgggcggcatcatcgtggactccggcaagttcgactggaaggccaacggcaagtacgcgcccattgcaaaccccaatcccagctaccacggtgtcagctttgtggacgctgtcggtcccgccgcttttgttacttacattcgggccatcctgctgcgggataccggcgccgccatctctcccttcaacgccttcctgctgctgcagggtgtggagaccctgtctcttcgtctggaccgccacacagagaacaccaagaaggtcgtggagttcctcgcaaaccatcccaaggtggagcatgtgaaccatccctccctgcccgagcatcccgaccacgctctgtatgagaagtattttgccaacggcggcggctccatcttcacctttgaaatcaagggtggtcaggaggaagcccacaagtttatcgacagtttggaaatcttttccctgctggcaaacgtggccgacgtgaagtccctggtgatccatccggccaccaccacccacagccagctttctgctgaggagctgctcgaccagggcatcaagcccaacaccatccgcctctctatcggcaccgagcatattgatgacatcattgccgacctggaaaagggctttgccgctgtgaaatgctgattgcaaatttgaagtaaagcacaattttatgttttggaaaggattttgactatgatgtgtatgtgtcaaattatgcactgttataaaaatcgaatcatttccatacctcgcctgcgtttgatacgataggctgtgctttgtgtgcaattaagcggggtatccatgagaaacggatgccccgctctttattttctcacggaaggaaacgtaagatgcagtctatatatatttaaagaactgctatggaaaaattttaggtgcggacgatgtacgcacggaagcgtccccaaacgtaataattttttggaccggaaggattccagcgaaagaaggtatcagtttgaatgaattgcgtgatcaggtatgtgctgaaaaagaatatatgattaacttacgtcgggattttcaccgtcatccggaattgtccctacaggaaaggcgtactgctggggtgatcgaacaggagcttgagcggttcgaaatttcgcatactcggatcggagctaccggtgttctggggattttgcgaggcactcaaagcggcagcggagtcgtagccttacgggcggatattgacgcgctgcccattcaggaaaccaacgatgtggagtaccgttctcagacagacggaatcatgcacgcctgtgggcacgatgcccacacagcaagcctcttgggcgccgcgaaagtcctctcccaaaatcgtgaccgctttggtggagagatccgttttctgttccagccggcggaggagaccggcaaaggcgctccggattttataaatgccggagccctggatggcgcggagcgcattctgggcctgcacagtgctccggatctgccccttggcaccattggacttacgcccggactgaacaatgccgcagtggatcatttccgtatcctagtccatggcaaggcggcccatgtctccaccccgcagttgggcgcggatgccctgtatgccgccagtcagatcgtggtagcgatccagggattggttgcccggcgttcttcacctgtggagccagtgattctcggcgtcgggaaatttgctgctggaacgacctacaatgccgttgcggaatatgcggagctggaggggaccacccgcacgatctctcaggagacgcgtctgcaggtgcgggagtggatcgaccagaccgcggagcagattgcagccatcagtggcgcggaagccagggtgatttggtcggatattacctccgctctgattaatgatccgcaggtcagccgtgaggcggcagaagtggcaaaggggctgggagaccatattcaggtcgtcaccaatcgccccttgtccctgggcggcgataactttgctgagtatcaacgttttgtaccagggtgctacgcctatattggcacagcaaacacagacttgcccagcacattgaacagcctccacaacggaaactttgatttggatgagaatgcacttgtcttgggagcaggcttatatgtgggatacgccctgtggtggcttggaaggcaggagaagccatgattcaattagaacatattagcaaacgatatgtcggccccagcggtacggtggatgcgctgaaggatgtgtcggttcatgtggagaaaggagatatctatgggattatcggctcctccggcgcaggaaaatccactttgctccgcatggtcaaccagttggaaaaaccggataccggcacagtcaccgtggctggccgggaactgagcacgctctccaaagctgagctgcggaagatgcgccgtaaaattggcatggtatttcagcagttcaacctattggagtccaaaaccgtattccagaatgttgcgattccactgatcctggagggcatccccaaggagaagatcactgaacgcgtcaaagaagtgctccatatcgtggagctgcacgacaaacgagatacttatgtcactcagctttccggcggacagaaacaaagggtgggtattgccagggcgctggcaacagaacccgcaattctcctgtgtgatgaagccaccagtgcactggaccccaagaccacagaatccatcctcggcctcctaaagcgcatcaacaaaaagatgggcgtgacaattctgctgatcacccaccagatgcaggtgatccagatgatctgcaacaaggttgccgtcatgggaaacgggcagatcgtggaacagggaacggtgttggatgtgttcagccagcctcatgctccggtgacacaggagtttgtccgcacggttatcaacgatcagatccccaagagcattctggatttgctccagacagaaacgcggcactatgtaattgaccggctgaaatttatcggtgccagcgtcaaaaaaccggtcatttccgaaatttgccagattgccggcgtggaggttaatatccttggtgcaaccgttcaggagtttggggaaagcatcatgtgtattttcatcctgcaaatgtttggttctgatgacaagctgctccaagccgaagcacagatcgacgcggctggagttctccgcgaaagggtggtattcgactgatggaagctctgttggaaacaaagatttttaaggtatctgtcgagcgactgctgcttaatggcggtcaaacactatacatggtgggtattgcactattgattggcaccgtgatcggtaccttgctcgccttggtgctggtgctctgccgcaagggcggccttgtggaaaataaagttctacacagtatcgtcagcctctacatcaatgtggtacggagtgttccgttcatcattttgctggttaccatcatgccgcttacccgcgctattctgggtacgacgattggcagcacggccgctttggttccgttagtggtctatatcagtccctatttagcccgcttgattgagaacagtttgctggaggtatccccaggcattctggaggcggcccaggccatgggagccacaacctggcagatcatccgctgttttctgatgcctgaagcgctgggttcgatggttctggccttgaccacaggaaccgtcggcctgttgggcgcctccgctatggctggttactgcggcggaggcggtatcggcgatctggcattgacctatggttatgaaaagatgaataccccgttgatgatagttactgtcattgctctggtcatcctggtacaactattgcagatggcaggcaaccgtgtttcccgccgtctgcgtgagcacagataatgtgtgattcatattagtgtcgagtcgtgaaagaaggttaatcctatgaagaagttttttgcattggtagtgtccctgattctgattctgagtttgactgcctgcggcggcagtgacagctccacggacagcgcaccggcctctggagcatcctccgccgatcccgccgcaaagacggagatcgtctacggcaagtctcaaggtccctacaccgaattgttcgaagcagcgatcgttcccatcctagaggagcagggctacaccctgaaaggagtcgacttttccgacctgctgactgccgatatcgccctgaacgacggcgatgtggatgtgaacgtggaacagcacacggcatacgccgaaaactttaactccaataacaacggtgatctggttcccatcagtcccatccctaccgttcccgccggtatttactctgggacccacacatctctggatgaagtgactgacggcgcaaaaattgccgtccccaacgatgcctccaacaccgctcgggcctatgtcctgctgcaaaagatcggctggatcactctggatagcggcgtagatccctctgccgtgacacaggatgatatcgtggagaaccccaagaatctggaatttgtggaaatgaagtctttaaccatccccgcagccatccaggactttgactatgtaatcattaccggcagcattgtttacaatgccgggattgacccctctgctgcactggcaaccgaggacattcttgatcaccttatcctacaggttgttgtcaaggaaggaaacaaaaacgctgactgggcgcaggccattgtggacgcttatcactctgaccgatttaaggcctatctggaggagaacaacgacggcctgtggtgggttcctgaagaactgcagtaggaagatgtcagctaatagagaaaagagtgccctgattgcaatgagcggcggtgtggacagctctgtcgcggcatggctgatgcgtgagcaaggatatcgctgcgagggaacgaccatgcgtctttaccgcaacgcggacatcggcttgagtcagttccatacctgctgctcgcagaaggatatcgacgacgccagtgaggtggcgtttcaactggatattccctatgaagtgctggattttaccatggacttcaggaaccagatcatcggaaagttcatccgaacatatgagtcgggcgggacaccgaatccatgcattgattgtaaccggtatatgaagttcgataaactgcttcgctttgccgaagagaagggactggagtatgtggccaccggacactatgccctcattgaatatgacgaagtgtccggcaggtatcttttgaaaaaagcgctggatgacagcaaggatcaaagctatgtgctgtatatgctgacacaggatcagcttagccacatacagtttcctttgggcggcaaaatgaaaaaggaagcgagagagatcgcggaacagttgggcttctgcaacgcccggaagcacgacagtcaggacatttgcttcgttccgaacggggactatgtcaagtttatggaacagtataccggaaaacactacccggcaggagcgtttcttgatctggagggccagccggtcggcagacattgcggggctgtccgttacaccttggggcaaagaaaaggacttggtcttgccatgggtgaacctgtgtacgtttgcggaaaggatatggctgccaatacggtcacagtggggccggagaacgcgctgtatagcagtatacttcttgcggaagatatgaactggatctccatcccgcaattaaagcagcccatgcgggtgaaggccaaaacccgatatcgtcaggcggaacagtgggctgctgtgtacccggaacaacacggccgtgttaggctggaattcgatgtgccgcagagggctgttaccgttggacaagctgtggttctgtatgatggagatgtcgttgttggcggcggcacgatctgccaggcgccgccaacgaaacgctgatccacaaaatacaggctcaggcttggacagccatatgttgaacggcggacatgaccactgcggcgcctgctgctgcggaagctgcggtgcgctgaaactgacccaaacagaggtcgatttacggcgtcttttcgctcagattccgagtggaagtatggctctgaccacgaaagttcaggcagtgattgaatgagtggaaatacaaggaattgaggcataagcgacgatgctgaatcaatttttgaggacacagcgtctcttccaccgggaggacatggaaaaactgtatcaggcccgggttgctgggggtggtattggcggcgttggcgaatttggtctcattgatgatggacgggtgtgccggacaagcgtgaatcgccacacttttgcaaccagaaaaaccgtggggcagaaagcgtggaaaaggtgaaatccgcttaactgaacgttcctgtaaggagctttgcggacaacattttaacgagagggatcactttaaataatctcccggttggaaccacgctttaagctggtgatacctaattgaggattacttaaattggcggtgagttccatgcaagctgtgtgatttggcggcggatcggagacagtgtggcgccgggagaaggttttcgccattgttttgcaggaggggatgattcactctggagacaaaattacagttttaccggagagacgccatgatttaccttgactactccgccaacacaccggttgatcctgctgtgctagaggcattttgtaaagcggagcaaatgtatatcggaaatccgaactcaacgcattgcgctggacgtgcagcctgcgaggagatggcccgagtgacagatcatattgctggacttctcggtgtggaacccgccgggattatctacacttccggagccagcgagtcgaacaacctggcaatcaagggaatcgcccaggcttcccgaaataccggcagacacatgatctccaccgtactggaacacgcatctgtgggcggcacacttacggctttacagcagcagggctgggaagtcgatttgttggatatccagcgggatggaaccattgacctggagcaactgggtaatctgctgcggaaggacacgatcctggtgtcagtctgcgcggtggacagtgagctggggacagtgcagccaatccgtcaaattacggagattctaaaagattttccaaactgccgtcttcatgtggatgccacccaggcgataggaaaaacggagctggtgatggatggtgtggacaccatgagcatcgctcctcacaagttttacggtctcaacggcagcgggcttctcctgaaaaagagcagtttgattattgagccccagactcacggcggttccagcacgacgccttaccgtagtggtacgccggctttggcactggctgtttccattgaaaaagcgcttcaattgacgctgacgcagcaggaagaacgaatccgctatgttcggcagttgaacgaatacctaaagactgcactgctgcactatccggcagtccggatcaacagtccggaaggcgcggtaccgcatatcctcaacctcagtgttcaggggcttaaaggcacggtatttcaacgtgttttgagtgagcggggcgtatgtgtttccgtcaagtcggcctgttctgcggaggggacgccatccaaagcggtatttgccgtcagcggggaccgaaaaaatgcgctgtcctcctggcgagtgagcctcagtcatttgacaacacgagaggagcttgacgaatttttgcaggtgttcgaccaatgttacaaagagttgggtccatgaaaaatccattggactatcagatttcgaagtatgacgcggttccaccgctatgctcaatgacgcgagctatcggttccaagggaaagatacccccctgtagtttaccagtaatatcaccctgtattgtttggattgttacagctcagatggagtttgcgaaaagggtggaacctttttgcggagaacggctcaatctgtgacaacggaggcggcagttctaaacgtcaggaaaacaaaacactgctctgtgggttgaaacgaagcaatcccggcattaaaaagagtatattcaacaacatccacgctgttttccagatacggtgcccggttgcaaaaaaacggtacagagcactgatttttggagcaatatgaggaaaaatgagccggtaggatatcctaccggctcattctgttacctaatcaaattacataattatctccagcagcaccggacttcatcaaatctgcaatggtaacattgtccagatattcgttaattactttatctagaccctgccacatatgtaaagtgcggcattccgctgctctggcacagaccgctgcgcctggtccgagacaagaaaccggcgccagggagtcttccgtaagtcgtaaaatagcgccaacagtgtactggtcaggcgactttgtcaatttatatccgccgcccttgccccgcagtccgctgagaatatttgctttgacaaggagcctgatgatggtttcaagatatttctctgaaatatcctgccgctgagcaacttctttcagtgggatatagccgtccgtctggtgctcagcaagatcaatcataacgcgcagtgcataccgccctttcgtagaaatcagcattttaaagtctccttgcactcattataacctattatagcgcatggttaataggaaaatcaatagcctttttggagcggccctattgacaaaatgagcaatatctatattttgaggaccaattgatcgggaaaacaccgcctctgaatctcgtccctattgagcagagcgaagggctggaggccaacctgctcggcaaactcgaatacttcaatcctgctggcagcatcaaggaccgtatcgcaaaagccatgatcgacgatgctgcggccagcggaaaatgaaagcccggttctgtgatcatcgggcctacctctggcaatagtaaggggcttggtcaatccgaaggcgttttggctggcatctcttccggtgctgcggtttgggctgcgctccaacccgccaagcggcccgaaaatagaggcaaggaccatcacggcattgctgccggatacaggtgaccgttatctctctactcctctttttgcggactaagaagataaaaaagatagtaagtcaacttcatgacttactatcttttttgtttacccgtaccggctgcgttgtccagaggtcgcattgtgtccctagaagaattaatccctggtccggggggcttctgtgcttagttgtgggattctgtaaagcgcatgagaatggcggccatctcggcacgggtggcggtgccggcggggtcgagccaaccgccgcccttgccggtcagcagaccctcgtccaccgcccagcacagggcatctgccgcgtaatcgctaaccgcgtctttgtcgttaaagccgtccagactgcccgtgggctccggcgtgcccgcatagcggtacagcatggccgccaactgctcccgtgtcactgcgtcctccgggccgaaggccccggtgctgtacccggtcacaatcccccgggacgccgaccagttgaccgcaccggcgtaccacgcgtccgacggcatgtcggtgaagcctgccgtaccggggacggcagggctgtccgccaggttccagagcacttgggccgccatggagcgggtcagcactgtagtgggagcaaaagcggcggggccagtgccgtccatgaggccgtttttatatacatagaccaccgcgtcatagtaccagtcgccgctgctcacgtcggcaaaggggagtttgggctcggtttcaatttttgcgaagctcgcctcaatctccaccctggaggcgggcattttaaaggtgtacttgccgccaccctcgttggtgagcttgatttcgccgccattcttgccggtgacaaccagtttgttcagctcatagccctcgttgggcttcacggtgatggtcacggtgtcgcccttttcggcccgcttggggctgacggtgacggagccgttttttccgctgtccacgctgacggtgaaactgccggagctggagcctccgccggaggagctgggccacaccacagccgtacctgtggccttgttgtagtggtcagtatcatctggggtaaaggtccaggcgtaggccttgccgcgctccacggtctggtcgccatcatcccaggagaatgtaccagcgacctcaatacccgccgcgttcttcatggagccggacagggtgatggtagacagctccacgccgctgctgaccttgtcaaaggtaggttcgcccttgggatttcccatgacgatgctgtatcgccgggaggcgtaacagtaggtcttggtgtccttgctatacccgttgatgacaaaggagtagacgcccagctcggtgggagcgatggccttgagtgcatcggcggtcagctgggagtttgtctgattgtacaggtgcgttccgctaaaggcggtgccctcctgtactgcgtggaagtgggcggtgaaggatgtgatggaatggtcagtgtttgtgcccttggtatacagggtggtcaggtcccgggcggtggggacgatgccctggccggtgtactcatactcgcggtctccttcaaaggtctccagcggtgagctgtctccctctaggtacagatccacctcattcatgccattttcatagcaggtgacatagaggatgatggtatctcccggttcccagttcgtacccacggtgcagaagcggtagttggggtttttcagcttcaattccacccggatgctgtggggattgccgtccgcatcggtggtggggtgggtgggcagggtgtcagtttgtataatatttccgcttacatcgttctgataaacatagtaaacatcgctgtcatcacctatgccgggcttgaggtcgatcttgtccttagtgatatcagcctcataggttccgttctgactgccctctttcaccggatagaagcccagcaggtcactgaacttgggcgcggtgccatcctcattcagcgcgtaggtgatgtacggacggccgatgccgtcgtcattctgcgttgtggctgccttgccgtagatgatccgcatgggggtgacttccacattgacggtcagcgtccctgtgccgccagcctccgttctggctgtggcggtgatggtggttttacccaccttgtttgccttgagctgatcgtcctcaatagagacaatggtgctgtcactggaccgccagttggagagggtgacgccctcgatggtcgggagcgtctgggtggagccgtactccatggaaatagcatcggatttcagctcgatccacttggcgtagtaggtctttcctactgtggagttggtcacagcggtaccggtacaaccctcgttttcgtaccagccatcaaagatgctgccctctttgatgggagttgccagtttgccagactcaaacttggtgtccgccgcaaaggtgccgccatcggtaacggccagagaagttttatctgaatcgaatccattgcttgttgaggttggattagtctttgactgcaacatcaaggaaattaaatcgcttgaacccaaataaattacactattatttgccattcctttaaaaatttgattattttctggaatagaggaaagcgatgccggaatatagacaccctccattaaagatgcatccttaaatgccatgctaccaatagtgttaaggttgtttgaaagaaccactcttttcaaattagtacatccttgaaaagcactctcggcaatttcggtaacagagcttgaaatgaggacttcttccagcttagtacaccccttaaaagtctccttgcttatttttgtaaactgtggattttctggaaaaacgcaactttcaagctgtatacagttactaaaggcaccaggagcaatcgtcgttaccgtatctggcagagtaatgcttgtcagagaactgcaccccataaaggcattaactccaatttcagtgacggctccattaaactcaatgctactaatgcccgtcgctgcaaatgtataggatgggatggaaactacgccaaccggaacagaaatcgttccattcaaagaagaacatttataaaatgcttgtggctcaatagtagtcagatttgctggtaatgtgatggaggtaattccagaaccataaaacgaatcttgcccaattttagttatagaggccggaagaactaccgtcttcaaatttgtataattcttaaacgatttcgcgccaacagaggttactccgtcttgaattactactcgagtaatcttctcgcgtgagtagtgccattctggctcgccactactcacattgtcttccgtgatataagcatttcccataggaccattaccgaaaattgtgagagtataaccatcctcatcgttcgctgtaagtgcccatttaacagtatcggtatttccttgtttatataatcatataggccgcagttaccggacatcacattgtcagcgggggcgggatcatcctccgtggtctccggttcatcgggcaggacgcactcacactcatgcccggcctgcagggtacagccctcggtcacggcgcaggcaaccggcgtctcgctgcccttgtctctctcgactgcaagggcagaaacaggaaaaagagacggtaacagtaccatcgccattatgcttgctagtagtcgttttctcatttgctctattctcctttatacaaaagtagtacctttctaaactgtccgctttgtaaaagtgtacctttctaaagcgcaattttactgtttgtatttgctgaaaaagtattgaaaatcctggcagacttgtgtatcatacaaacagggatcgttctatctgaaagtttgtaaaggtacaccttttcaaacaaagcagcgcctctggatttctccagaggcgctgctgtctttctgacgcggacaaaattatttgctcttatcaacttcgtgatggaaaatgctcccttaactgttgcaaattcgtgaattatatggtatcattttacatgaaaagacattggaagtaaagggtgttgcacgatgaatgcaaaactatccaaggtcaatcagtccattgaaaaaaccattcagattgtggaggttatggcccgcggtaagggccctatgcggctgcaggacgttgctaagaaatgtggaatgccggccagcacggtgatgcggatgcttaatacactgcaggtgtacggctatgtcaatcaggatccctgtacgcagcactactctctgtcgctgcggtttgcccgcctgggttgcctggtcagtgaacagaccaatatgcgggatgtggcgcggccattcttggcggagttggcgcagcgctgtcaggagactgtgtgcctggggtgtgaggcagaaatggaagtggagtgcaccgatgtggtggacggcccggacggaatcctgatggtgagccagcgggtaggcgcacgcgccccgctccacgccaccggcgcgggaaagctcctgctgctcaattacagtaaccagaagctgaatgagtacatagcagttaagggcctgcgggccctgacgccccatacactggtcacgcgggaggcgctggtgaacagcttggagacgatacgcagccggggctatgccctggaggacgaggagcgggagctgggtgcccgctgtgtggcggcaccggtgcgtgattactcggggcggattgtaggcggaatcagtgtctcaggccccaccacccgtatgtccagggcgcggctggaggcgctggcgcccctggtaatggatacggcagcggaactctcccgccggctggcctatgaggagtggcctgaggaaggggattgactttcccggtcgggcggtatatgatggaggcacagttgaatatcgaactccggcttttgtggcatttacgcgaccccgcctgtccgggcgggacacgtattcttgttcggctgaacaagggaatcaggtgaaattcctgaacacggcccagttccgctcggtgcggatgggtgcgtagctgtaagcacggagcgtatcctctttccgtgaaagcgggtcactggcttgtgctgggaaggcgggggatatgcgctggcggcatagccgtctggacgtgtgagtcagaagacctacaaggagcagtttctccccgagtggaggggagaggcatggtgcgtacaaaagcggtaacctgaggttaccgcttttttcgacctgctcccaaggttggaaaaagcggatacctctgtatccgctttttcatttcgggatcgatggtcccgcttaacaggcgaattccaggaccggccaggcggccgcccggacattggggagaatggaacggggccgcagactcccgacggagcgcgcagggcctgcgaatgggttggggcggggagaacagctccccggacaggcgccctgccggctaggctggcagggcgcctaattcatattaaataaaaactccgcaaccgaaaggttgcggagttttggcggagagagagggattcgaaccctcgagacgctattaacgcctacacgatttccaatcgtgcgccttcgaccaactcagccatctctccatggtgagtgctctatccttgctcgcccatcagccgagcagcagagattattatatcagctttttcgaatacgtcaagaggaaaattgaaaaaaatcaaaaaaagagggaagtcaggaaaacattgtgccttgccaaggggaggggagagcggttacaatctggttacaaaacaaagaaaggttgtggaaccatgaaaaagctggtactggccgtggcattgagtgcggctctggtgaccaacggacaggcggcgtccgccggcccgctgcgggtcaacggcgcaccggtggacgccagcggcagctatgtccatcaaaacactacctatgtccccctgcggacgataacggaggcgctgcgccccgatgcagaggtggattgggtgaaagaccgggctgtggtccgggcggaggggctgaagctgacggcccggccaggtgatgcctacatagaagcaaatggccgtacgctgtatgccaaagacggtgtccatttgaaggcggggcgtacgcttgtgccggtgcgggtgttggcagaggcgctgggcgccaccgtggactggaatccggccaccggcgtggtgtcggtcaacgggggaggcagcgcaacgacgcagcccgactacaaccgggaggacaagctctactggctgtcccgcatcatctcggcggagagccggggagagcctctggaggggcagatcgcagtgggcaacgtggtacttaaccgggtggattccccggacttcccggacaccatctacggtgtgatctttgacgaccggtggggtgggcagtttacccctgtgcgcaatggcacaatctatcaggagcccacggaacagagcattcaggcggccaagctctgcttggagggggtcaacgtggccaaggacagcctgtacttcctggcgccggcgctgaccaacaaccattggattatggaaaacagaactcacgtcatgacgatcggcgcccactggttttaccgctgagcgcggtggagacacgtccggacagctttccggacgtgtttctttttgttatcatttgtagccgaaggagagctggaaacatcgaaaaatgttctgacgcgcaaagagaagggtgaattgaaaccattgcagcacaatggattgaacggtatcgacaaaacttcctcttgactttttaggggagaatcggttacaatacggttacaaaacagtgaacaacaagtaacagattgtaacaggaggaatcctaagcatgaagaaacgagccctttgtgcgctcgtcagcctggccctttgcgttaccctggccgggcaggcggcggcggctgagagcagcgtcagctttgtagtcaatgggatcacccttgcggcagatgtgcccaaccgtgtggaggcgcgcactacctatgtgtcctactggcccatcgtgagcgccttgtatccgaacgcgacggcggagtgggtcaatggtcaggcggaggtcaaggccgacggcctgaccctccacatcaagcccggcgcccagtatatcgaggccaacggccgctacctgtacgtgccggacggagtcaagtgcgagggctacagcatcatggttcccatccgaaccctgtgccaggcgctgggcgccggcgtggagtgggacggaacccagtccaccatccagatcacctccggcagcgggcccatcctctccggtgagcaggcctaccaggcggacgtggtgtactggctctcacgcatcatctatgctgagagcggcaatcagcccttggacggaaagattgcagtgggtaatgtggtgctcaaccgggtggccagcccccggttccccaacagcgtctacgaggtgatctttcagcgcaaccagttcacccccgccgctaacggaagcatcaaccgtacccccagcgctgagagcgtggttgccgccaagctgtgcctggacggtgccaacactgcgggcagcgccctgtactttgtgaatcccacagtggcccccggaagctgggcctcccggaaccgcccctatgtggcgaccatcggggcccacgctttctacgggtaaggcgcggcaaaaagccgagaccattggtctcggctttttattgtgcaaaagcacagcaaaatggccatgtatcgccatatttgcctgttgtcatgatatgtgcatcgtgtatgaaatgtcccgaccgggaactgcgggagaaaaggatggaaatatccacgcgcgtatgttaatataaatacgtatgtccaaatgattcagcatggagggaactgactttgacttattttatgtccatcttaatggggattatccagggcgtggcggaattcctgcccatctccagctccggccatctggccctgtttcagacgtttttcgggatggagaacatggaggagaaatacatgttctttaccgtcctgctccacttcggtacactgatttctgtctgtatggtctactggcgggacattgtggatatgatccgcgagttcttcctgggcattgccgccttggccgggcggaaggataccggcgttgccccgccgccggcccgacggatggtgatgctcatcatcatcgcgaccgtgcccctgtttgtgatggtgtttttgcaggatgcggtgaaccaactgttctccaactccatcatggtttcctgcgccctgctggccaccgggtttatcctgtttttctccgaccgcatggcccggggccacaagaccgccaaaaacgcgacggtggcggacgccttgatcgtgggctgcggccaggcgctggcggttatccccggcctctcccgctccggcaccaccatctcggttggcatgatgcggggctttgaccgggccttcgccgtgcgcttctccttccttatgtccctgcctgccgtactgggcgccaacgtcctggaaattaaggatgcgctggcctcgaacttccccattgaggagctgcccatgtacttagtgggcgtagcggtgtccgctgtggtggggtactttgccatccggcttgttaagagcctgtccgataaggggaaattcggcaagtttgcttactactgctgggcggttggcctgggcagcttggtagcgggcatcgtgaagatgatgctgctcaagtgacagaaacccgatacaaaagaatgaccctggaaaggatttgattttcaatggccacagcacagaagaagaacgcgggcggaaagcggacggcctcgggtacgggaaggaccgcatccggctcccgcgctgccggcagccggaagaaggccccggcgcccaggcccatccgtcgggaggtgggggcggtggcctgtctgctgctggccattttctccgcctttggctacttccatattcaggccatctttatcgactttttctgcggcttggtcaagggcctgatcggctacggctactggctgctgccccccatgctgctggtggccagcgggatcttggtcttccaccggggccgcccggtacggctgcgggtgtggtgcgccctgctcaccccagtgctggtgggctgcctgctccacctgattctgaccaggggctcctatgagtggagcctggagctggtcaagaccctgtggagccagggagaggctctcaagagcggcggtgtggtcagtggcttgatcgccctggggctgactgcggtgttcagcaagtacggagccggtgtaatcttcgtcctgatcgcggccatcatgctgatggtggtgttccacgtctccccggtggatatcgtggaccggatccgtgagcggccccgggtggagtacgaggaggaggaactgcccgagcccaagccccgtgagcgccgccgtgcccccgagccggagagcgccgcccgccgccagcaggtgcctcagatcgatatccccgtggacgatggtccgctggtgggcaaacggcccgagcccaagcccattgagaagaaggagcgctttttcaaccggaagccctcggtgcccacgccggaccaggtattggccggtgcggcggctggggatgtgcctgaggcagaacccattgccgtgtccccgccgcctgagacgcctcaggaggcagctcaggcggcgaaaccggtgccggaacccatcccggagcccgcccctgccccgccggtgccggagattgagcgggagcccgctgtggccaaggtgaagagggaggaggctgcccaggcggcggccgaggtggcccaggacatcgcccgcaaactggaggaggggactccggcggcctaccagtatccgccggtttcgctgctgaacgagggggcaggcgtgtcgggcgccgacgtggccagcgagctccaggccaatcaggcccgcctgtccgacaccatccggtccttcggcatcgatgctaccatcgccaatgtgacccgcggcccatcggtgacccggtacgaggtggagctggaccagggggtgcggcttaacaagctgaccaacctggctgacgatatcgccctggccttgggggctaccggcgttcgcatcgcccccatcccggacaagatctccatggtgggcatcgaggtgcccaacaagctcgtctccccggtctatatccacgatgtcatcgactccagtgagttccgggacaacccctccaaggtttcctttgctgtgggccgggacatcagcaaccgcaatgtagtgggcaatattgccaagctgccccacctgctcatcgccggcaccaccggctcgggcaagtcggtatgtaccaactctctgattatctctctgctctacaaggccacccctgaggaggtgcgcctcatcatggtggaccccaagatggtggagctgggcatctacaacggcatcccccatctgctcattcccgtggtcaccgaccccaagaaggcggcgggcgccctccagtgggcggtggtggagatgatgaagcgctaccgggccttctcggagatcggggtgcgggatctggccagttacaacgcccacgccgccaggaccgagggcatggagaagatgccccagattgtggtagtcatcgacgagctggccgatctgatgctggtggccgccaaggaggtggaggagtccatctgccgggtggcccagatgggccgcgccgccggcatgcacctgatcatcgccacccagcggccctccgccgacgtgatcaccggtctgatgaaggccaatatcccgagccgcatcgcctttgccgtggcctcctccctggagtcccgcatcattctggacactacgggcgcggagaagctggtgggccggggcgacatgctctacttccccctgggcaccggcaagccccagcgggtgcagggctgcctcatctccgacgaggaggtggccgccgtagtgggctttatcaagcagaacagcggctcggccgagtactcggaggagatcatccatgagatcgagcagcacgccgccgagaaggagaaggggagcaagggcgtgggcggctccgcgccggacgaggtgggggacgactacgacgagctgctccccgccgccattgaagtggtggtggagaccggcatggcctccgtgtccatgctccaacggcggctcaagctaggctactcccgggcggcccgactggtggaccagatggaggagaagggagtcgtggggccctttgagggctccaagccccgccaagtgctcattaccaaggatcagtggcaggagatgcagtttaagcaggggatggtggacgctgccccagagcccgtccccgacgagctggaatttgagggcgacgccatcccccagagccgggatttgcccccgtttgatatggaggattgagagcgatggagcactatgtcatcaagcccgccggggaggcgggggaagcggcggttcacgccggcctgcgggcctataaccgcacctttgtctccgatacggcggatctctccctggtggtggaggacgaggccggacagatcatcggcggctgcgatgccttccggatgggggagctggccctgctggacgtgctgtgggtggcggagtcccgccggggcaccggcctgggggcctgcctcctggcccagctggagcaggacgccgcccgccagggtgcgaagcgcctggagctgaacacctttggatttcaggcccccggcttctatgaaaagctgggctaccgccgcttcggcgcagtggagcccgccgtgggggagtacggccactacttttacgtgaaagagctctaacaggacgcagataagccggatgggcgcggtcaaacgaccgcgcccatccggcttatgatgtagaaatggaggaaggaagtagaaatcagaatcagaagtcgacctcagtgccgtagtagatgcaggtaaacagcttggccatggtggcgggatcgatggggcgggggttggagccggtgcaggcgtcgcccaccgcgttggcggcgatggcatccagcttctccttgaactcgtcttcaataatgccgaagtccttcagggtgttggggatgcccatagcgtcgttcatggagcggatcttggcgcgcaggccctccaccagctcggcggtggtgtccccgacgacgcccatggtgcgggcaatgtcggcgtaccgctcggccacgccatcggccttggcgttgtaggcgatgacgtagggcaggtacatggcgttggccaggccgtgggtgatgtggccggtggagaaggccgcgccggtcttgtgggccatggagtggacgatgcccagcagggcgttggagaaggccatgccggccaggcactggccgtagtgcatctcctcgcggcagcccatgtcgccgttaaaggagcggagcagatccttctccacgatgtggatggccttgagggccaggggatcggtgaacacggtgtggagggtggacacataggcttcgatggcgtgggtcagggcgtccatgccggtgtgggccactagcttggggggcatggtctcggccagggccgggtcgatgatggccacgtcgggggtgatattgaagtcggccagggggtacttgatgcccttctggtagtcggtgatgacggagaaggcggtgacctcggtggcggtgccggaggtggaggggatggcgcagaacttggccttctggcgcagctccgggaagctgaagggggtgatcagatcctcaaaggtggtctccgggtactcgtagaaggcccacatggccttggccgcgtcgatgggagagccaccgcccatggagatgatccaatcgggttcaaactcccgcatgactgccgcgccgctcatcacggtttccacagagggatcgggctctacgttctcgatcaggcgggtctcaatgccggcctccttcagatagcccagggccttgtccacaaagccgaacttcttcatggagccgccgcccagcaccagcaccgcacgggagcccttcagattcttcagattttccagcgcattggcgccataatagatgtctctgggaagcgtaaaacgggacataacaggtacctccgtgtatacgtgaattttaaatcgttaaaagtttaacgatttaccggaacctattatggcacattgttaattccctgtcaatcggttttgcagaaactgtacgttccaaacttcgcgtttcagattaccagcgtcccattctcgtcctcctggagcaggagaatgcgctcctggcggccatcagcggcatccacgtagaccagcacgtggccgccggaggcgttctggcacttgaattcgtggcacagcacctcgtactcgccgccggtggggatcagggcgagctggtgggccagaacggtgagggagccgtccacctgggcggccgcctccgcctcggagacggcgggggcggggagggtacggtccccgtggttcatgaggtagccctccgactcaaagctcaccacatccccggtgtccagcgccacacccaccttgaccagatcggggtagcagtacacgccgtcctggcgggaggcaaagtggacagtgagtatgccgccctgccggatggagtagctggggtccatatcctggtagccccgctcggacagaaactccgcagccttctgccgtccctcctgggcggagagggacgcctcgcccaccggtcgggaggagagtacctggagcacctggccgccctgccgggtgacctctacatagagctcgccgccattcaccagggcggagaagccccaagtggggagctgtccctcgccctgggcgctgagggtgaagatgtcctcccgcagccccagaaaggccgccgcggccctgcgggcctccgcctcggagacctggggcagcccctccagcatcttgggcgtgcggcccgacaggtggtcggaaaaggggccgtcgtagatcagggcgggcacctcggggaagtcggcctccaccgtctggaaggccgagccggcggggagttcacccgactccgtggcgttggacagccgtgcctgaacggtctccacgtcctccggccggatggtgcccgcgtccagctccgccagcaggctctggagggcgccggacagggtggaggcggcccccgccaggccgcgcagggtctcccggtgcgcctcagtgcacgccgtctcgccgtaggcgtcccgggccagggccatggcgtagtcaccggttttggccaggaaggcggcggtctgctccagctctacgttgccgtagggcagctcgcccagagccgactgagcggccagcgccttgctgtaggcctgggcgcacagtgcggagaacagctcgggactggtggcgtaggtcacctttcggagggcgacatccagctcgcccgccgccgtggccagctcggtgaaggcgtgctgataggtgttgtccagcatgcgccggtactgtgccgcccgggcgtggccctgtactgcaaacccggcggtcaccgcgaaggcccccgccagaaagctggcggccagcacctgttttctccgtttctccatgacaaaacgcccccttttacggctaggttgcgtaaaagggggcgttttatgtgcggtaaatataagctaaagaagggggcgaagccgcgcaaaaaggttgagcagatcatcggaggccttcacgcccagaagaggaatttccaagccggccgcctgaatccgatcttccagcgcgccgaggaaaaggccacggccgggcatctcttgattgcggtcggacgtggtttccactccgcagttgggggagcggtttgcgcccagaaacgcaacgatgcgaaacccgtatctgtggtactccagcacctgatgcatgacagattcaactaggtcctccagtatccggctgggggcgggcgcctgcatggcggcacgaatacgggtgttttcttctgtgaccggggactgcgcgcccagcctgtttccacggtccagcccaaggcagcagagctccgggcagggaagctgaacgattcccacctgatgttccagaaagaactgcaccagctctcggaaagcggccggatatacagcggttccgtcggagatggcgttttggttcagcaggcagtgggctagaaacaccacttttctactgcggccgtcggcaaacatctgcatttttctcaccattcacggctgggctcagccgcccagcttgtccagcccaagacggaggcggcgcaggcactcgtccttccccagaatgtggcagatctccaccgcgccgccgggggtgaccgccttgcccgccgcggcaatgcgcaccggccacatgagggtggcgtttttgacctccagagactcggccaggccgatcagagcgtcatgaatcccgtccacggtccagtcggccagcccctccagggcgggaaggacggcctccagcatccgccgggacacctccggattggtcttggacttcttgttggtgaacagccccgcgtcgtagtcgggcagggcgtcaaaaaagtccagcttctctgggatgtcggtgagacgctcgcaccgggcctggagcagcccggcgatctcctccgtggagagggcgggattctgcaccgcctggcggatgtagggcagggcggccgcatggaaggcctcggggctcatctcccgaaggtagtgggcgttgaagtaggtcagcttttcgatgtcgaagatggcgggggacttggagatgccgccgatgtcgaaaatctccgccagctcggccagggtaaagaactcccgctcggcgtactcgcctctgggagaccagcccagcagggtgacgtagttgaccaccgcctcggacagatagcccatggcgatgagatcctcgtaggaggggtcgcccttgcgcttgctcatcttgttgtgggcgtcccgcatgacgggggagcagtggatataggtgggtacgtcccagccgaagccctggtacagcagattgtacttgggggcggaggacaggtactcggaaccccgcaccacgtgggtgatgcccatcaggtgatcgtcgatgacgttggcaaagttgtaggtgggcaggccgtcccgcttgatgagcacctggtcgtccagtgtggagttctctacggtaatgtccccgaatacggcgtcggagaagacggtggagccctccgcggggatcttctggcggatgacgtagggggcgccggcggccaccttggccctggcctcctccaggctcatgtcccggcaggggtcggccgcccggtcaaagttgccggagtcctcctcagactcggtcttttcgcagaagcagtaataagcgtggcccttctccaccagcagctcggcgtacttgccgtacagcgcccggcgctcggtctggatgtagggtcccaccgggccgccgatgtcggggccctcgtcccaggtcaggccgcacttgcgcagggtggcgtagatgacctcggtggcgccctccaccaggcggccctggtcggtatcctcaatgcggaggatgaacttgccgccgctgtggcgggcgatgagccaggtgtagagggcggtgcggaggttgcccacgtgcatgtagcccgtgggggagggggcgaagcgggtgcggacgccgtccttggggatgcgggcttccatctcctcaaaccagttcagatccattgaaaagactccttttttaaacttcatcacattattctatatttttcgcctaaggattgtcaaggccatttggatatgatatgataaaccaatatggggcattgtacccaatgagccaaaaatcactcgtaagaggtgtgttttagaatggaaaaccagaaaaaagtcatgctctccggcatccagcccagcggcgagctccacctgggcaactacctgggggccatcaagaactggggcgcccgggcggacgagttcgactgcttctactttatggccgatatgcataccatcaccgtgcgccagaccccggcggagctccgtcgccgcactctggagcaggtggcccagtacatcgcctgcggtctggacccggagcgcaacacaatttttgtccagtcccacgtgcaccagcacgcggagctggcctgggtgctggagtgctacaccatgttcggcgagctgtcccgcatgacccagttcaaggacaaatccgccaagcacgccgacaacatcaacgccggcctgtttacctacccctgcctgatggcggcggacatcctgctctaccagccggactttgtgccggtgggggaggatcagaagcagcacgtggagctgacccgcaacgtggcccagcgcttcaaccacgtgtacggcgacgtgctcaaggtgcccgagccctacatccccaagatgggcgcgcgggtgatgagcctgaaccagccggacaccaagatgagcaaatccatccccgagggctgcgtgttcctgatggataagccggaggacatcctgcgcaagttcaagcgggccatcaccgacagcgacactgagcgctgcgtccgattcgaccgggagaacaagccgggcgtgtccaacctgatgagcatttattccgccgtcaccggcaagagattcgaggccattgaggcggagttcgacggcaagggctacggcgcgttcaagcccgtggtgggcgaggccgtggtggagatgctccggcccatccaggaggagacccgccgcctgctctccgacaaggcctatctggagagcgtctaccgcgccggcgcggagaaggcgtcctacgtggcggaaaagactctgcgcaaggtctacaaaaaggtgggcttcctggcccggtaaagataaggagcaaattcccatgccaagaaatctggatcttcccctcatcggcatcgtggccgccgccctggtggtggccctggtggtggccctggtggccactccggtggtgaaaaacttggccattcgggtcaaggcggtggatgtacccaaggacggccgccgcatgcacgaccaccccatcccccgcatgggcggactggccatcttcctgggcttcctgctcagcgtcctgctctttctggacttgaacgcccaaatgcgggggatgctgctgggggcggtcatcatcgtcgtgctgggcatctttgacgatatctactcgctgcgggccatgttcaagtttgtggtgcagatcatcgccgccctggtggcggtgctctcgggcaacgtgatcgagacgctgtccaaccccaacgtgttttccgcggatccctactggaatctggggattctggcggtgcccgccacggtcatctggatcgtggccatcaccaacgccgtcaacctgattgatggcctggacggcctggcttgcggcgtatccaccatcagctccatgaccctgctggtgatcgccctggtggtcagcgagggcaacgtggccattctcatggccgccctggcgggcgggtgtatcggctttctgccctacaacatgaatcccgccaagatcttcatgggggacacgggctccaccttcctgggctatattctggcggtggtgtccattcagggcctgttcaagttctataccattatctcctttgcggtgcccttcctcatgctgggcctgcccatcttcgacacctgctttgccttcatccgccgcattgcccacggacagagccccatgcacgccgaccgcagccacgtgcaccaccggcttatcgacatgggcttcaaccagaagcaggcggtggcggtgctgtatgtcatcagcgccatcctgggcctgtccgccgtggtgctcaccaccagcgggccggtgaaggccatgctgctcctgctggccctgtgcttcgcgggggcgatctccgcccggattttcctgggcgccaacggaaagaaaaacgacggtgagaagccggacgagaagggggaagagaaatgaagcaggtgcgcgtcatgaccatcttcggcacccggccggaggccatcaagatggctcccctggtggcggagctccagcgccgtccgggcctggagccggtctgctgtgtgacggcccagcaccgggagatgctcgattccgtgctggagatcttccagctccggcccgattacgatctgaacatcatggagccccgccagaccctctccaccatcacctccaagtgcctgctgggcatggagggggtgctggagcaggccagacccgacctggtgctggtccacggggacacctccacaaccttcgccggggcgctggccgccttttaccaccagatcagggtgggccatgtggaggcggggctgcgcacgggtgacaagtattctccctttccggaggagatgaaccggaagctggtgggcgacatcgccgacctgcacttctgccccacacgggctaaccgcgccaacctggagcgggaggggatcaccgacggggtgtttgtcacgggcaatactgtgatcgacgccctcaagaccacggttgtgaaggattatcacttcacaacggatcttctcaaccatctggactacaccggccgaaagatcatccttgtgacctgccaccggcgggagaactacggccagcccatggccaacatcatgacggctctgcgccgggtggcggacgccttcccggaggtggagctggtctacccggttcacctgtccccggtggtgcgggaggcggcggggaagtacctcggcggccacgaccgtatccacctcattgatccgctctccgccgacgagatgcacaacctgatggcccgggcctatctggtcatgaccgactcgggcggactacaggaggaggcccccgccctggggcggccggtgcttgtcctgcggcgggagaccgagcggcccgaggcggtggaggcggggaccgtgaagatcgcggggacggaggagaacgtcatcttctccatggcctccgagctactcaccgctccggcggcctacaccgccatggcccacgccgtcaatccctacggcgacggctttgcctgccgccggatcgccgacgccattgagtggaaattcggcctgcgggccgaacggccggaggaattccggacataacgcggtccgggcggagaggagggaacaggcgtggagcgcagaaagcggaatctgctggtggtactcatcggcatcgtcatcgtggtggccatggtgtccagctttggactgggcctctttgcaccggacacggcgaagatcgtgctgcccacgccggaggtctcccagcagccggggggagagcctggcgagcagagcggtctggtgctggtggacgtgacgccggagacggtgcagagcgtcatccgggataccctctcccgcccggaccgctacactcgcgcggtcacgatcgaggacttctggggcgagggagagagcggaaccacccatgcggacgtgtgggtggacggcggctggacccagacggaggcagccctgccaggcgggacggtacgttactccatcgtgggcgacgggcagttctggctgtggtatggaggcgaccgcacggccctttccggtccggcggacgggcactcggcggatctggagggccagcgcatccccacctatgaggacgtactggagctggagcaggatgccattgccgccgccggatatgaggagaagggcggcctggcctgcatttatgtggagacaggcgaggacgcgctgggctatgtggagaagtactgggtctccgtggacagcggcctgttggtgtgcgccgagcagtggaaaggggaggagctgacctaccggatgacctcctatgcggtgtcgacggaccgtaccctcttcggactcacggagtttgcgttgccggacggcacagtgctgcatacggtagaggaataacgggcggccggcagggggccggccgcccgttattccagccccagcagcaggagcagccccagggtgatgaccagttccatgtcgtccccctccagaaagaggaacaggaggatgagcaggagcaggacatcgccggtgtcgaggccgtccagcttgaggccccgaagcagcttgcccagtcctgaggcgggcttggcggattccggcgcctcggcgtccggctccggcgggggcgcgtcgggagggacggtctgggtgggaggggcatcctcctccacgacccgggtgtaggaggcaccattgggtatgtagcggttatacatcgtccttcccctcctctcggcggctctggaagagctggaaggccacccggatgacccgggccagcttggcgatctgaacggccttgtcaacctttgcataccgctccggcttgacaaaaggcttgagagcattgagcagggccaccttgcggtcgtcagtggcggagtactcggaaaagaggcgcagaccggcctggagaagctggggatccagctcggacagggcggaaagcgggttgctgtctccgccgccgcccagcatgcccagcagggcggacaagtcggtggcgccggactgcccggtcgcctctcccgcgggcccggcctccgccggttctgcggcggggggtggagcagattctcccgcgtgctccccagtcagcgcctgcgcgagggaagcgatctggcccatggcctggggatcgctgaggatcgcgttgagtttctcctcgaattcggccatgtctcccgccccctcccgccgaaatgcctacttcttctccttgggcaccgcctggctgatgttttgtaccagccgggccccctcgctgctctgcatgacctgccgcaccatgcccagcagggcgccggtgtcccccttggcggcggcggtcttgaggccgtcccccgcgttctgactgagcagctccatcaggcgctgggtgtccggggactgcatcaggctctggagcagggccttgttcttcagcaggccggcggccttggggtccttcatgagttcgtccagattggactggggatttgccataccatcagctccatctcaattatttataagaccgatcactccattctatgagtgacttttcagaaggtgataccttgaagctggtacttttttccgactcccacggcaacgtggccaacatggccgacgtggtgcgcctggagcacccggaccgcgtcctccatatgggggatctggcccgggatgcggaggagctggcccgtcagtttcccgatattcctgtgacctatgtgccgggcaactgtgacggtcgccggccggatctgccggacgagcggtgctttaccctggaggggtgtaaaatcctgatgacccacggccacacctaccacgtgaagatggggcccggggcggccatccgcgcggcccgagaggcgggggcgggacttctgtgcttcggccacacgcacgaggccctctgcgagttccagaacggcctgtggatcgtcaaccccggtgccgccgggagcctggttcagcccacctacgccgtggctgtcctggaggagggcggcgcggtgtgctatctgtcgcatatctgagaagggagaggagcagtatgctgctggtcattgatgtaggcaataccaatatggagttcggcgtctaccggggagaggagctggtggggagcttccgtctgatgacggacgccaaccgaacctccgacgagttggggctctggctgtgccagtacttccagcgcttcggcctggagctggggcaggtggaggatgtggtgatcggctcggtggccccccaggtgatgcataccctgagccgggcggtgcagaagtatgtgggcaagaccccgctggtgctggacgaggtgctggaccccggcctgccctacgtggagtgcgacagcgacgagcgcctgggccccgaccgggcggcggcggacatcgcggccatcgccaaatacggcgcgccgctggtggtgctggacttcggaacggccaccaccctggacgcggtgagccgggagggggtgtacctgggcggctgcatcaccgccggggtgcaggtgtccatcgacggcctgttccagaagaccgccctgctgccccgggtggagctggtgaagccggacacagtgctgagcaccaccgccgtggggcagatccaggcgggggcggtgctgggctacatcggggccatcgagtacctcatccgccacgccaaggaggagatcggccagccggacaccaaggtggtggccacgggcggcctgtcccggctggtggcggacaacacagagctgatcgacgtggtggatccccaactggtgctggacggcctgcgcatcatctatgagcgggcgaggagataaaacggatggggaggagaggcaatgagtgagatcaagcggaacgggcacggagccatggacatgactcaggggtcgccgacccggctgatcgtcttgttctccctgcccctgctggcgggaaatgtgctccagcagctctacaacatggtggattcggtggtggtgggcaactatgtgggctcctccgccctcaccgccgtgggcgcgggcttctctatcatgttcctgatatcctccctcttcctcggattctccatgggcgcgaccatcacgatcgcccagtatgtgggcgccggggaccaaggggcggtggggcgcacggtggacaccatctacagcgccctgctggtgatcattgtgcccctgaccctgctgggcgtgctggccagcgggccgctgctcaccctgatccgggtgccgcaggaggcctatgagcaggcgcggacctactgcatggtggtgctgggcggcatcatcggtactctgggctacaacatgaacagcggcatcatgcgcggcctgggggatagccggacgcccctgatcttcctgttcatcgcctgtgtcatcaatattgtactggatctggtgtttgtgctggtgttctcctggggcgtgttcggcgtggccctggccaccattctggcccagatctgctcctgggtgttcggcatcttctacatcaaccgaaagtaccccttcctccatatccgcctgttccggatgcggctggaccggcgcctgctggggcaggtgatccgtctgggcataccctccgcgatacaggagtgccagttcgcggtgggcatactcatcatgcaggcgctgatcaacggcttcggcaacgattttgcggccggcttcaccgccgccaacaagatcgacaccttcgccttcatgcccatcgagtccttttccatcgccgccaccacctatgtgggacagaacatgggggcggggaggctggaccgggtacagaccgggacccgccgggccctggtgctgggcactctggtatgcctggccatgtcggcggtggtgctgcccctgcggcggcccctgctgatgctcttcaaccgggagcccggcgtggtggccgccggggaggcatacctgctccgggccctctccctgatgttcattctggccatgatgtttatcatgaacggcgtcctccgcggcgcaggcgccacgacagtgcccatggtagcctccatcatctccctctgggcggcccgcatccctgtggcctatgcgctggcctatttcttcggcccggaggagatctattgggcctatcccatcggctgggccctgggcctgctgatctgcgtggtgtcctattgccgtggaaggtggaaggacaagtgcattgtgagctaggcgccgcaggaatagcacagaggccccgccggtctgtccggcggggcctctcctgctggagtcaggactttgtgtagaaatcgcaccaggggcgcagggtacagttggggcagtcgggcttgcgggccatacacaccgcccggccgtggagcaccatccggtggcagaagtcgttggactcctccggcggcagggtgggccggagctgctcctccaccttggccgggtccttggtgccgtcggtgaggcccagtcggccggtaatgcgtatgcagtgggtgtccgccaccactacgccgggggtgtggtacacgtcgcccaaaatcaggttggcggtcttgcggcccacaccgggcagcttgagcagctcctccatggtgtcgggcacccggccgccgtactgctccaccagcatgcgggaggcggctacaatgtcccgggccttggcccggaagaagccggtggaatggatataggtttccacctcggcggggtcggcctgggccagagactccagggtgggaaagcgggcaaagagggcgggagtgaccatgttgacccgctcatcggtacattgggcggccagacgcacggaaaagagcagctcgtagggcttggggtactggagcgaacagagcccttcggggtatagcttcttcagctcctctacgatagccaggacgtcctcatggtttttcatcgaatcacctcttagacaatatagcatagaatccgccaaaaaacgagagccttttttcaaatagggcgattgtaatttaaagtgggattctgtataataaacggtacagtcaaatttgagaaaggtggagtcggatttggtcaaggatatcatggagtttcttgccggacaagaccccgaggtaggggcggcggttcaggcagagtacgaccgccagcggcgcaacatcgagctgatcgcgtcggagaactttgtcagcccggcggtgctgtccgcggcggccacagtgctcaccaacaagtacgcggagggctatcccggcaaacgctattacggcggctgccagtgcgtggacgtggtggaggatatcgcacgcaaacgggcctgccagctctttggggccgaccacgccaatgtgcagccccactgcggcgccaacgccaactatgcggtgtacgccgccctgtgtgagcacggcgacacggtgctcggcatggatctggccaacggaggccacctgacccacggctcaccggtcaacttctcgggaaaaaactataatatcgtggcttatggcgtcaacgaccagggctacatcgactacgaccaggtgcgcgatctggccaaaaagcacaggccccgcatgctcctggccggcgcctccgcctatccccgcaccatcgacttcaagacctttgccgatatcgcccacgaggtgggggcctatctgtttgtggatatggcccatatcgccggcctggtggctgtggggctccacccctccccggtgccctatgccgacgtagtgaccacaactacccacaagaccctccgcggcccccggggcggcatgatcctctgcaaggaggcgctggccaagaaaatcgactccgccattttcccgggcagccagggcggccccttggagcacatcatcgccgccaaggccgtggccctgggggaggcgatgaagccggagttcaaagcctaccaggagcagattctcaaaaacgccgccgccctggcgaaggccctcatggccgagggcttcgatctggtcagcggcggcaccgacaaccacctgatgctggtggatctccgccctgcccgcctcaccggcaaggagatggagaggcggctggacgaggtgaacatcaccgtcaacaagaacgccatccccaacgatccggagaagcccttcgtcaccagtggtatccgggtgggtacgcccgccgccaccacccgcggcttcaaggaagcggacatggaggtcatcgcttccatcatgtggcgtaccgccaccgattttgagggcaagcaggacgagctgcgggaccaggtggcccagcttaccggcaaatatcccctgtacgaataaacaaaacggagtacgcatgagcagagacggcggcctgtcgaaaaatggcttcggcaggccgccgtttttctcttgacaaacgcctttgatgtggtatatttataatataaagagcgaaatacaccacataaaaggagtgtatctgaatggctgacaaacgatggtatgggctgattggcctgctgtccctgttggggttcgtaggggtgttcaccggggagaaatacttcctgggcttttttgcctttgcggtggactttcagtacttttttgccaaggctgacgagatgcaggagggccagattctccgctcggccgcacggggctttttcgtgggcatgggagtgacggcggcggggacgctgctgctcctggcccttggcggagggacgacggaggcgctgtacctcagcagcgggctgggctggggagtgggagtgatggtatatgccctctccagcttcctgtgcggctgccgggaatggtggaacgcgcgggcatgattaccaatcgcatcaaggagtaccgggcccgcttcgacctgaagcaggaggagctggccaggcgggtgggagtacgccgggagaccatcggcaacctggagaaggggcgctataatccctcgctggtgctggcctggaacattgccaaggtattcggcgtaccgattgaggagatctttaccgtggagggggatgaatagtatccgccgctctttacgggggctcgaacatgtgttagaataggggcgaccaaacgaggagggatgcccaatgtcataccggcccctggccgacgagatccgcccccagagcctggacgaggtggtgggccagcgccacattttgggggagaacggcctgctgcgccgcatcattgaggggggacacatccccaatctggtcttttatggcccctccggtaccggcaaaaccacggtggccaacatcatcgccaggcgcaccaaccggcccctccaccggctcaacgccaccacggcctccatctcggacatcaaggacatcatcaaggacatcggcaccatgctggcccccgatggggtgctgctctatctggacgagattcagtacttcaacaagaagcagcagcagtctttgctggagtttatggagaacggcaagatcaccctgatcgcctccaccacggagaacccctatttttacgtgtataatgcggtgctcagccggtctaccgtgtttgaattcaagcccatcgaggccgtcgacgtgctgcccgccatcgaccggggcatccggctcatgggggagcgcctaggtgcggaggtggactgcgaggatggcgtgcgggagcacattgccaccgcctgcgggggcgatgtgcgcaagtccatgaacgcggtggagctgctgctcagctccgcccggcgggagggggagcggctggtggtcaccctggccgatgcccagacggtggcgcagcgctccgccatgcggtacgaccgggagggagacgaccactacgacatcgcctctgccctcatgaagtccatgcggggctccgaccccgacgcggccctccactatttggcccgcctgctggaggcgggggacatgaccaccgccatccggcggattctctgctccgccagcgaggacgtgggcatggcctatccccaggcggccctgatcgtcaaggcctgtgtggacaacgccctccagctgggcctgccggaggcccgcctccccctggcccaggcggtggtgctgctggccaccgcccccaagtccaactcggtctacgaggccatcgccgccgctcaggccgatgtgcgggcgggcaagaccggcgactacccccgccacctccagaacgtccacgccgactcggcggggatggagcgggagcagggctacctctacccccacgactttccgcgccactgggtgcgccagcagtatctgcccgacctgctggcggacaggcactactaccgctacggcgacaacaagaatgagcaggccgccaggcggtactgggacgagatcaaaggccccgaggcataaaacaggagcgcggcatagccgcgctcctgttttttcaggcgaatatggtctccgcgcccaccttgacacagccctcgggggcgtatttccacttttcaatttgtccctgggtgagaaaatactccagcggcgcggggacgttcagcgggggtagggtgtcgatggccagcagcttgatcttcatccgctcaggcaggatagccttgatgtagacggacacacggtccccctcccgcaggccgcttttccgctccgccaggccggacagattcggggtgagctccacaaaggccccatactccttgagcccgcggacgataccgggcaccgtcatgcccgcctgaaagcgggcggcgttctccgcccaggtgcccagcagctcccggtgggtcaggtatacccgccccagcttggggtccagctcctgtaccacggcgaagatggcctgccccacccggaaccgctggtcggggtgggggatgcgggagacggagatgttttcaatcccgatcagggagggaacgccgcagccgatgtccacaaaggccccgaaggactccaggtgggtgaccacagccgggaggatacagccgggatgcagcccggcaagcatggcgtccagggcggcctgctgggcccggcggcgggagaggcggggccggaggacgccctcagattcctccagagctgtgatctgaaaacagaccggcttgcccacccgggagagaatggcgatctcccgggtggtgccctctgcaatgcccagcgcggcctcctcccgggggagaaagccggtaaacggccctacggacaccagcaggttgtgggccccgtcgcagagctgggcaaccccctccagcaccgtctcctcctccatggcccggcggaggccgtcgcgggaggcgcaggcggcctcgttttccggtgtatgtaacagacgcccctcgggcaggaagcggctcctcaatgtgaccaaatcctttcgtttccacagtcatttttttccgatagactactatatgcacttgccggtcctgaattgacagggtataataggcgttacgaaggaaacgggagggacgcggatatggacatccatgtgggcgatgtgctggaattgaagaaggagcacccctgcggcagccggcggtggctggtgctgcgggtgggaatggacttcaagctgcgctgcgagggctgcggccacgagctgatgctcccccggagcaaggcagagaagagcatcaagcgggtgctgcggacggaggagccccaggcatgaggtacgaggggacggtttaccgcccgccgggagagtggaagagctatctgctccaggtgacggtggggtgctcccacaacgcctgcaccttctgcggcatgtataaggacaaacgctaccgggtgcgcccgctggaggagatttttgaggatattgccctggccagggcggcctatggagacgtgaagcgggtgttcctctgcgacggggacgcggtggccatggacacagaggagctgctggccgtcctggaccggctgtacgagaccttcccctccctcgagcgggtcaacgcctatgccggcccgggcagcaccctgcgcaagacggaggaagagctggcggccctccgccgggcggggctggtgcgtctctacctgggggtggagagcggcagcgacgcggtgctgcgggcggtgcgcaagggggtggacgccgcgggtatgctggaggccggacggcgcataacggcggcaggctttgacctgtgggccatggtgctgatcggcctggccgggcagggagaggcatcccgagcccacgctctggacacggcggccctgatcaacgccatgagaccccgtcacttctccgccctgacttacctccccgagcggggaacggtgctgggtgacgcggccgcgcggggggagttccggctgctcaccgcccggcaggccctggaggagacccggctgctgctggaacgcctggaggtggagccccttcatttcaccagcgaccacgcctccaactatctgcccttgaagggcggactgcccgaggacaaggcccggcttttgtctctactggacggggcgctgtccggcgggcaggccgtccggccggagctgtggcgggggctgtgacacaaagagaggagtattgagatggacggacaacacctgcatattctgtggaccaacgccgatccggtggtctttgacaagatggttctgatgtacgcggtgaacagcctggtacggggctggtgggagaaggtgacggtgatcctctggggggagaccgcccgtctggcggccgcagatcctgcggtgagggagcgcattgtcctggccatggagcagggggtgaaattctcggcctgtattacctgcgccaaggagcttggggtggagcaggcgctgcgggacatgggcctggaggtcatctcctggggcccgccgctgaccgagctgctcaagacccgggcgcccctgctgaccgtgtgacggaaacgaaaaagaagctgacgcgcatagcgcgtcagccagacggtcaataagccctcctgcgaaaggattcggagggagggatagtgtgaaagggaaccgtcagagttccctttcgcgttggatcaaacaactttttgaagcttttctaaagcttcaaaaagttcgacaggctggctgacgcgcgcagcgcgtcagcttctttttttgcccgtcccggatttgaccttttttgtggacgtggccctctataatgggaaacgacaggccagaggacagggggggacgcggggtgacggtgatctatctggatgagctgttcctgctcaactttgtggtggactatctcctgctgctggccgccggacgcctgtccggcgagatactccgccggggctggctggctctgggggcggccatcggggcggcctacgccgccgccgccgtcctgccgggcatgggctttctcctccatcccctctgcaagctgggggcggcggtgctggccctgctggcgggctacggcaaaagccgccgcctcctgcgggtgagtctggtattctttgccgtgtccgcggccttcggcggcggcgtgttcgccctccagctcctgggcgggcgggggctcactctgcaaaacggcatcttttattccgccatggatctgcgccttatcctcctgtcggcggcggggtgctatgtgctcatcaccctgctgttccaacgcaccgcccggcacagcggcctgcgccgggagctggtgcctgcggtgctcaccctggaggggcggcgggtggcccttaccgccctggtggatacgggcaacaccctcacagaccccgccaccggacgtccggtgatggtggcggagggggagaaggtgggggctctctttcccgacgggcaggcgccggctcccgaggagctgcgccgcccggtggaggccctggagcggctgggccgccagggctggcaggggcggtgccgcctgctgccctaccaggcggtgggggtggagtgcggcatgctgctggccctgcgcctggacggggcgcgggtggggacggaggactacggcaagctgctgctggccctgtcccccacccgcctcaccgacgggggcggctatcacgcgctgattggtacataaacagacgatgtgggaggatggctatgaacggttggagactgcgcctgtttgtgggcgtggagtggctgttggcccggctggggctcaagctgccggggaagatcatgtatatcggggggagcgacaccctgccgccgcctctgtccagggacgaggaggcggagctgatcgcccgtctggacggtggggacgagggtgtgaagtcccagctcattgagcggaacctgcggctggtggtctacatcgcccgccgctttgaaaataccggcgtgggcattgaggatctgatctccatcggcaccatcggcctcatcaaggccatcaatacctatcagcccgcaaaaaacatcaagctggccacctacgcctcccggtgcatcgagaacgaaatactgatgcatctgcgcaagacggccaacctgaagagcgaggtctccttcgacgagcccctgaacaccgactgggacggcaacgagctgctcctctccgacatcctgggaacagagagcgatctggtgatgaagcccatcgaggcggacgtggaccgccagctcctctccgacgcgctggagaagctggaggaccgggagcgggagatcatcaccctgcgcttcggcctggacggccgcccggagcgcacccagaaggaggtggccgaccggctgggtatctcccagtcctacatctcgcgcctggaaaagcgcatcatcagccggctcaagcgggagattctgcggatgctgtaggggcggtcactccgccttcggccgcccggctcgccgggcagccggcttcgtcagatcgtagctcagttccagcaggcggatgatctcctcctccgggagcgagccgtctaggaggagggtgacccagttggacttgttcatgtggtaggcgggcaggatgcctgggacgccgagaagggagccggccaggagcgggccgcattttacatcgagaatgtcgacggactccggccgttccagccccagcctggttccgggaaactccagaaagaccgcaaaccacttggcgttttcactgtggcgcaggacggcatagcgggggaatttagcccagaggtgctccggttccgcgcccagatgtacctgggcatactgtaggatacgctctttcagtgtggacggttggttcatggcgctccctccttacagatccttggccttcattttctccagctcggccttttctgccgccgtggccttgttccgcccgatcagccaggcagcggccagtcccgcggcacatggaatacctggaagcaggccggaggcatccaggagcgcgatggacaggccggccagcagcaggaggatcccgccgggcagcagagcccccagcaggggctttctccgggtacccagatagtattccagcgccaaaagggccagggaaatgaaaagaactgcaaactctctcatatcggtttcccctccttctcgtatttgtcgatgatcagtttggcggtctccacatcaatgcgggagtccaccgccagccccttgataaaggcggtgaagggctcctcctcctgttggtcggccagttcgatcttctggatgagcttgtccagccgcagacggaccgtggggtaagagacctggtagagccgggcgatctccttcagagagccggacttgagcgcgaaatttttgagaaaggcggcgtcctccggttcgagagcgagcatccactgggggattttattaagctccaatttaattctccttttatttttagtttaattatattaaatataacataaataaaataaaagtcaagtataaaaaagaggtgcggctttttagccgcacctctttttgagcttacaggcccagggtgtccgccaagtcgtccttcatgtggtccatcttgcggacggcacgccgggccatccggcgcacgtcggggctctgcatgctcttggcggccaccgccataccgatggcggcgcccgccagcacgccaaggcccatcccttccagaaacgcatgcttcgtcatattgcttcgctcccttctgcatcagcgtccgctgttattattgccggaaacgcagaaaaatccgttgctaaaaactgtgtttcaaggtataatgtatgcggcatgatacggttcaatttgtggaggggacgggggtggacctgtacccttttttgctgtgctctgcatggcggtttggaacggtttcaatgtgaaaggagtgatttcgtgaagctgctgatacggcagggacggctggttgacccggttgggggcatcggcgggattatggatgtgctggttgaggacggaaaggtagcggtcatcgggagcaacatcaacgagcccgacgcccgggtgatcgatgcccggggactgaccgtgtgcgccgggctggtggatatgcatgtacatctgcgggagcccggctttgaatataaagagaccatcgagaccggcgcggcggccgcggcccatgggggctttacctccattgcctgtatgcccaacacccgcccggccaccgacagcccggagcagattgcatttgtaaagcagagggcggcggaggcctgcggcgtccatgtctggcccattggggcggtgacccggggacagcaggggcaggagctcaccgactttgaggccctgaagggggcgggggcggtggccctgtccgacgatggggtgccggtccagaatgccaatttaatgcgggacggcctgatcctggcccaccggcaaaacctgacgattctctcccactgtgaggacgccgacatggtgaagaactacgcggtcaacgaggggcgtatctcccgccagctccggctggctggccggccggccatcgccgaggagctgatggtggcccgggatgccatgctggcggaggagaccggcggggcggtgcacatctgccacatctccaccgccaaatcggtggccctggtgcggcggtacaagcgcaagggcgtacagatcacctgtgagacctgccctcagtatttcagtctcaccgaggacgagattttagcccagggtgccctggcacgggtgaacccgcccctgcgcaccaaggcggacgtggaggccattatcgagggattgaaggacggcaccattgacgccatcgctaccgaccacgccccccactccgctgaggaaaaggcccggcccctgaccgacgcccccagcggcatggtgggcctggagaccgcccttgctgtggcgctgacctacctctaccatacgggcgagatggccctgtccgacatcctgcgccggatgaccatcaacccggcctgcatcctgcgcctgcccaccaaggggcggctggccatcggctcggacggcgacgtggtgatcttcgatcccgacgaggcgtggacggtggaccccaaccgcttcgcctccaagggacgcaacaccccctttgggggaaagaccctgcgggggaaagtgaaatatacgattgtaggcggcgagatcgtctaccgggaaggagaatgagcgcgatgtcctttgatgtattgcaggagaaaattatccgtatgaaaaaccccacagtggtggggctggatcccaagcccgagtatgtgccggagcacatccgcaaagcgtcctatgaacagttcggcgagaccctggagggggccgccgacgccattttccagttcaacaagggcctcatcgacgccctgtgcgatgttgtacccgccgtcaagccacagtccgcctattatgaacgcctgggctggcacggtatggccgcgctggaaaagaccatccgctacgcccacgagaagggcatgtacgtcatcgccgacatcaagcggggggacatcggctccacggcggaggcctacgccgacgcctggctgggagtcaccaaggtgggggaggccctctgcgggggcttcaacgccgactgcgtcaccctcaacggctacatgggcgcggacagcgtcaaccccttcctaaaggtggcgggggaacgggacaagagcgtgtttatcctggccaagacctccaaccccggctccggcgagctccagaacgtagccgccggggagggagacaccgtctacggccttatggccgacctcattgagaagtggggagccggcactgaggggaagtacggctatacccgggccggcgcggtggccggggctacttatccggaggagctgcagaagctccgcgcccggatgccccacaccttcctgctggtgcccggctacggggcccagggcggcaccgccgaggatgtgcagtatgccttccaggacaagggccggggcgccgtcgtcaactcctcccggggcatcatctgtgcctggcagaagacgggcaaaaacggcgcggactaccaagaggccgcccgcgccgccgcaatcgccatgcgggacgacatctgccggtttatcgccatccagtaaaccaaggaaacagagggggacacacccatgccaatacaaaagctctgtaccgtcgcagaggcggtgcgcctcaatgaatttgcctgctctctcaccctggaggccgagggaatggagccccaggggccggatcagtttgtccatgtgaagtgcggccacagccgcctgctccgccgccccatctccatctgcgactgggggaagaaccggctgcgcatcgtctttgaggtgcgtggggagggcacagcgtggctcgcccgccggaaagcgggggacaccctggacgtgctgggccccctgggccgcggcttccggatagggcgggagaaccgctgcctgctggtggggggcggtatcggtgtgccccctatgctgggctgcgccaagtggacggcgggacggagcaccgccgtactgggcttccggtcggcagaccgtgccatgctgaccgaggaatttcagaaatgctgtaaagatgttttgctttgcagtgatgatggaagcctaggacagaaaggctttgtggatgctcaggtgcgggctgttcttgaaaaggataaaaactttacagcggttttggcctgcggccccaagcccatgctgaaaaacgtggctgccgtggcggcggaatacggcgtaccctgccaggtgtccatggaagagcggatggcctgcggcgtgggggcctgcctgggctgcgctatccagatggctgacggcaccatgaagcacgtgtgcaaggacggcccggtgtttgacgcggaggaggtggagtggaatgtctaaggtggagcagtccgtggtgctggccggggtgcggatgaaaaaccccgtggtggtggcctccggcacgttcggtttcggccgggagtacggccggttttatgatttgagcgagctgggcggcatctgctgcaagggtctgaccctctgccgccgggagggcaacccgcccccccgcatcgcggagacccccatgggcatcctcaactccgtgggcctccagaatcccggagtggacgcctttatcgcggaagagctgcccgagctgagaaagcatgatctggcggtaatcgccaacatttcgggcaataccccggaggaatacggcgtcatgtgcgaaaagctctccgccgctggggtggacatgatcgaggtcaacatctcctgccccaacgtgaaggcgggcggcctggcctatggcaccaagccggagctggccgccgaggtgacagcggtggccaaggcccacgccgggagagtgccggtgatggtgaagctctcccccaacgtcaccgacgtcaccgagatcgcccgggccgtggcggacgcgggggcggacgccctgtccctcatcaacaccctgcgggggatgcgcatcgatgtgaacacccgccggcccattttgaaaatgaacaccggcggcctgtccggccccgccgtactcccagtggcggtgcgcatggtatgggaggtggcccaggccgtgaagctgcccatcctgggcatgggcggcgtggccaagggggaggacgcggcccagctcctgctggccggggcctccgccgtggcggtgggtaccgcctgctttgacgatccctatgcccccatcaaggtgcgggacggcctggcgtccctggcggagcgccaggggctgaacaaggtatccgactttaccggggcggtcgtgccgtggtgaatggaggtgcgcgccgatggagcggaacacctgttatctgaacctgtccgtggcggaggcggcccgcaccgtgtccgagctggtggaacgtgcggggctgtccagccggatggtggattgccatgagctgcgccagggcgagaatctctgtggcatggtgctgctttttgaaaagtactttctccgcatgggcagccgcctcaccctgacggcggtgctggacaacctggaggggcgcacccggctctactggacggtcaccggcggggcgggaatgctccggcagagcggagacagcaagacagcggcggaggagtacagcgaggccctgcgggagaggctgttctcctatctggacggctgaaggcgggagggaaaaagatggaggattcgtattctgtctccctgggactgcgggagtgcggggaagccatccatgcggcggtgaccgacagcgtcaccggggagctggttgaccactatgagctcacccacccgggcggcggcacctgtgtggtggcggtctatgagaagcactactaccgggcgggcaaccggctcaccctcaccgtggttctggacgactttaccggccgaacccgcgtccactgtatcagcggcggcgggggcgaggggctgttccgcttcgactggggggcggcggagtccttcgagggagtcgtccacgacgcgttgagccgctatcggctttgaggagaagagacatggcttatacagaagtgttctaccccaagctgcccatggagggctgtgcggaccgcattcaggatgtgatcgtgcgcagtgggttcagcaacggacaggtgtcggagcgctaccggctggagacccccggcggctcggttctggttctggtgttggtcaagtatcttcacagaaccggaagcgagatggtggtgacggcagtgctggacgagctggaggggcggctccgcctccatctcaccgccgccagtgcgctgggcggcgtgggagatgagtgcggcgaggagaagcatattgtctccaagctggaaaagactctggaggcatgagaacaatggatttcagattcagaggtgcagtaaagcgatgacaaccgtctatctgatccgccacgcggaggcggaggggaatctctaccgccgggtacacggctggtacgacagcctgatcaccgaaaacggctaccggcagatcgcggccctgcggggacggtttgcggacatacatatcgacgcggtgtactccagcgacctgttccgtacaatgactaccgccaaagcggtctacctgtcccacggtctggagctgcacaccgacccgggcctgcgggagatcagcctgggcgcatgggaggacaagccctggggcgagctggagcggtgcgacgccatgaatctgatccgcttcaatcacagctccccggacttccgggtggaggggggagagaccttcgcccaggtacaggcgcggctcaagggcacggtgctccgcctggcggcggcccacccgggccagacgatcgccctgttctcccacggcaccgccatccgctgcctccaggcggccctgcgggggctgggacccggcgagatggacggtttgggccacagcgacaacaccgccgtcacctgcctggaggtggagggggagcgcacccgcaccgtctttgagaacgataactcccacctgcccgacgagatctccaccctggcccgccagcggtggtggaaggagcgggatggaacaagcggcgatgcaaacctgtggttccggcccctcaacctgaaaaaggaggggacggtgtaccggacggcccggcatgaggcctggcaggatgtgaacggcccggcggtgcccttcgacggggacgcgttccagagggacgccctgcgctgctggaaacgggccccggagcgggcggtgatgtgcgccatgcagcgggacgagacggccggcctgctccagatggatctggaccggggggccgccgagggtgtgggctatatccccttcctgtacatggaccccgcccaccggcgccagggcctgggggtgcagctcctgggccaggcggtatccacctaccggcctctggggcgggaccgcctgcggctgtgctgcgcgccggacaacgggattgcccagcgcttctaccagaagtacggctttgtcaagatgggagaggagccgggtgcccgcggcccgctggatgttctggaaaaatacattggatttgaagccaaggaatcatgaggaacctatgaatcaatttttgactgtcaccaaagcggatctggcggagcggggctgggaggagtttgacttcctggtcatcaccggcgacgcctatgtcgaccacccctcctttggcccggccattatttcccgggtgctggaggccgagggctaccgggtagcaatcctggcccagccggactggcgcaaggccagctcctttacagcgttgggccgcccgcggctgggcgttctgctctccagcggcaacatcgactccatggtggcccactataccgtggccaaaaagcgccgccatgacgacgcctattccccgggcaatcgggccggcctgcggcccgaccgggcggtgatcgtctatgccaacaaggtgcgggaggcctttggggacattccgctggtgatcggcggcctggaggccagtctgcgccgctttgcccactacgactattgggaggacaaggtgcgccgcgccatcctctttgacagccaagcggatctgctggtctatggcatgggagagcgcgccacccgggaaattgcggctcgtctggcctccggaacgcccatccgggagattacagatgtaaagggaactgcctttattgccaaagatccttctgcgtgtgcctatccaaaggtggagtgcccctcctttgaggcggtatccacggataagcgggcctatgcccaggccaaccagatccagtatgaggagcacgaccccgtccggggaaaggccatcctccagcgccacggcgaccggctgctggtggtcaatccgccggccatgccgctcaccactgccgaactggacttcgtggccgagctgccctacgtccgggaaccccaccccatgtatgacgagatggggggcgtgcccgccatcgaggaggtgcgcttctccgtggcccacaaccggggctgcttcggggcgtgcaacttctgctccctggccttccaccagggacggatcatcacctcccgcagccatgagagcgtcctgcgggaggtggaggccctgacccgccaccccggcttcaagggctatatccatgacgtgggcggccccaccgccaacttccgccgccccgcctgcaagaagcagatgaaggcgggaatgtgccggggccgggcctgcctggcccccacgccctgtcccaacctggacgccgaccacaccgactatttgatgctcctgcgcaagatccggcaggtgccgggggtgaagaaggtgttcatccgctccggcatccgcttcgactatatgctccaggacaagagcggcgagttctttgccgagctggtgaagtatcatgtctccggccagctcaaggtggccccggagcactgtgtgagcggcgtactggactatatgggcaagccccatatcgaggtctatgagaagttcaagggtaagtacgagcggctgaaccagaagtacggcaaggagcaatacctggtgccctacctcatgtcctctcacccgggctgtaccctggacgacgcggtgcggctggcggagtggatcaaccgcaccggccgccagccggagcaggtgcaggacttctaccccacgccgggaaccctgtccacctgcatgtactacaccggcattgatccccgcaccatgcagccggtgtatgtgccccgtgatccccacgagaaggcgatgcagcgggcgctgatgcagtggaagcgcccggagaagcgcccgctggtgcgggaggccctccaccgcacccaccgggaggatctgatcggctacggcaagggctgtctcctgcggcccaacggccccgccaagccgggggagaatccctccggccggggcaagcccgcgcccgccaagggcaaggcccagcccacccgctcccaccccgcccgcaaggcgggctgggccgtggccaagcccaaaaagaacgcccggccgaagaaaaagaaataagaaacgagcctcagacgcttgcgtctgaggctcgttttttagggaagcaccacccgctccagccgggggccgaggcgggagagcagctcgttggtgatggtgcccgccgcctgggcggcctcctcggcggtaaggacggcgtccccgtcccggccaatgagagtggcggtatcgccgggggcgacgccttccatatccgtcacgtccaccagaagctgatccatacagataagtcccactatgggggccgttcggccgtggaggagcacccggcccgccccgttggagagggtacggggccagccgtcggcgtagccgatggacagggtggccagcacagtgggccgatgggcggtgtaggccccgtcgtagcccgccgcctctccggcggccagggtgtgaagctgggataccctggcccgcagggagagcaccgggcggagggggaggaccgccgtggtggcgtcgccgggggcgctgaggacgccgtacagggcgatgccggggcgggcgcagccgcaggggaggccggggtagttgagcaggccgtagctgccctggaagtggacggttccgggggcgtgtccggcggagcgcaggccatccaccgctgcccgaaagcgccggagttgctctcgggtacgggcttggctggcctcgtccagccgctccgtgtcggccaggtgggtgaatacgccggtcacccgcagatgggaacagctgtaaggggcggtcaggctctgggcgtcgtcccaggggatgcccagacggtggaggccggtgtccaccttgaggtggacggccagccgccggccgcatgcgtccagcgcccgggcgtgttcggtgctcaccaccgtctgggtcaggcggtaccgggccagcaggggggccagctccggcccggaatagccaagcaccaggatcgtcccccggacgccgccccgccgcaggcggacgccctcggcggcggtggccacggcaaaggcgtccgcgcccgccccggcgcacagccgggcgatctccaagtccccgtgcccgtaggcgttggccttgattaccggcataaggctggccgccgccggcagaagggagcccagggcggccagattgtgccgcagggcggcggcatccagctcgatccaggcccggctccggggggagggggcggggcggatgcgggcgaaggggagggccagaagggcggagagcaggaccacggccagatagtgtacaagacagttgtccaccagcaggccggtgaggcccaccaccccggcgccgccccggatgaggacgatgcaccaggggtggaggacatacaccgccgccgcccagccccggagggcgggcgcggacgggagggacaggcgctggagccaccgcaggaggaacccgacgcacagggggagggagaggtagagggcgtcaaagcgggccagggcaaggcgctgcaccagcaggccctccgccgtcagcagcgccagggagaggagcagtccggccccgtaccaagccgcgctccggcgggcaggcctcagggccagccagccccccagcagcagaaagacaggggggaagaacaggccgttgcgtgtgtagtcgaagaggaggaacagggcctcgtacccggcccggaggggcggcagggcggcggtgaggccgaaatagctgtcccccagcagcccggcggcatagagcagaagggcgggaagccacgcccagcggggccccaggatgcgcagaaggccgtacaccaggcaggcccccagcaccagggcggggaagtaccacaggtggtaaaaggtgccgttgaagagcacatctcgcagcagggcgaagccgctctcctccagggtgtggttgtagaggttcagggggaggtagagcaggaccgcggccccgtaaagcagcagcagctttttgacaaaggggatcagggcggcccgcccctcccggagcaggcggggtaccaggaaccagccggacaccgcgaagaagaaggggacggcgatgcgggccagaatgtcggtcaaaaggtagttggcctccccgttcagggacagaagagggccggtatggatggcgatgaccagcagggcggcggggacgcggaagcggtcaaagccgccgagcgactcggttttcatcccgcatccctccacagggtgagcaccacgccgccctcgttggtgtcacagcgctggcaggggacgtcggcgggcagggtcagggtgtccgccgcccaggcgggcaggtagtaaagctcaaacagacgccccagcccccggaaacgaagaggctcccctcccagcgggaagtcgtgaagccactccagatattcctccagtaccagatgacgctcctccatcagcttggcgtggggccagcccacgtaccggaagtgccacggctcgtatccgatgccggtgacagcctccttccccttggggtagcgaaggataaagccgaagtcggcggcccggcggcgcagggccccgcaggggccggagtcggggaaggcggggcagaggaagtccacctccggcctattctcgcccagatcaatggccagcccggtctgatgctcgctgcaccccgggcgggccacataggtctcggtgaaggcactgccgtgctcggccagggcgtcgtcccagatggcctgctgctcggtttgagggcggtagccgctgaccggaatgatggtgcccgcgccgtccactgcggcgagaagctgatccaacatcactttggcccgctggtggagacgtacctcggtttgaccggagcggacggaggcgaggtcctccgcggcgggctcctccggcaggggatgggcgcggttgaccagatacaacgtacctttcatgcgtccaccgccagtccgatgagacggtccagcagagggccgaactccaggcctatgctccgcatcatgttggggtagcggctgtgagctgtgaaaccggggatggtgtttacctcgttaaagacaatgcgcccgtccggcgtgagaaacaaatccacccgtgcaaagccggaacactccagcgcccggtagatcaactgggcggtcgcctgaatttctgtttccttctcctgggaaattcgggcgggcatgtgtatgctggaggtgatcaggccgtacttctccgtgtagttgaaaaaaccgccggagagctcgatctcgtccacatgtcccactgtcagaacctcattgcccagtacggcgcagcccacctcaaagccgggcacggcctcctcaatgaccaccttgctatcgtgggccagggcggcggcgacggcttcggccaacacgccgggctcctccaccttggtgatgccaaaagaggaacccgcccgtgcgggcttgacaaacaggggataggtcaggctggcagtgcgctccggcagggtgtccagcccttctccggcgcgaaagaggatggaagggggcaccgctacaccggcggcctggaccaagcggtgggccacgtccttgtccatgcatagggcggaggcgagcaccccgcagcccactacggggatacctgccagctccagcaggccctgcaccgtgccgtcctccccgtttttgccatggagtaccggaaaggcggcgtccagatagcgggtagagggcccggcgggggcgatgagcagcaggccgtggacgccgcggtcgggggagatcaccgccgggacggtatggcgggcgtcggtgtgccaagtgtcgtccaacagggcgtccaccggcccctggtagagcagccagcgcccatcccgtgtgatgcccaggaggacgggctcgtacctgtcccgatccagatgtgtgagtaccgcgtgggcggactggagggagatctcatattcggtggaagagccgccgaacaggacggccaatgtgatttttttcatgggggaacacctccgtcagaatgggctctcgcctgttcttttattatagagggagtatatcaggcgtttctgacttccaaccgaccaaaggcttacaatcctctgaaccaaatcttaaaaaaagcagtcaaaaagcggtatggtctcagaccataccgctttttgtcattttgtggctcgctttacaccgttgccgatgtctttggcggcgtcgccaacgccgtcgacgatgtcgcgggctgcatcgcccacaccgcgggttacgtccttggcggcatccccggcatcccgggccgcgtcacgggcggtcgagccgccgtccttcgggtgttcggtaccctccggggcgggcgtggtggtattgggggctgcgggggtgttctccggcatggtgctgggctgggaggtgacaaccggcgagggagtcggagtcacatcaggggctttatcgcgggtacaagcggtcagcggcagagccagagcgagcccgatgccgagcagagtccatgtgcgtttcatgtgtgttcctcctgttccttccaatggatttcgttcagatggattcacccagcacctagtatacgttattccacgctgattacacgcgggaagaagtgtcagagaaaaaagggttgcaatttccagaaagatctgctaatataataataacagtaatagttactgtttatgatgtgccgagaaaagaggtggctcatgaacggcaagcgctattcccggcagcgggaattgatctatgaggctttgcggcagacagaacagcaccccacggcggagatgatttatcagtggctgaagccggccaatcccagcctgagcctgggaaccgtttaccggaatctaaaccttttggcagatgaaggtgcaatccgccggatggcatttccggtggagcgctatgacgcaaagacaatgccccaccctcatttctgctgtgaccagtgcggagcggtttacgacctgcaccttccctacgatgcggagctggaccggcaggcactgctggccagcgggcacgatgtcacgggccatgaggtggtttttcacggaatttgcacaaagtgcaaacaacttcattgatcttttcttaaaatatgataagatgtgaccatcaaaattagaaaggaaggttgttccaatggaatttaagctgtatcgctgtgcccactgcggcaatgtcattttcaaggtggtcgacaagggtgttcctgtcatgtgctgcggccagaaaatggaggagttcgtcccaaacaccaccgatggtgctatggagaagcatgtccctgcggtggaaaagactgcccatggcagcggctattccgtcagcgtgaaggtgggcagtgtggagcaccccatgctccccgagcactacatctccatgatcgcggcggtggatggggacaccgtcaccatgaagttccccaagcccggcgaaaagcctgagctgaagaccttctgccgcagtgagaaagtggaggcgtacgaaatctgcaatctccacggcttctggaagggcgagggctgagaaggcccgtatttcactcaaaatctgatttagaaaggaaggctgagcattatggagctgaagggaagcaagacggaggccaatctgtggaaggcgtttgcgggagagagcatggcccgcaataagtatacttattttgccagcaaggccaagaaagagggcttcgagcagatcgcggccatctttgaggagaccgccggcaatgagaaggagcatgccaagctgtggttcaaggagctgggcggcatcggcgataccgctgccaacctgaaggctgcggcggcgggtgagaacgaagagtggacccagatgtataaggagatggccgaaaccgcccgcgaggagggctttgagaagctggctttcctgtttgacggcgtcggcaagatcgagaaggagcatgaggagcgctacctgacccttttgaagaacctggaggagggtgtggtctttaagcgcggtgacgagtatgtctggaagtgccgcaactgcggccacatccacttcggcaaaaccgctcctgaggtctgccctatctgtgcccatccccaggcctatttcgagatccgcagcatcaattactaagaagagacgtacgacaagcgctgtataaagcgggtccgacctgacggtcgggcccgctttggccgtcgaaaaccttattttaacagatagactgccccgccggagacccggcggggcagtgtgcttttactttagcaggcggatccactcgctgttgtagagctcacggatttcaggggagagacaggcaaagctctccgtcttggcatatacgtcgtcggtagggtaggcatagagatcgttggcggtctcagggtccagctcctcacggacactcagcagaggggaggagtaccagatctcctcacagttcttgaggccggcctgagtggagcacatgaagttaatgaacttctcggcgttctccttgttctccgcgcccttggggatgcacatggcatccacgtagagattggtgccctcccgtggcagggcaaaggccaggtcagggttgttctcctgcatggtaagaaaatcgccgtaatagtaggcgccgatgagggcgttttcaccctccagcttgtcgaaaatctcgtccatgacgtaggactgcaccaggggcttctgctctaccagaaggttggtggcctccttgacctgggcgggatcctcagtgttataggagtagcccagcttcttgagggcaatgccaatggcgtcgcgggagttgttgaacatcagaatgtcgccggagagctcctcatcccacagaatgtcccaggtttccacatccttctccgcagggtcaatgtaggcgctgttatagatcacgcccagcaggccccacatgtaggggacggagtagaggttctccgggtcgtactccgggtttttcagattggggtcgatgtcggcaaagttgggaatattgtcaaagttcagcggctccagcatgtcctcctcgatgagctgaccgatcatatagtctgaggggatgatgacgtcgtagccgccggcgccgccggccagcttgccgtagagcgcctcattggactcaaatgtctgataattgaccttgataccagtctccgcctcgaaatcctccagaacggacatatcaatgtactcgccccagttgtagacgttgaccacgccggcagtgccggtgttgccgctggaactctcgccgcccggtgtctcggctgtgccggaaggcgatccgccggtacagccgctcagggccgccgtgctgagggttgccagtgccagtacaagtgcaatttgctttttcaattcctttcgtttgcccctttcaaaaaataatattatatcaaggcgggctgcctttgatatccgtcagttcccatgaaccatgcggcgcttgtcctgccgggtctggcggacattgacgatgaccagcagggtgaccaccaccacgaagagcagggtggacagggcgttgatctccgggctgacccgcttcttggccatggaatagatgaccatggacagggtggagaaggtggagccggcggtgaagtagctgatcacgaagtcgtcgatggacatagtgaaggcgatgagcaggccgttgatcacgccgggcatgatctcaggcaggatcacctttcggaaagccagaaagccgggagcgcccagatcctgggccgcctcatagatattggggtcaagctgctggagcttgggcatgacgcagaggatgacgtggggaatgtcgaaggtcaggtgggcgatgagcagggtgacaaagcccaggttccacttgatgcccaaggcagctcccagtgtgccgttaaagacgttgaccgccagtacaaagaacagcatcatggacacgccggtgatgatgtccgcgttggtcagggggatgttgttgatggtggtgaccaccgtgcggctgcggcggcggaagttggtgaagccgatggcggctgccgtgccaatgatggtggagatcactgcagccagaatggaaaccgccagtgtgacccacagggcgtccaggatcatggagttctggaacagctccttgtaccaatccagggtgaagccggaccacaccgaccggctcttggacgcgttgaaggagaacacgatgagcacgaagatgggcaggtagaggaacaaaaagaccagcagcataaagaagcggctgccgatgcgccgggactgtttcacaggaacgacaccccctcttctccctcgccaaagcggttcataatggccatgcagaccaggacgatgaccatcattaccagggcgatggcggaacccagccacgggttataggtggtccccatgaattgcatctcaatgagatcgcccagcagcaggctcttgccaccgcccagcagacgggagatgacaaaggtggacaccgagggaatgaacaccatggtcacgccggagagcacgccgggcagggagagggggaaggtcacccggcggaagacagtgaaggagttggcgcccagatcctgggcggcctcgatcaccttggggtcgattttctccagaacggagaggatgggcaggatcatgaagggcaggaagttgtagaccatgcccagcacgatggccccctgggtgttgatcatctggaaggggccgataccaaacaggcccagaaagctgttgatcagcccccgcttctccaacaggaacatccaggagtaggtgcgcagcaggaagttcatccacatgggcagcataatgagcatcatggccacccggcgcaccgcaggactctcctgggccagccagtaggacaggggatagccgatgagcagacagatgaacgtggcaatgatggccagtaaaaaggagcgcccgaacacgccggtatactgggccatcgtagagaagttctccagcgtgaagccgccggcctggctcgtgaaggcgtaaaagacgatgatcagcaggggagccaccacaaagatggccatccagatgacatagggaacggcgatgcccttactcttcatcctcgattccctcctccgggccctcattcagctcgtcgtactctgagctgtaggagctgtagtcgccgaacataccggagtagcggctcttcttcatgatgtggaagccgtcggggtcgatcttcaccccaatcctggcccccactggggagaagtcggtggtctggatgagccacttgaagcccttgaagtccacgatgatgtcgtaatgcatccccttgaaggtgacctcggtgacagtgccggtgagctggccctgctccacggggacaatgtcgatgtcctccgggcggatgaccacatccacaggctcgttgggctggaaaccgccgtccagacaggggaatttcttgccgtacatccccaccaccctgtcctcatgcatgatgccgtcgatgatgttggactcgccgatgaagtcagccacaaaggcgtttttgggctcgttatagatatcctggggggtaccgatctgctggatacgcccttcattcatgaccacgaccgtgtcgctcatggtgagggcctcctcctggtcgtgggtgacatagacaaaggtgatgcctacctgctgctggatgcgcttgagttcgatctgcatatccttgcgcagcttgagatccagcgcacccagcggttcgtccagcaggagtacctgggggcggttgacaatggcacgggcgatggcaacccgctgctgctggccgccggagagggaattgaccgaacgcttgccgtacccggccaggttgaccagggccagggcctcttccacccgctcccgcagctccgcctcgggcactttgctgatgcgcagaccgaaggccacgttttcaaagatgttcatgtgggtgaacagggcatacttttgaaagacggtattgaccttcctcttatgaggaggaacgtcattaatcctcacgccgtcaaaaaacacgtcgccggaggtcggcttctgaaagccgccgatgatacggagcgtcgtggttttgccgcacccggagggaccgagcagcgtgaggaattccttgtcgttgatataaaggttgatatggtccagaatgacgtcgtcgtcaaatttcatgaagcaatccgacaggcggatcagttccttggacatgtatcctcccccatttctaaaaggtagtaaagggcgcacccaaaccggcggttgggtacgccctaatgacgaaacaaatcatatatgttcttgcgaaaaatgtcaataataaaacgaaatattttcagggattttatacccgctccccggtgggaaagtattccgccacgaaatccacctgctccacggtgaacacgcggccccgcaggtactccagcagcccggcgtcggtgggaaaggtgaaggccagcttataggaatagagggcctggaaggaacggccgtacttcttgttgtcccgctcccggccatacttgccgtcccccagcaggggatggccggcggcggcgaactgggcgcggatctggtgggtgcggccggtgagcagctcgcactctaccagggacagtccgcccgccgtccgcagagtcttatataaggtggcggcgctcttgccgccggggacggggcgggagaagaccttcacctgggcctggtcctcatccttgagtagaaagccctccagcttcccctgggatggcttcatgcggccgtggacaatggccaagtagaacttggcgatctcccggtccctgatcttctggttaaggatgcgcagggtctcggcgttcttggcggccatgacgatgccgccggtgttgcggtcgatgcggttgcacagggccggagtaaaggagtgctcgtcccggggattccactccttcttttggtagaggtaggcctgaatgtgggtgatgagggtgttcaccttttcgtgctcgtccgcgtggcacagcaggccaggccgtttgttgagcagcatcaggttttcatcctcatagacgatgtccaggtggggcttgaagacgctcagaaaggcgttctcctccctgggctgctcgaagaactcgtcgttgatgtataactggagtatgtcccccaactggagccgcacatcccgctgggagcccttcccattgaccttcacccgcttgaggcggatgtacttctgggccagcggcacggggaggagggggagggtcttggccagccagcggtccagccgctgcccggcgtcgttttttccgatggtgaattctttcatagtctgcctcacaattcatttgcatccattataacataagcgcacaaccggggaaagaggggaaagggcttgcgcagcacggtcaagctgtggtatcataagaaggaaatccgccgtaaagtagtacagcctgccggactttgaaaaaatgtgggtttccacgaaaaaaatatttgacattggccgcgggtttcgttataatgtctgctgtgccattgtgtgaggtgtaccatgcgactggatctccgttctattcttcatgttcccggggcttcgctccccttctcgtttgcgttggatctgtccggcctggacttctatggagagcatccatttgccggcccggtacaggtgtctggtacagtgcgaaatcaggcggatgccctcgttctggaggggacggcggagactacgctggagctggtgtgcgaccgttgcctcaagcccttctgccgggatatgcgcgttccggtggacagcctgctggccgagactctggaggacgaggaaaacgacgagatcctgcttctggataacggtacggtggatctggaggaggtctttaccaccgctttggtgctggccatggactccaagcatgtgtgctccgaggattgcaaggggctgtgcgccacttgcggcgcggatctcaacgagggaccctgcggctgcaagcctgaaattgatccacgttttgctgccctcgcgcagctgttggataaagagtctgagtaagttttgcccggccagggcatgaacctaaggaggtgtcatagatggcagtccctaagagtaaagtgtccaagcagcgccggaacaagcgccgtagctccgtgtggaagctggagactcccggcgttaccacctgccccaagtgcggtgcgttccgtctgccccaccggatgtgcaagagctgcatgagctacaacggccatgagttcggcaaggtggaggctaccgccgaggcgaagtaaatagcccgaaaagaacgaggggaatcacccctctttctttttgcccggaaatggggtaaaatagaagcgtggagcgcccgggagcagggcaacagagaactgcgcagaccgaaaaacaggctggacgcagtccagcggtattttcggcggagcagtgagcagttgcccgtcgcggagggcgcgcagcgtgacagcgtcgccgcaagctccagatccttcgcttcgccgcaggcggcaaagctcactccttccgctgcggctcctttccccaccgaacccgcggccgtcgccgctgggcttcggcgggggccccggaagtgggggagcgcaccgcgccgtatggccgggcggcggccccggagaatcgcagcagaccacaagggccgcccttgcaataagacgtaggggcgggtgcccacacccgcccgccgggccgatgaggacatcggcccctacgaaaagaaaggggcgggcggctgcagagccaccctctgtcactttatttttttgaggagcccaaaacgtatgagcctgacgaaaatcaaatccgtggacgcccacagtccggcccagagggcgggtgtcgggccgggtgagacgctgacccacatcaacggacgccccattgtggatgtgctggactataaattttttgcttacgacccccggctggagctgaccctggtaggaggggacggccgcagccgcaccctgcgggtacgcaaggcggagggggaggagctgggcctcaattttgagacctatctgatggataaggcccgctcctgcgcgaaccggtgtatcttctgctttgtggatcagatgccccccggtatgcgggagaccctctatttcaaggatgacgatgcccgcctgtccttcctgatggggaactatatcaccctgaccaacctgtcggagcgggagattgcgcgcatcgcagagctgcgcatcagccccatcaacatctcggttcatgccactgatccggccctgcgggaggccatgctcaagcaccggcgggcgggggagtgtctggccatcatggagcgatttgctgcggcgggcatcaccatgaactgccagatcgtggcctgccccggcgtcaacgacggccccgccctggaccgcaccctgcgggagctgggggcactccacccggcggtgggcagcgtggcggtagtgccggtgggggtgacccgattccgggagggcctgtgtcggatcgacccgtacactccggcccaggccgcggcggtgctggatcaggtggaggcatttgccgcttctttcctgaaaaagcacagcacacacctggcgtggtgttccgacgagttctacctgctggccggccgtcccctgccggaaaagggatactatgaggacatggcccagatggaaaacggcgtggggatgctccgcctgctcaccagtcaggcggctatggccctggagaacatggagctggaggaggccccgccgccgtttgccattgccaccggcgtgtccgctgcccccttcttgcagaaaatcgttgacatgtgccgggaaaaatgtggtaatataataggaaatgtctatccggtggtcaaccgctttttcggggagaccatcacggtctctggtctgattaccggacgggatctgatagagcagctcaaggggaaggcgctgggcgagcggctgctcatcccggacagcatgctccgggcgggggaacggatcttcctggacgacgtcactgtggagcaggtggaggaggccctgggggtgccggtgacggcccttccggctgacagcggctttgacctggtggacgccattctggggctgccggtggaggcgcccgcctatgccctgccgccggaggacgactattatcgctacaacccgtgacagagagagtgagggtgctattatgaagcctttgattgcaatcgtgggccggcccaacgtgggcaagtccatgctgtttaataaattggtgggccagcggttgtccatcgtggaggatacccccggcgtcacccgcgaccggctgtacgccgaggcggagtggagaaaccggaagttcgacctggtggacaccggcggcatcgagccctccgccgacagccagattttggcctttatgcgccagcaagcggagatcgccatccagcacgccacggtgatcctctttgtctgcgacatcaagaccggcctgaccgcctccgaccaagaggtggccaacatgctgctgcgctctcagaagccggtggtgctggcggtcaacaagatggaccaggtggggatcaccaacccagacatttatgagttctataaccttggactgggggatcccatcgcagtttccgccgtccacggccatggcaccggggatctgctggatgcctgtatggagtatttcccccctgaggacgaggaggaagaggaggacgatgtcatcaaggtggcgatcatcggcaagcccaacgtgggcaagtcctccctggtaaaccgcatcctgggggagcagcgggtgattgtcagcgacatggcgggcaccacccgggacgcggtggacagctattttgagaaccagaagggcaagtacctgttcatcgacaccgccggtatgcgcaagaagtccaaggtggacgaccgcatcgagaagttttccgtcctgcgggccaccatggccattgagcgggccgacgtgtgcctgatcctggtggacgccaacgagggagtcaccgagcaggataccaaggtggccggtctggcccacgaggcgggcaaggcatgtatcatcgtggtcaacaagtgggacgccattgagaaggatgacaagactatggaccacatgcgccaggacatccgcagggacctgtcctatatgacctacgcccccattgtcttcatttccgccctcaccggacagcgggtggaccgtctctttgacctcatcaactatgtcaatgaccaggcatccctgcgcattaccaccggcatgctcaacaccgtgctggctgacgccaccgcccgcgtgcagccccccaccgacaagggacgccgtctgaagatctactatatgacccagatcggtatcaagcccccccactttgtttgcttctgcaacgacgccaagctgttccacttctcctaccagcgctatctggagaaccagatccgctccacctttggcctggagggcacgccagtccggctgaccattcggcagaagagcgacaaggagggatagtcatggcagatcctacaacagttcccacgggaatacagcctaaccttcccgccgcactgagtgagctgggggcggccctgttgcttccggccctgctggtcgcagtgatcgcctacttctgcggctgcttcaacggggcggtcatcgtctccaagtatatcctgcgggacgatgtgcgtacccatggcagcggcaatgccgggctgaccaacttctaccgcaccttcggcgggccgctgacctttgtggttatcctgaccgatgtgctcaaagcagtcgtggctgtatgggttggcatcctggcggcaaagtatttggtggcggatgagcttctggtagtggcgcttggtaagtactgggcgggagctttctgccttctggggcacatgttcccctgtatgttccactttaaggggggcaaggggatcctctccggaggcaccatcgctatcatgattgattggcgggtggcgctggtggtgtgggggggattcctgatcttggccgcgctcaccaaatgggtctccctgggctccatctgggccggggcatccttcccctttgccacttggtttgtgtaccatgacgtggtgctgctggcgctggccattctgctgggcggcctgatcgtctggaagcaccggggcaacctgaagcgtattctgaacggaacggaatccaagttcagcctgcaccataaaaaagatgagggggcgccgaaagcatgaagatcgcagtgatgggcagcggcggttgggggacagccctggccctggttctgctggagaacggacatgaggtcaccctgtggtcctatagggaggaggagtccactatcctgcgggagaagcgggaaaaccccatgctgaagggggtgcccctgccggatggactggcgttgacctctgaccgggagtgcgtgaagaactgtaaggtggttgtgcttgctacgccgtcctttgcggtgcgtaccaccgcccgtgctgtggcggccctgttggagccctctgcggtgctggtgtcggtgtccaagggcattgagaaagatacctctctgaccctgaccgacgccattgctcaggaagtgggggaggggcatcccatcgtggccctctccggcccttcccacgccgaggaggtgggccgtggcgtccccactgtggtggtgtccgcctctcgagacaaggcggcagcggagctggtgcaggatctctttatgaatgagcggttccgtgtttacgcctccgacgacgtagtgggtgtggaattgggcgctgcgttaaaaaacgttatcgccctctgtgccgggatctgtgacggcatgggcttcggcgacaataccaaggccgccctgatgacccgcggcctgacggagatcgcccgcctgggcgtggccctcggcggccgcagagaaacctttgcgggcctgtccggcgtgggtgacctgatcgtcacctgtacctccatgcactccagaaaccgccgatgtggcattctgatcggccaaggcacccctgccgctgaggcggtaaaggagattggcgctgtggtagagggctactatgcggccgccaccgcccgcgccctggctcagaaggcgggggttgagatgcccatcacagaggcggcctatcaggtattatacggcggacgggataccagggccgtgattaaggagttgatgacccgcgcccggaagcacgagctggaggatagctgggtctaaaaaggttttcgaaaaaaatcgagaaaaattgaaaaaaacacttgcatcttttcgcaggatgtggtaatataatcaagccgtccgatgagggcggcgacttccgggtgtggcgaagtttggtatcgcgcttgaatggggttcaagaggccgctggttcgaatccagtcactcggaccaaacaatgataatccgaactacattatccaagtgggtaatgtgttcggatttatcatttctattgaatatgtgctttgatggacaagggcgggactatcaccccgcccttgtttttttagatcttttctgatattttgtgtctgtcagacaaatcaaagatttgcaattgaaaattatgcttattgtttcactgcaaggcaataattcgtattgtcaaaagcactcatttgatttttaggattggcctcattatagagcgcaaagtattgctctgttattccctggggctccaagtgctcatatatcaaaaattcatgtgctgaaagcaattgttcgatatcagagtaggaataacatgccaacattttttcgtttgcaacacccgccagcatgaattgcttttttgttcgttctccggctttttcagtatagctgttttcatctggataatcaaatataatggaactgcctttcgccacaatactacttatagaagaaattaccgattcgaaggattcctttgagagataataggcgacaccaagaatggaacagtaacttattttatcactattaaacgagttgtgattttgcatttctttcttccatgttccttttgtgaagtctgcttcaatgtagtgaacattgtcgggaattacaattccggcacttttcagccgctcttgtttatctcttgcggtagccggatggtctacctcaaaaatttgcaatgcctttgcccataatggttgccgatacgcaaaagtgtcatatccggctccccaaattaaatactgttctgttcccgtgcgaacagcccactcaagagatttttcggcaaaagccgccctgccaagtggcgagggagatagttgattatcaacaacccatcttaatgcctgttctggttctccaacaaatgatggattgaaaaatcctattccattcgacatattctttgctatttgattaaattcttcatcagtcagtaaatctcttgccaagctgtcattaaaaattgtaacctcattgtttagcgcatgatacgcccttgagaatgcgcttatcagtgcggttaagcttttttgctccattaaaaacacctcctgtatacttaatacatccttgatacaaaaagctcaagacttgaaatttccctgattttgtggtaatataaaagcacaaaaagggataattttatgaattttatagtaacgcccagaaataaactatggtataaggcgggagcatcgttgctgatgttcccgccttatgtattatgcctgttctgttgcgttggcgtcccgccgagccttccactctgcaaactcccgttgcccttcctcgctctcgaaaaggcttgaatttccgggagcaggacacgggccagggcttccgattcatggaggggaactcccgtgccctagttaaggcttgcgtgaatcgcccggccagatgtccattacctcccgaagctggctgtcctggcggcgcgcctttcatcgctattcacgtgggggttgtatctgaaatactgtgcatttagttgtcagtgggagggggaccctctaatctattaggcggattttagggaaaaggtcctctcttgcagagaatttttcaaactattttaaatttagcaaaccttgctgatccccacgctctcgaccctggagattttttactgacgctgagaatgtaataagcatgaacgcgccgggcctggacaggcgggagttggacgatggccgcatggagggggtcccgatcttcaccggtctctagaggctgctccggggacagcggcgggtagggcatgtcggcctcaaagccgtgatcagtgtccatggaacgctcgccatgatcctgcttgtggcgcttgtagctgtcacacaggcggccaccaatgaaagagtcacggtaatttcgtctgatgcctccagaatgacgcgctcggtcaaatggggatagtaattgtttagaatgatagttttcatttttagtctttatttcggtgttcagcagttgacggactggcagatcgaaatggaggatggcggggagcggcgcccaggccagccgcccccacctctggccgcgatggccagaggtagtctggtataacaacgtccgcacggcgcaagaccatgcggacagatataacatgattttctttcggacactggcagatttctgctacaaggccagacagggataccggcagaaaacgaccattttcgcagttgaccgcggaatggccccctaatagggccggactttctttgacgaataaccatcagtcagcttgctgcatggtaacaacatggcagtatcctcctataatccgccgtatcctgcgcataagtaaacggcagcttattgctaaaccgccgttagtacaagaaatccgagcatgagggaatatgtgcccagcggcggttttttctttcctgccgctgggcagataacttttgacgtattttttacatagctgtcatcaggctaaatagaatccccctgtgaattttagctgtcatgcagacctttacgaaatctctcggattaggatgaagggggtaagctggcggtcttggcctgcgggattatctacaatcagagccaaaagctgagagtcgggccaattctggagctgttcactttttcccagaagttcgacagtcaaatcgttggcatccacgaccatcatcacaattccggttttgagatatacctcatcacagaccttatccggcttactgggaatacgaatcccaatatgcgcatactccgggatgtccctcccccaaaagccgtctagtcccctcacctcatcgtccagcatgtcgtaaaaagtaccgtggatgccgcggagcttattaaggccggcgcagacagccgccttgaggacctttcccaagccgcaaaagttgatggcaaactgcattttaacaggcaggcccatcccgggcccagccgccgtctgatggacaaagcgtgaaagaagcttggcccagaagcctggtttgacctgttcctcagtcactacccgcccttggcatagggcaatgactttttcgctggcggaaagaatatctcccggttggtagactggtatgacatatctctccaggaggtcgatataattctcgcctacctggacgaaatgtgttgtaatcgcatggcgggcatacgtcttgccgttagcttgaatggtaacggcctttccttcgttggcgtaaaaatccatgggaaagattcctcctatataatacgcaaattgaaataagtatcctggtacgttgcctccttactctccgcgctttctggcggggtacagtttagaccattttataaggcttgaaatgcccatagattgctgatttgcggtttcaaagtatcataatcccacagcatattgctccgctccgtactgttgggatcattgactgtaaactgtccgtcctttatgccggtaatcacaataaaatgtccggttgttgtaaaatctccgggccgcatactgcaaatgatggggcggccttccttcaagacaccctccataatcgattttgtcaagggcagttcctccccgattactccgaagtgcttcgctccttcgctcataagtgtccaggcagtcccagcgccgggaacatagtatccctgctcactggcgtattgggccactacatacggcgtaatggtgtcatcgcccgttaagctggtaatcaccatggataagcaggctggcccgcatccactgacggcaacggagctgttgccatagtcgccgtaaccccagcgttgatcgtattgcagaagaagcggaacttctccgacttcaacctctccgacagtttcagcaaaaacctgccctactttctctggatactctaaaacaaaattcagcatatccaggtttctggacagcattttcaaaatatcctcgggatagatttcgcagttatctatgacctgctgaacccgctgatcctggctcaccaagtcttgcagtttctgccagacttcatgatccatcggcgcctgggtaacatctgtacttttttgcctactgtctgccgtcccgcacgcatcatgccgggattgattggtgcccgaggaagatgcgccgctatcattctgaaataaggttcctctaaaaagccagactcctgcgatgacaaatgcaaaaacaaatgcgcaccaaaacatcactacccgctggttgcgtttgtgactccgcctggttttttggccgaatgtttctttcataggtatgctccttttctaaaatgcaaaataaaccacgctcctgacagttatcattgtactgaacaggagcgtggcaagtttgaatattcagttgtttgtttcttgagaaaaacttgaggaaggatagatgttttctgaatctgccgcaggcagttgaaccgtaaatgtgaccgtgtcattttcgctcgatgcatggatcgtaccgccatgtaaaagaatgatttcctttgcaattgccagcccaagccccgtgccgcctgtatcagaggcgcgggattcatccaagcggtagaacttatcaaagagggaggacaacttctcagccgggattgtattccccttgttttgaaaaatgacgaagacatgtcctctcactttctcggtagagattctgatttctgtattcagatagctgtatgccgccgcattttttaatatattgctgaatacacgggccaactgatccgcatccgcacaaactgttaaatcttcatcaatttccagtttaattgagagcccgcgctgagaaaagaccggagacaactcatcggataattgtatcagcatataggagaggtctatcgactcttttattagcttgatttgctgtgaattgtacctggtgatttcaaagaattcattgatcatcttttccagccggtacgctttttccaatgtaatacgtacatgcttcacacgctgaggggctggcatatccggatcttcgtgcaaaaggctcaagtagccgataacggatgtgagtggggtacgaatatcatgggccagatacattaccaactcatttttccgctgttccgcaagggccgtttccgccttttgtcgctccagtgtctgctttacagcatttaatttactctcaaatggcagcatttctggtgataggcggatcgcttttgaatcgtccacctgcagagcgtcaattccctgatcgatctccttgaagtatttggtcatccatcggaataggcgcaggagcaaaaacgcaaagacgaatgtaattgccgctgcgaagaacacttccctgtaacttcgaaaatagtagaaatagatcatgttcgcagtttcacggtctactccaaaaaaatgcatcaaaaagtatgcaattaggtttcctcctcgctgtctccacagcaacacataaagaacaattacgataaggatcgataacaaagcgttaccgcaaaaacgacgcgtgattttagcccgaaatgtagcataatcgttgctgaacttaatcttcaattttataaccgaccccccatatcgttctgatatattttggattatccatcgtatcattcagtttttctcttaaatggcgaatgtgggacgtgattgtgttgttcgttttactgtaatattcatccgcccaaatcctgtaaaaaagctcctcggcgctgacaaccgttcccttgctttctaaaaggatctgtaagatcgaaaattcagtaggcgtcagcgtaagtgattttccatccaacaaacactggtgtgcttttacattcatctccaaaccggcgtgggtcatgacatcaccggcctccgcttcagcttgcgcgggattgtattttttgtaccgccgcagctgagatttcacccttgcaactaattcaagcggacgaaaaggttttgtcatatagtcgtctgcaccaagtgtcagaccgttgattttatccgtttctccgtctttggctgtcagcataataattggatatgtgtgtcttgttctgattttctggcatagcgtatatccatctatatccggtagcatgacgtccaggatcgcaaggtcaaggtttgttgtgttgatacactcgagggcttcttttgcagaatagaatttaaacacgctataattttcgttgttcagatatacttcaatcaaatccgcaatctcgacctcatcatcgacgactagtattttgtccggcatgatacttcgctcctcctttgcatcgtcctccacatattgtaatagaaagggatattataattgttgagccttacatgagaaaatattaagattttcctcagatttctattgtgattgggggaatcgtcaactactattgcagcaaaatccttgaatacatcaaggataggaagataattcgattttttgcatttccgcaggtttgtggggtgcacgttagtatcaagcaaggcaagtgtatagatacttgacgtttttgcaccgcaaaaatgcttgttggggtgcccccaaaccctctggcacttctggccacgatgaagccgctgacaaagtccccaattcggacgtacttgggctggacctcctggaccgggtgccggaccacagtcccgtctcccagctgcggtggaggaagccctccttcggcaagagcttccggcggctgtttgaggaaatagtacgccagtgtgtcccaaacggccctgtgaccggtcggctggtgggtaccgacttatgtgaaggccaatgcctcccgtgcctcggaggagctgatggagctccaggagagcccagggaattattgagaccgtctggacacctacggggaggaggggctggaggaaccggcccagtggaccggaaaacaccgttccaaacgaaccaaacagctcaaaaaggatagctgccacaccagaaagcgtgtgtgccacactgacccggaggacggccatctgaaccgccccggcaggccccggggggcccactacttgggccgccagacggtggacaccgaccacggcgttatcatcggcgtcacgggtttaaccgtgcttttcatgcgtgcgaaaaagtcctttgaatggaggacttgcaaatcggtgtcaaagggattgtcatggtggggctccgtgtcaggcattggagcgcccttggagataggagcggcgtgaccctgcttccggcgttcatgttggatagcctaagggtgtatcaaatggaaaacattagagaaaataagagggacgacaaaatcatttcctgccgcttcacggtctgtcttgggcgggacataaaatagaggttggtcacatcgtcccgcccatggccgaggaacccggccacggccttttgggccgcatagtgagatgttggcttcgtaccattcgcccgcgtaggtgtgtcggaggccgtgggaggccattgagcgagtggagtccggctcttgggcgtaggaacgaaaagcctggaggaccgtgatgtcctgatgggtgggcacactgtccgggataaggagcttgcatccctgtagcgtctgctcgagatgataccagaggcgtggctccaggatgggattcagtgaaaccggccgaccgctcttgcttttcaaaatcaaaaaaggacgcagtgcacccaacggcgcgggccgactgtttctggcagatttccgcgggaaactgccatcacagtcagcaccgggagcggtaaacgcattgaggtgactggaatgagaggatggaggccagccgggctcccacagcggccgcgcgtccttgggtgaggggcagatgatactgccggcgtccgtggtccgcccccggcagcaggacggaaagatacactggtatactggtgaaaccggtatggggagcgctcctctgcgccaggtttgtgttatccttttggacagaaaaaggcccgaaaacaattcgtgcttgttttcggacctgatgggtgaatattccaaatgaaggccggtctgtttttatctctgtcaagtctccagggagttggaataaatccacgggtgagaaatgccacctgataacggaattagcatagcataaaacaacacagccatatagctgcactttttactatcattctaattatgatgattaaaataattcgtctttacataaccagtagatcagggcgcaataagcccattgccggcgtacaaacattacaacgtgcacaacgcggatcaaagtccgacgaacagacggccagcaatccggcgcatgccccgtgatttcagcgagtgggtacaaaaatcaatcacagctttgataccataatatatcctgctttttaaccagtaaatctgtatgtagtatccggataggggcgcacttatacaaggtgatctgccagtcctccttaacttacaagtaaggtttaccacaggagcctgagggatgtataggcgaagctttttcaactgtttagaagctgcttcttgcatttccggtcggaacattccgtgtcccacgcgggcggcatgtattgttggaatgccgaataggagccgtgggagtacccggcaaggacgagaagtccagcgtctaagcgagcatcctgtaggccgagggaatcattatcccatggcgtgaatacaggtggcgctgatctgcggggggatgctatgcgtcattactccgttgtagtggatgcatacttgacagccagggcaaaaacagagagcgttaccggcgtgcacaacgacagcttgattggtgcaatggtcgcacacaagaagctgtgaggcgcaggatctgcataccgtggcgtacatggttacggacttatctggttccacagtagaacctcctctcccaaatacggtagagtatcctatgaccgcaacggttgagtagttcgaaatggtccacaaaaagccgccccatgaaaggggcggctcaggactatagatcttccagatcagcagcagggaggtcattctccaagttatcccgcgccagatcggtgtccagctcggggtatgcgtcaacgggaatcggacgctcatggtaaaccagcattgtggggccggaggtgcctgccacaatgggattggcctttttcttggtgtgcttcgccttgccctggagctcggggacggggggggcgtcgttgtggggttgggtgtgcgtccgctcggggcgggacataccttgctttgccatagtatcacctcaccactagggtgccacgggcagaggtaaaaatacgatacaaaatttgaggtacggcatgaaattattgcagcccggcgcccattcccttattgcgggtagcaatcaagtccaaaattccgcaagtaccgcgcttgctgactgagcttgcggaaaaggaatcacgccggattcgctccgttgcctctacagcggggatgaggtggtgctcatccaggtatggaaccaggttggcaccagcctggataaactggatgtgtccaagtcggacacaaatggtaggagggggcatttgtcaatcttcggtgggggagagctctcccgttatggcgtctacataataggctccgctgtctgtggtgatgcgccagaccggtgtgagctcgacaggccgcgtggtgccgctgacaatcagatagcccgcgttcatttcgtcaatgcggctgcacacaaagccaccctctgtcacaccggccagaaaacggaccaggactgtggcggcagagagggtctcttcctcgctggacgaggttacggtgccggacaggcgctggccctccatgcggagcagtgtgtcatcctgccagagcagggtgacctgacaggaaaaaaggggggtaccctcccagttctggtagtaggtcagtaccgtttgccccgggcgctcaccggactcggaggagatgagagtgccctggaaatcgattcgctccaggcatgactgggaggcatcctcgtaggagcgctcatgttccttggcccaggcaccaggttgaaaacgcactgagaaggtgccgttcatggagaattcagcggtgccctgtacactggaataccgatgccggacatcgttttccccctcgcgggagacatcgcccagcagagtctgcgccacgatggcctcgctttcccggtcacgggtgacggtcagaggggagagtccggcctcctgggggacccgctccgggccgaaggtgatgccgctctgctccagaacgcgcacggccgcctggcgcgtatcctcctcatagcgggcggcacggctctcctgcacacccaccagaatcaggaggaaggcattgacggataccagcagaagcaggatgatgttttttaatttggaccattccacagggcatcattcctatctggcggcccagccggcctccacagtgtcaccgccattatccgtataaaagaccactaactcccttccctcgggagacagggcctccagcgcggcggcggcctgccgctcgggaagaagcaggctgtgctccgcagtctcctcatagcggcggaagcgcagggtatagtctatgatctgtccgttccgcaccgtgaaccgggcggcgcagccgtcctctggaaggagaacggccgctccgctcaggctgtagccatagcagacctctgtggtgccgtcggccccttctgtgatatccatcaggtagagttgggcagcgccgcaggaggcgcccacagtatctgcggccagccgccgggtggtttccactagctccgacaccgtatagccatctgtggttccgatgggatagcgggaggccgcgtcctctgaggtgtggtaggacacggtgccgtcattgccgatctccagagtttcccgtcctacccggaggcgcaggccgccagggatttcgtacagggcatcgctctgtgtctggaaggaaacagcggcctgaagggccgatacagtggcctcgtccggggaggagagggggttggcggagtggtacaccagggggctcggcgtggcggaggtgagcagtacataggggtccagcccggcatagccccggtccgcctccaactcaaagacaaaaaatgcaccgttgctcccatggccggaaaccagctcgtccatatggccagtgtaggcgacctccgtttcacaggcataatacaggccatctgattcattatgatagtacagggagaccccaccatccagatcctgggccacggccaactggcgggctgtagcagtaagggaggggttgctgccgccctcgcccatccaggcgtatagggcctccaacgggagctctcccaggaagtcgaaccacacgcccggggcctgtagggcgtcccgccaggctgactccggaactgtatggggagaggcggcgctggagagagcctcgctgagcaggatgcctaccgaactgaacaggcggtcggcttgggctgggtcatactgaaccgcaaagcggtccaccccatcgcagacagcaatacgcacgggctgggcggcggctccggcctgtccggtcgcctcgggggcgtccgccggaacgctctgtcctggatttaaaagtgagagaagatgatccagccagccccgggggcccttatccaccagcccgttgaacatcagcacccggaccgtgagcaccacggcggagagggtgagcagcaggatcagcaggtttttaagccgctccacggtgtttcgtctgcggcggcgcacgcgcttattcccttccatggtgcgggccctccaccagcagggtgattcgtaccgtcagaccgggaccggagcggtccaccaactcgatggtgccctcatggcggtctatgatctccttggcaatggagagccccagtcctgtgccgcccgactcgcgggagcgggccttatccacccggtagaaccgctcgaagatgcggccccggtcctccttggggatgccgatgccgttgtcggccacttccatccacacccgccggtcctggcgaccggcggagatacggatgcggccgccatcgggggtgtatttgatggagttggataccacattcatcatcacctgtacgatccgctcacggtccccggtaatctcaggcagctcttccgtgatgtccagctccatggcgtggccgtggcgctgggcctccatcaggttggcgttgtagacatcctgtaccgcctgtccgaaagggaagggggccaacttcagctcggcccggccggagtcaaagcgggagagggtgagcagatcctgcacaatgtgggtcatacggtcggattcgttgagaataacacccaggaagttcttttccgtgttgggagggagctctcctgcgttgtccgccagcgtctccgcataggagcggatgttggtcaggggagtgcgcagctcgtgggacacgttggccacaaactcccggcggagctcctcggtcttgcgctgctcggttacgtcgtgaatgacgacaagaacgccgcccagacgctcctggtcaaagggagtgagcagaagctccaggctgcggccgcccacatcccgctcaccgtccaggtagccgggctgctccacggccagcaccccctggaggggagcaatgtcggagaagagtgtatcgtagttctcgctgccgccaatgggaatggatcggcccagcatctcctcggcggcggggttggactggataaccgagccgtcccgggagaaggccaccacaccgtcggtcatatgcagaaagagggtgcccagcttggtgcgctcgttctccacttcttccagggtgcgcttgagctgctgggccatgtcattgaaggtgccggtgagcacgccgatctcgtcccgggaggccacctcgattttgtgggaaaagtcgccgtccgccacccgttcagcgccctcggtcagccgctcaatgggggtgatcagcgtcttggacagcaggaaggagagaagcacggagatgataaggccgaagatcaacgcctctacgatcagcgtgatcagctcgctgttgagggcggacacattggcgccgttgtcctgcacatagacgatgtagcggccctcgccccgctgtactgccacggctacgtccatataggcggcggcgggggagttatcgtcgctggcatcctcacccgccagcacccgcatcaggttgcgggaatcattgggcatcgcctgtccggactccttatcgtcggagcctgccagccagtggccgtcggtaccgtccagtacgtagtatttccggctgcggttgtcaatgccgagggtgctgttggtatccagaatgtgggcgatgctggatgcggcgtcctcctcaccctcgatgggagtctccaagtccttccagaagtccgggtcgccaaaggcctcggacatctgggtatagaagtcctgcgtgtagtaattggcaaccgaattgatcagaaatgcacctaccaccgtcatcagggagataatcagcagcgtcatgatgagcatgagcttcatgtgcaggcttcgaaacatggagacaccccctcccaattcttccaagagatgcaacggcgtcctgagccgaagcgttgaagcagtacccgatggcctcccggttatgatgaactacagcgctgcggagtcgtccgttccctgcacgccaggccacacggagactccatagggatgtaagatttcaggcaacgcgaattcaacctgcggcttgccttgctggagttttatgcgttgaagtaatagcccaggccccttcgagtgacgataaactgcgggactgcgggattatcctccaccttttcgcgcaggcggcgcacggctacatcgacggcgcgcacatcgcctacataaccctcatagttccagacgtgctccatcagagcctcccgggaaaagacctttccgggctgggaggccagaaatttcagtagctcatattcccgctgtgtcagctccagggggtgatcatccttgtaggcgatcatcaggtcgacatcgatgacgatacggccatgctcaatacgctggccccccaggggagcggccgcgccggcggcggccaccatctcgttgcggcgaatattggcctttacccgggccagcagctcccgcatggagaagggcttcgtgatatagtcatcggcccccaactccagccccaggaccttgtcggtctcctcctcacgggcggtaagcatgatgaccggtgtgctccggttttccctgcgcaggctgcggcatacgtcaaaaccattcatcttgggcagcatgagatccaggagaatcagatccgggttttgctccagggccaactggaggcccgcctcgccgtcgtaggcctccagcgtctcatagccctccttggacagattaaagctgagaatatcgacgatgtttttctcgtcctccacgatcaggatacgcttgttcatggcaattcctccacacactcacagtcccagcagcagcttggccttcagcaccagcgccacggttttggcgtccttgatctccccctgccgtacctgctccaccagggcggagaaggggatgcgctccacggagaggaactcgtcctcgtccggatgacaggacccctcggtcagctcctgggcgagatacatgtgaagcacctccgaggaaaagccgggggaggagtagagacaccccaggtaggtcagcctcccgcaggaggcgcccacctcctcctccagctcacgcagggcggccagacggtggtcctcgccccgctccaacttccctgcgggcagttcggccaccacctcctggaaggggtagcgaaactggcggaccaggctcaccgtgccgtcgtcaaacaggggcagaatagccaccccgccggggtgctccaccacttcccgggaggccacgcggctgttgggcagttccgccttgtccagccgcaccgtgatgatctttccctcaaagagcacgcggctctccactgtcttttccatcagttccatccggcatatccctttctttgcacagcctttgcactgctgcatccagattaaaccacattatatcatagattccgcccctttgccaatccccccaatcattacagctatccaaagtccacggccatccggtataataccatcaacggtcggattgatttttgcaaaaggaggcccgttatgacgatccagccaatcggaagcgccagcgtggcgctgtacatcacacctgcggacttgaaggagcacggtctcaccccggcagggctgactctggaacgggcgctggccattacacagaccgccttccacgaggcggggatcactctggagggctccatcgagatcgaggcctacccggatgcctgcggcgttctggtgtttgcccatgtccgcgcgccggagcgggcctggttttcttttgacgggctggagcctgtggtggccgcggcccgggatctgcccgcaccgcggccggatgcggcgctgctctggtgggaggaccgctggtggctctcgctgggagcgggggaggagcaggccattgcgcggctgtcggagttcggccgctgtgagaccgcacgcccccatctggaagcccgtctggccgagcacggccgccccgtgtgggatcaggacgccctcaccgcgctgctctcctactttcccgtctgacctattgacaagcgtggtataataaaaatccaggcatatatagccggaacgcaggccggaggtgaggacatggacggcaagggaatcaaggtggttgcaaagaacagcaaggcttaccacgattactttattgaagataagtacgaggcgggcatcgagctggcgggcaccgaggtcaagtccatccgccagggccatgtcaacctcaaggactctttctgtatcgtgaaagacggacagatgcacgttcacggcatgcacatcagcccctatgagaaagggaacatctttaacaaggaccccttgcgctctcgccggctgctgatgcacaagcgggagatcctccgcctcttcgccaaggtaaagcaggatggatacgcgttggtgcctctgtctctctacttccgcggtcccagggtcaagctggaggtggggttggccaaaggcaagaagctctacgacaagcgggcctccgccgcggccaaggacgccaagagggaaatggaccgcactatgaaatcccgccgcaccggcggttattgatgtcaaagaggggggcatccccctgggaaaggaaggaatccaatggctcaaaatcctattgtcacctttgagatggagaacggcggcaaaatggtcgctgaactctacccggaggtggcgcccaacacggtcaacaacttcatcagcctggtgcagtccggcttttataacggcctgatcttccaccgggtgatccctggtttcatgatccagggcggctgccccaatggcaacggcatgggcggccccggctattccatccgcggtgagttcagccacaacggggtgcagaacagcctcaagcacgaccggggtgtactctccatggcccgcgccatgaatcccaactccgccggtagccagttctttatcatggtggagaaggccccccatctggacggcgagtatgccgccttcggcaaggtgatcgagggcatggacgtggccgataccatcgtgaacgcagaccgggaccggatggataagcccaagcaggagcagcggatgaagtccgtcaccgtggagaccttcggcgtggactaccccgccccggccaagtgctgattttcaggagagctcaacgactcaattccacgcagaaatgtcctgcaacctcatctctcccggtgaagcccagcgtcagcgggttcaccgggaaggtgaggagcaagggagcggcctggcggatgtccgcctttggcgggtgtccggaagaaagcggactttgcgacgagccgggggcgtactggtttcgacggggacgtagaggcgggaatagcgggcggatgcgcctatcatccttaaaatgggcagcttataaattaaagaacaacgataacgttgagcttgtcgcggcttaagccgtgaccgtcccgtccggaaggaccacgagccggaacggggcgtcgtttagtggtgcacgtgtgtgcgcaaagctttgagcgcaccatgaacaatgaagctaccaagccctgtagtttgacggcctacgccggggtaagggaatgtaaatgaccgtctgcgcccggagaggttcccgaggaagcgttttcggacgggggttcgactccccccgcctccaccagaaaagaaagacacgacgaaagtcgtgtctttctttttgtgttcaatccgctgatgtgggtaccagtaattatgacacaccccggataccatgttctgggacagaaactttaaagggtattattatgtacaattttgaatcaattttatctctgggggtattttggtatacagcaaaagatttggactataccaaaaaataaatatggtacttttgcttgaggaaagatactgatataattctcacaaattgttagacatacttggagagtgcacaagacactttttacaaaagagaggggctgggcggcaggtgggagaaggatgaacatcaggatcaatcgcagcagccagacccccatctatctccaaataaaatgcgccattcagaatttgattttatcgggggagctcagccctggctacaagatgccggcagagcgaaagctggccggagagctggatatacatcggaataccgtcatcaaggcatatggagagctggttgacgagggatatctgatcgtctcctcgaagcggccgaagggttactttgtcaaggagattgccgacgacggagtgccattcaagcgctttttcccgctggagaaaatgattcgctatcattttacggacaaggagaagctgtttctggacatcttcagccggtcggagcgggaggaatgcatctcgatgggcgggatcatcatggatgatgcggcttatcccagagagggcgtagagaagattctgcagaacatgtcccgggagccgcgaaacgaggccgaacggatgaagaaaaacatctgttctgtactttttcaggagaacatgtacgtcagcccaaagaatattcagttggttgccgagaccaatcaggcactgagccatatcatgacactctatctggaagagggggactacgtgatagcagaggagccggtggtacccgacaacgccagcattttccgcaacaaggggatcaacctcgtaacagtgccgatggagccggacgggatggatctggccaagttggagacagcgatccgaaaatacgcaccgaaattcatctataccatgccaaactatcacaatcctacgggcattgtgatgtccctggagaaacggaaaaagctgctggagctggcgggaaggtattgtattcccatcatcgaagaggactcccagcgggattttcgatacgaaggaaaccggcttcccagcctgtacgctcaggatcggtaccggtcggtgatctatatcgactccttcacgctgacctttccttatgggattaagacggggtatattgtggggcctaccgacctgatcgaaacgctggaacggctcattgttgtggacgagacctttgtaagcagcctagggcaatatattcttaatgagtatatcgagcgcggatattatcaaacccatatcggacacttggtgaagcactatgcgcacaagcgggatctcctttgccaatgtctggacgggattgcggacaaggggattacctataccaagccccggggtgggctgcttctctggtgtgatctcgaagaacgcatcaatgaacgcaggctgtatcacgaggcggagagccgcgggctgttaattatgcccggcttcctgttttacccgaagggctatgagggcggcggtcatgttcggctgtgcttttccaatatcagcgatgccgacattgaacgaggtgtccaaattttgagtgaagcgctggaacacagcgtggaataaacctgtggagggatagcatgaaccagttaacagagtaccggagagagttccataaatacccagaaaacggctggcgggaatttcgaaccagcgcccgggtggccgagatactgaccgggatggggtatgatgtggccatgggaccggacgtgatcgagcccggaagcgtgggggagcctgagcggctgagcgaggagcagatccgtcaggagatggagcgagccgtccggcagggagccgatccggcatttgtgaagcggacccagggctggcccggcgtgatggcggtgctggacaccggaagggaggggcctgtctccgcgatgcggtttgagatggactgcctgccctacgacgaacctcagaggccgggataccgcccctgtgacgagggctatctctcctgcaacccccagtcagtacacgcctgcggccatgacggacacacggctatcggcttgggcatcgccgcagagctgatgaaacggaagggggagctgaagggaaagatcaagctcttcttccagcctgcggaggagacgttctatggcgcccagtccatcgtggataaggggcacctggacgacgtgatgaactttatcgcggtacatatcgccctgagcgcggagaacaagcctctgccctcccataccgtagcctgcgggtgccgggatttcctcagcgaccggcagttggatgtctatctggagggaaaggccgcccacccctgcggggcctcccaagagggaaagaacgccctgctggccgcctgctccgccgcattaaacatccacagcatcgccccccacgaggagggcctgtgccgggtgaatgtgggcgagatccacgccggtgtgtgtgccaataccattgcgccggacgccatgatgcgcattgagtaccgggggcagaagcccgcgatctccgaatacgcgggccagcggatcttcgatattctggagggcactgcaaaggcctacgacctcaagtatcactatgtggattacggagaggtgcccgcaggcgccagcgactatgccatgatggaggttgtccagcgggcggccaaaaaggtgccctggttccagacagtatattttgagggcaatgtcggcggtacggatgacgccgccgtaatgttgaccaaggtacagcagaacggaggaattggctcctatgtgggcattggtgcggataccaccggccccgttcacaaccccgaatttgactttgacgaggactgtctgcaggccgccatggagctgtgtgtgtatgccctggaggagctccatgggatggatgcttgacttagaaagaagaggacagtgtaaaaacattaggaggtaaagagaacgatggctgagaaagttgtatccaagttgagggggaacatgtggcggctgatcattctggcagtggccggctccctgatctacggactgccttatttcaggacctattactatgacgcgtatctccaggcgtataacctgaccaacacccagatgggctcgctgggctccatctttggcgtattcggcatgatttcctatctgttcggcggtgtcgtagccgactttatctctcccaagaagctgatctccatctcactgatcctgaccggggtggctggattctgccacctgttcgcgaccaactattccatgctcctggtgatttacctggtgtggggttttacagcgctctttgcgttctggcccgcattggtcaagggtattcgtagtctggcctcctctgaggagcagggaaaggcctacggcttcatggaggctggacgcggcgtgaccaacgcagcccatctcgctatcgctctggccatcatcaccgccatcaccagcaagcgtggcagcgccgccggcctcaagggaggcatcatcttctactctgtcgttgtgattgtgctgggcatcctagtgctcctcttctttaaggatcctgagacctctgacaagtccgagcgcttcaacttcaagcaggttctgaccgtgatgaagctgccccaggtgtggatcctctgcctgatcctgtgctgcacctatgtcatgaacatgtcctatgcctacttcaacccctacgccacctctactctgggcgtggccatggtgggcggcaccattgtaacgattatggcggactacatccgtccctttgcctctgtgggcggcggcgtcctggcagaccgtctgggccggcccaggatcatgaccatcgcctttgccatcatggcggtcggtacgtttgccatcgccctgttccccaagatgagcgtgcccgtctttgtggccctgtgcgccctggtgtatgtgggtatgtactgcaactacggcatcgtgttctccctgatggatgacggcggtattcccatggaggtctccggcaccgccgtgggcgtgatctgtaccatcggctatctgcccgaggtggtctgccccgcgactgccggtatcatcctggatacatttaccgaagcgggctataagtattacttccttgccgtcggtatcattatgctcatcggtattgtgggtattatgatctggaaccgcagcatgaaaaagcagaaagcactgaacaagtaaacaaaagagctggtatccagtccggataccagctctattttatttgtacgtttccagtgcggcatctgaggggaaacggagccggagaaggcagacggcaaacagcaggccgcccaggaaccaggtcagcggataggcccagtagatcacccgaatatcgggaatgaaatgggtgacggcggtgatgtaggcgatgcgcagggcgcaccaggtggccagcatgatagccatggggatgattggccgcccggtcccccggagaatgcctgcacagcagtgggagaaggccaggaggaagtagaacaggctgacggtccgggcgtcggccacgccgtaggcgatgacctccgggctgctgttgaaggcggcaatcagcaggggagagaggacgaagatgcccagcccgatggcctcggccagcaggggactgcacagcagcccgaaccagatgccggagcggacccggtcatagcgccgcgccccgatgttctggcttacaaaggtggccagggccatggaaaagcaggagaccggcaaaaaggcaaagccctcgattttgctgtaggcaccgcagcccgccatagccgccgagccgaaggcgttgatgttggcctggacgatgacgttggccagggagatgaccgagttctgaacgccggagggaatgcccagatagacgacctgccggagcatatcgccgtgaaagcgtacctgccgccaggacaggcggtagctgtgcccggtgtgggtgagcttgcggaaagccaggagggcgctgagggtctggctgaggatggtggccagagccgcgctggccacgccccagcggaagacggccacgaacaacagatccaataccacgttggtgagggaggcgaaaatcagatacttcatgggactgcggctgtcccccacagactggaggatgctggcgcacatgttgtagagcactacggcgctggagcctagaaagtacactcgaaaatacgcaatggaatttccgatgacatcgccgggtgtgcccatccagcgcagaatctggggggtcagcagaacgcccaccacggtgagcacaagcccggccgcgatgcccagcgctacggtggtgtggagggcgcgggagagattttcccggtcatcggcgccgtaaaagcgggcaataaccaccccggcacccagggagactccgttaataaaccctaccagcagcataatcatgctggcggaggagcccaccgccgccagagcggtgctgccgatgaaattgccaacaatcagggagtctacggcgttgtagagctgctgaaacaggttactgaggaaaataggcagggcgaaggccagcatcttccggggcacactgccttcggtcagacggttctggtcggtttcatccatgcggtacgatcacggctttctgtttgatagagtacagcccggcgctccgccggcggccgcctgcactacagggaaatgtccgcggactttgcggcggcatcgagcacgtggcgggccagcacggaggtggtcacggcccccacgcctccggggacgggggtaacggcgcccaccacggcttcggccgcagcgaaatccacgtcacccaccaaatggccggcggcgtccacattgatgcccacgtcgatgaccacttggccgggggagaggcagttggcaccgataatcccggcccttccagcggcggcgatcagcagctctgcccgacggcattcggccgccaaatcggcggtgcgggtgtggcagagggtgacggtggcgttccggttcagcagcagcatagctgccggccttccgatgaccagactgcgccccaccaccacggcgcgcctgccggtaggctcaaaaccatagtagtccagcagttccaggcaggcctgagcggtgcaggggggataaccctgcccgtcaccggagaatacactggccagggaaccgctggtgatgccatccacatccttgacgggggagagggcggcacacaccgccgcctcgtccaagtgtctgggcagaggacggaaaaggaggcagccgtgaatggccccgtcctcgttgatccggcggatgaccgtcagcagttcctcctgggtgcaattgactggcaggataaaatgctttacagaaattccgatcatttcacagcgcttgctggccccacgctcgtaggagagatcctccgcccgctctcccacccggacgatggccagggtgggggaaatgccgcgggcccgcagcctctccgcctgtccgcacaggcgctcggtgagcgcggcggccactggcgcccccttccaaagctccgccatcaggtgtacctccccatcaccgactcatagatctgttcggcgcgcttccagtactgctccacaaggccgtcagcttcgtcattcatggcctccgcatacgaccggtcggccatgctcttggtattcaccttcacgttgagccatgccccatagagggcaccccagcatagaacagccccggttcccacatcggagagcaccatcacgcttcccttgtccagcatctcgctgtgaaggtcaattgcctcacagcaaagccggaggatctccatgggtgcggcggcggcgtcccgcagacagcgctccatcacctcaccccggctcgggtcctccttcgggatggcgtaggcccgcgagaggggctcaaaggcggcggcatcggtatccaccaggcccagcaaacgggcgcggagatcctccgcccgcgccatcagggccttgacatcctcctccactgcggcgtatttttgcttgcccacggtgtagttgccaaccatggtacacagggccgcgcccagggcgcccgccaaggcggaggcccctccgccgccggggacgggggccttggaggccagtgcgtccagaaacgcgccgcagctctgttccgcggtattcattcgcaatccctccttcatgattcggataggcggcctacggccgcctatctgccgtttcaatgggctaagaattttgccgttctcgtccacgtccaccttcccggtcgcggacactttgggcgggcctggcatggactccccacgtgagaatctcccgtgggggctccatataatcttatctgcgcgggcgaagtaaattcgcccggcatcaaggttttgctggcgcaaaacacttgtacgccgcattggcggcgggcatgcccatgc

SEQ ID NO: 4241 - DNA, 1111 bp, Unknown
  gut microbiota DNA sequence
atatttgcgatttggaagaacacccatagagtcaaatgtttttcttccgacaaggagccattgattatatgtgagcgctttaaagagtagttgctcaccttttactgaccacgggatatcaggaccactaccgattacgccattttctgacactgcagaaatcaatgatattttcaatttaactcccttaatggctaactttgttttagggcgactgccctgctgcgtaacatcgttgctgctccataacatcaaacatcgacccacggcgtaacgcgcttgctgcttggatgcccgaggcatagactgtacaaaaaaacagtcataacaagccatgaaaaccgccactgcgccgttaccaccgctgcgttcggtcaaggttctggaccagttgcgtgagcgcatacgctacttgcattacagtttacgaaccgaacaggcttatgtccactgggttcgtgccttcatccgtttccacggtgtgcgtcacccggcaaccttgggcagcagcgaagtcgaggcatttctgtcctggctggcgaacgagcgcaaggtttcggtctccacgcatcgtcaggcattggcggccttgctgttcttctacggcaaggtgctgtgcacggatctgccctggcttcaggagatcggaagacctcggccgtcgcggcgcttgccggtggtgctgaccccggatgaagtggttcgcatcctcggttttctggaaggcgagcatcgtttgttcgcccagcttctgtatggaacgggcatgcggatcagtgagggtttgcaactgcgggtcaaggatctggatttcgatcacggcacgatcatcgtgcgggagggcaagggctccaaggatcgggccttgatgttacccgagagcttggcacccagcctgcgcgagcagctgtcgcgtgcacgggcatggtggctgaaggaccaggccgagggccgcagcggcgttgcgcttcccgacgcccttgagcggaagtatccgcgcgccgggcattcctggctgtggttctgggtttttgcgcagcacacgcattcgaccgatccacggagcggtgtcgtgcgtcggcactgttgcaaatagtcggtggtgataaac

SEQ ID NO: 4242 - DNA, 14622 bp, Unknown
  gut microbiota DNA sequence
ccgggcatcgcccgcagcatgggcctcaagacccgcgccaccttcgaggaggccctggccgacgccatgcgcaaatataccggccccaaccccaacatcctggccctgccccgcaccttcaccaccgccgccgtccacctgtgcatgaaggacggcgacctgaggggcgtttgagcggagagaagacgaacagaagcccctctggagaccggacagcggccgggctccagaggggcctttatcgctggcaaattcctgttgagagttcctagcggaacggctccggccaactgggcgtgtgccgcagcttagctgcggcacacgccctttttgcattctggagaactgatatgcgtccaacggtttccatgcaaaaggtacgcaaataaaggataaccttctggaatggggcggtgaaaactgtgaatttgtttctgagagccatgtcgtttatgataagtacagaaatagggctgctcagcgctgtaaaactggagaatttagacagtatggcagccacataggagggacgttctatgagtgcaaacgcacacaccgccgtaatgaccgacttggagcagcggattcaggatggccggcagctctccgctccgcggccgcgcatcaacaggatcatggaggaccgcttttacggccggaagccccgggtggatatccagcgagcggtgctctttacgcagtccatgatgcagacggaggcctatccccaggtgctccgcaccgcgctggccatccagtacatgatggagcacatagaagtggtgatccagccccatgagctcattgtcggcacggccggcggtccgggccgctactgtgtgctatatcctgagacccggggcggccagttcccgcgtgatctgcccaagatcctcaaggcggagggcaaggcgggctacgccatgacccaggcggaggtggataccgttctcaacgaggtggttccgtactggaagggcaagacctcccatgagctctatctgaacatgctccccagggagacccgcagggtgatctacggcgacgaggagtatgccacccagggcctcatcttcgacgaggccaacaacgcccacacactgagctggaccggctcctatgaaaaggtaatcagggagggcctggagagcatcatccgcgagctggaggagaagaaggcgggcatcgagggcaacctgctgcacaaccagatggacaagatctactatctggacgccgcgattctctcctgcaaggccatgattacatatgcccaccgctatgcggacagggccgaggcgatggccgcggaggagagcgacccggtacgccgggccgagctggagaccattgcggagatctgccgccatgtgcccgagcaccccgcccggaacttctatgaggcggtgcaggcccagtggttcctccaggtgggctaccggctggagaacatgaacggcggcggtgtgggtttgggccgcctggaccagtatctctatcccctctacaaggcgggcctggaggatggcaccctcacggaggagcgggccatggagattctggaatgcatgttcatcaaggtgggcgaggtggttccctaccagggcaagagcacggcgggcggccacgagggctacacccactttgaggccctttccctgggcggcctgacccccgacggccgggacgccaccaatccactgacctacctcatcctccgctccaagaaggagttccccttccagtatcccgatgtcagcctgcgggttcacgccaataccccggataagctgctccgggccgccgccgaggtggtgaaggtgggatacggctgccccaagttcttcaacgacgaggagtttatcacccactacatcgccgccggcgtgccgctgcacattgcccgcgactatgccgcctgtggctgctgcgggggccgcctgcccgactatgagacttacctggccgcggtgtgcaacctgaacatcaccgccgtcctggagatggccatgagcgacggctgggttcacttcggggacgggaagtacgagaaattcctggatacgcccatccccgccggacagattcagaacatggacgatctgatggtcaacctggaggcggcgtttaccttctttgtgcgccacatcatgaagcgcaccggcaccctggagcagagcaacgccctgaagctggcctgcccgtttacctccgccctcagcgaggcggggcggatcaacatgaaggatctgcaccagccctgtgacagggactacggcctgtatatcgacaacggtgcggtaaatgtcattggcatcggcaccctgatcgaatcgctctccgccctggatgagttcgtattccggggcagggaattcaccctggagcaggtccgccaggcggtaaacgccaactttgagggctatgagcccatgcgccagaagctgctcagcgcacccaagtttgccaacggcgaccagcacgccctggagctggcccgccggtttgacgccatgatgcagaacgtcattgtccgccaccgcaccatgcacggcggacagaagcacctgaagtttgtgccggtggcctcccacgtggccctgggcggcaagaccattgccacacccaacggacgcagggcgggcgtggccctgtccgagggaatctcccccacccagggcaccgatgagaacggccccatcaccacgcttaacgccgtggcggccatcaacagccatgcccacgacctgacgatgcagcgcctgctgaacatcaagctgtctcccgcattcctggagggggagagcggtattcagaactttatccagatcatccgcacctttgtggatctgaaactgtggcacattcagttcaacgtcgtcaaccgggagaccctgctggccgcgcagaaggacccggacaaataccgcaacctggtggtgcgtgtggcaggctactgcgcctacttcaccgacttgagcgagaagctgcagacggagattatcaaccgtaccgagcacaccagcatgtgcaccgaataaaccatccgcaggagggaggtggggcagcatgagccgatccgcagtgggaaccatcttcaatgtgcagcgcttcagcctccacgacggccccggcatgcgggacctgatttttctaaagggctgcccgctccggtgcgagtggtgcgccaatccggagtcacagcatgcggagcctgagttgagctgccgcccttccaaatgcatcggctgccgggcctgcacggctgcgtgccccaccggggctgccgccgtggcggtcggcggccggattcaggtggaccgcgccgcctgccggagctgctttgcctgtgtccgggcctgctgctccggcgcgctgagccggatcggtgaagcgcttgacgccaggaccctggtggagcgggtgatggcccagcacatgagctggcgcgccgaaggcggtgtgacgctcagcggaggtgagcctctggctcagcccgattttgctgccgagctgctgcaacggttccgggaggagggggtggggacggccctggagacctgtggatacgtgccctttgaggcgttccagaaggccgcgcccttttgccagcttatcttttttgatctcaaatgtatggcttcggaggtacacaggcggtacaccggggtggacaaccggcggattctggacaacctgatggcgctctcccgggaattccctgatttgcccctccgggtgcgcacccctctgatccccggcgtcaacgacggccgggaacagttgtccgaaatcgtgcagttcctgcggaggctcccatcgctggccgactacgagctgctcccctatcacaactggggggagggaaagtaccgccaactgggccggagctatcccctggccggactggagccgccggacaggggggcggtaaggcgcctcaacgacgagctgcgggctgagttgggcctgcgaccgggacaggagtgattttcatggatatcattgattttcgttaccgtccgccctatggcagctaccgggagaccattatgtaccgggatctggagcgggcaaagcgctgttccgaggcgttcggtatgaaccagtccccggctgtggctgccagggatatggaggcatctttaacggaaatggaccgggcgggcatcggcatggcggtgctggccggacgcaaggtacttcctcacatcggcgttgtcgacaatcaagacattgtggatctgatccacgcctaccccgggcggtttaccggcatggcgggggtggaccccagcgacgggccggaggccatggaggagctggaacggtacgtcgtgggcgagggcctgcggggcatcgtcatggaaccgggactgaccaagacccccatgttcgtggaggatgaacggattttcccgctctatgagcgctgccaggcgctgggtgtccccgtcatgctcatggtgggctccaactgcggcccggacatcgagtactccaagccggagcacgccgagcgggtggccaaggcgtttcccaaattgaacatcatcctctcccacggaggctggccctgggtgacggaggccattcacgtggcgtatcgctataaaaatgtctatctgctgccggatttgtaccagttcaacggcccgggaagcggagagtacctggctgcggcgaactatatcctgcgggatcagatgctctttggttccgcctacccctatgtctccctgcgggaggcggtggactacttcctggaggggcgcctgagacccgaggcccagcccgctttcctggccggcaacgcccgcagaatcttggagctggagcgtgtgtgagtccagcctgagataaatacaactttcaagggaggtctcaaatgtgagtacgcaactaaaagcacagcaaggattgaccaatctcactccgatcaaggtgatccacatcctgatatccttggcaatcatggtctgtttcaagtttgtccccgccgcggagccgctgacccctctcggggtggaggtgatcggtatcttcctggggatgctctatggctggctgatcgccaacgactccttctggcccagcattttcggcctgcttttcctgggcctgagcagctactccaccgtacccgccgtcctgagggatggcttcggcaattccactgtcctgctgctgttcttcttcttcgcctttaccaacgtcatcagcgccgccggtatcactgagtatatcgcgcgctggatcgtcagccgcaaggttgtgcagggcaggccatatctgctgaccctgatgatcttcttagccatgtgcgcgctggtcatcatggtttcctgcgctgcggccaccatggtaattttccccctgatcaaggagatctgccgcctctacggcgttaagcccggcagcaagtgggcctctatcaccctggtgggcacaatctgtgtgggctgctccttctacatgctgctgccgttcaagtctctgcccgccgtggtgttctccagctatacccagatgtccggcggcgactccatcgcgcttgtcccctatctggcgatcgtggtcgtcatcaccgctattaccatggccctgctgctggtgctgatgaaatttgtcctccggtgcgatgtcagcgtaattgcctccagcaacaaatccatggaagagctgcccaagctgagccggtatcagaaatttatcatggtcttctttgtggccgtgatcgtcctgctgctgttcccctccttcgtgcccaagacctttattgtcagtacggtgctgaacaatgtgggcgccaccggcatcctgctgggcgctgtcggcgtctatatcatggtcagtctgaaggagggcatgcctgccgtccaactgttctccaagaacattggctggtccatcatcttcatcctggccgccgcgctgagtatcgccgatgccatggccgccgagtccaccggaatctcggcctggctggtggagctgatcacgccggtggtccagggcaagagccctctcgtcctcaccgcagtaatgtgtgtcgtgggtatggccctcaccaacgtggctaataacatcgccaccgcagccatgctgacgcccatcgcctacagtgtgggcatcgcctgcggcgccaatccggcggcactggcggtctgtgtgctgctggccaccaatatgggtatggcaaccccgcccgccagtgctcctgcggccattgtccacggcgaaaaggagtggattcccggaagtgacgccgtgaaatacggccttgtctgctgcggcatcaccctggttcttattctggccgtgatcttccccatggcaaacgtcatgttctgatgcagcagggtctggagcatacgtgaaaagccccgccggtatcccaacaggataccggcggggcctttcaacctttttatttgcaggtacaatccttgaagtatcgcttcagcgcacacaccaccgactgttcctcccgaagcagggactttcctgattggtggaccagcaggaaggtggcatgtccgaaatccagtccatgaaccatgacgggctgcaccgctccctggctgacaaaatactcgtactgggaggtaaacctgggaaagatagcggcgcacctgttctgcgccacatactgcaagatggcgtccttgctgtggcagcggaatccggcctctccactgaaatagtgtccgaacagaagccagttgtcgtcgtttacatgggaataggtgccaaggggcacctgcgcaagcatctgaggcgtgatttcccctgtcagagccaggggatggccggagccgagaaacaggtattccgggtcttcaatcacctcgcagcagtcccagccgtttttgcggatccgctccagggtggcggtcgagtccgcctgattttccttgcggatcgggagcaggccgatgtgaaccccgttctcctccattttgtgaatgatctcgctgcgccgacattcgtggagcagcagattgatgtcggggtgccggtccttcaggcaggggataaaccctgcggagagaaaattgcacatggtggtggtgctctgtatgtgtacctcccggggaacctcctccagaggggtggattcctgccagccgttcaccatttgaagaatgatctttacgtccccgtaaacccacttgccataggcggtgagctcgatgccgcggctcgtccgccgcagcagttggtgccccagctcgtcctccagggcgtcgatcatcttactgacagagggctgggtggtgtagagctcgttagccgcttttgtgaaggagctgtgctgcactactttatcgaatgcgataagctgttcgatgcgcatagcggaacctccctttttcaggccgcaccggggcccacagtcagatcgcctcggatatggcatcccccatgtcgctgcaggagagccgcttgcctcccggagtcataatgtcgccggtgcggtatccgtcgtccaaaaccttgacaatggccgcctcaatcgcgtcggcctcgacggtcatatggaaggagaggcggagcatcagtgccgcagagaggatctcggcaatgggattggcaatgttctggccggcaatgtccggcgctgagccgccggcgcactcgtataatcccttgccctcgctcccaatgtcgccggagccggcaatacccatggagccggcggcactgttggccaggtcggacaggatatcgccgaacatattttctgccgcgattacgtcaaaataccccggcctgctcaccaggcgggcggcgcagccgtcaatcagcatggtctcatagtgaacctcagggtattcctcggccaccttttcatataccgtctgccacagcacgccggtctccatggcgttgggcttgtttaccatcgtgacgtgctttttgcggcccatggccaggtcaaacgcgcagtgggcgtgccgctcgatctgtgaccaggtgtagacgcactcatcgcaggcggtcagttcgccgccgatctccttcctatacttgcccgcatagaagatacccgcggtattctcccgcagaacaatgagatctagttcccgggccaccgtatccttgagcggagaggcctggatcagttggggatagaccttggccggacggatattggcaaagagctccatgccacgccggaacgaagccagggccttcactgcggcctccttacggcttgggtattttttggtgccgttggcgccggtgaaggtgtatttgcggggatcacccaccgagccgaacaggatgctgtcgcaggaacgccccagctcgtaatcctgcggacgcagggcatcgccgtaggcctccagaccggcgacaccgccgattatatcataataatggaacgtgtgcccaaatttctgtgcgacccgctccaataccttgatactttcgttgacgacttccggaccaattccatccccgcgcaaaacggcaattctcttttccatggcaggcacactcccaatctttataagaatatatacgatttgttttgtgcaatttcattataccaaagcttatcatgtgagagaaattccaaaacaaaagggttaccttcagaaaagttatggagggctttcgctccggcgtatgcccgagcgaaagccaggcccccggagcaaaacgctccgggggcctggcttaagagatgtaaaaaaccgtatgtttatcagcagtataaaagggccgcccgttcccgccggtcgattttcgcctgaaagcgcgccatacattcagcggggaatcctggggccgatgagtaagacaacatcattgctcccgaagcaatcaatagctcatctgcggcaccaggctctgctggggctgcacaggtgaaggtccgggcagcgaacccttatcggggggatgacgatggctgcgccggaagctggcggccggtgtggtcgatggtgtagtccacgttgtattccccggggagaatcaactcggagatggggacgaaggtgtagccctcctgtagcagggtttcgaggatggcgggcagggcctcgggggtatggagggcggcgttgtggaagagaacgatggacccgggctggacccggctcaccacccgctccgtgatctccccggcggggagatccttccagtccagactgtccacgtcccactggatgggctccatcccgatggagcggatggacgtaattacattgttgtcgtattctccgtagggcgggcggatcagggtggggcgcacgccggtgacggcctcaattttgtcgttgcaggcctccacatcggcgacgatcgcctcgctggagagctgagacatgtgggcgtgggagttggagtggttcatcacctcgtggccggcgtcgtggagggccttgacggactccgggtatttgtccacccagtcccccaccacgaagaaggtggcctttacgttgtattttccaaggatgtcgatgagctgctgggtgtcctcgttgccccaggcggcgtcaaaggagatggccagcatcttctggtcccgctgaacgcagtagatgggaagctgccggtcggtggcggaggcctccgccactgccggggcgttgaccagggcaaacatggccgccgccagcagggcgcacgccagcacggtcagggtccggcgccgcaggatcaaacacttcatacaaaaatccgctcccttctcaaataggccgttttttcatttatatgtaaaggagcgtgagcgcatgccctggcgaaatcttaacgcaatctttatatgaaagtgaaaaaggcagcgaaattccaacaaaagctgtgatataatataatataaaattttatgcaggggaggcgggaaccatgacggaccagcggccggatccggacgcactgctgcgggagctcaagctgaaagaggagaccagaacgggaaagctgaagatattcttcggttatgcggcgggtgtgggcaagacctacgccatgctggaggccgcccaccacgccaaggagatgggcgtggacgtggtggccgggtacatcgagccgcacgtccggccggaaaccctggctctgctggacgggctggaacagctccccaacaaggagatcccctataagaatatcacgctgcgggagtttgatctggacggggccctggcgcggaagccccagctcatcctggtggatgagctggcccacaccaacgccgctgggagccggcaccgcaagcgctaccaggatatcgaggagctgctgcgggcaggcatcagcgtctacaccaccgtcaacgtgcagcacctggagagcctcaatgacgtggtggcctccatcaccggcattgcggtggcggagcggctgcccgaccggatctttgaccgcgccgaccaggttgaggtagtggacatcgagccggcggatctgctggagcggctcaaggagggcaagatctaccggcccaaccaggcggcccgggccatggaccacttcttcaccctgaagaatctggccgccctgcgcgagatcgccctgcggcgcaccgcagaccggctcaaccgggcggcggacaccggggtgggcaccaaggccaagagcagcgagcacatcctggtctgcctgtccggcgcgccgtccaacgccaatgtcatccgcacggcggcccgcatggcggaggccttccgcagcagcttcaccgccctgttcgtggagacctccgacttcaaggacatgagcgacgacaaccgcagccgcctgcgggccaacctgcgcttggcggaggagctgggggcccgcatcgccacggtgtacggcgacgacacccccctccagatcgccgagtacgcccgggccagcggcgtgactaaaatcgtcctgggccggagcaataacaagcgcttcttttgggagcggagcaaaaacctggtggaccggctcaacgccctggcccccgatctggacatccacatcatcccggacacctaccccgcctaccgggcgccgcggaagagctggaacctcagcgagcggttcaccgtcaaggacgcgctgcgcaccctggtgaccctggcggtgtgcacgatggtgggcctggccttcgcctatctggacttcagcgaggccaacatcatcatgatctaccagttgggcgtgctggtggtggccatggtcaccagcgggcggctctatagcctggcggcctccatcctgtccattcttatcttcaatttcttctttaccgtcccgctgttcacgctccacttcaacgacaagagctatctggccaccttcctggtgatgttcctggtggccttcctgagcagctcgctgaccacccgcatcaagcggcaggcgcggctggcctcccggcaggcctaccgcacccaggtgcttctggaggccagccagaccctccagaaggcggagggccaggaggccattctggaggccatggcggtacagctgcgcaagctgctggagcggacggccctgtactacccagtgctgcccgacggcaccctgggccagccccggttcttccccgtggagcccaccgtggacacaggagcatacctgggccctgacgagacggcggtggcctcctgggtgcagaagaacaacaagcacgccggcgccaccaccaacaccctgcccaacgccaagtgcctctatctggcggtgcggggggagggcagcgccctggcggtggcgggtattgccatcgaggagggccgggagcctgacgcctttgagaaaaacctgatgctggccatcgtggacgagtgcggcctggtgctggagaaggagctgctgggccaggagaagcaccgggtggaggagcaggcccagcaggaggccctgcgggccaatctgctgcgggccatctcccacgatctgcgcaccccgctgaccgccatttcgggcaacgcgggcatcctcatggagaacgcctccgtgctggacgcggccaagcggcggcagctctacacctccatctacgacgactccatgtggctggccaacctggtggagaacctgctctccgtctcccgcattgagaacggcaccatacgtctgaagatagagccggagctgctggaggaggtgttccaggaggccctgacccacctggaccggaaggccaaggagcacaccattaccgtggagctgcctgacgacatgctcatggccaaaatggacgcccgcctgatcgtgcaggtggtcatcaacatcgtcaacaacgccatcaaatacacgccccccggctcccatgtccaggtgtccgcccggaagcggggagagagcgtggaggtgcgcatcgccgacgacggccccggcatctcggacgaggccaaggccaagctgttcgacatgttttacacagccaacaacgcccggggcgacggacggcggggcctgggcctgggcctgtccctgtgccgctccatcgtgcaggcccacggcggctccatcaccgtggaggacaactatcccaagggcgctatcttcagctttacactaccacttgcggaggtgaacaccgatgaacaaacctcaaatcttgatcattgaagacgacaacgccatcggcaacctgatttccaccaccctggagacccagcactaccagtaccggcgggccaaaaacggcgcctccggcgtgctggaggcggcctcctgccggcccgacgtgatcctgctggatctgggcctgcccgacatggacggcgtggacatcatcaagaaggtgcgcacctggagcaacacccccatcattgtcatctctgcccgcagcgaggatcacgacaaggtggaggccctggacgccggggcggacgactatctgaccaagcccttctcggtggaggagctgctggcccggctgcgggtgtccctgcgccgggtgcgctacgacagcgagaaggtggacgaggcggccagcatctaccagaacggcgggctgaaaatcgactacgccgccggctgcacctaccagaacgggaaggagatccacctgacccccatcgagtacaagctgctgtgcctgctggcccagaacaccggcaaggtgctcacccacaactacattctcaacaagatctggagcggcgccctgccctccgacaccccctcactgcgggtgtttatggccacgctgcgcaagaagatcgagcccgatcccagccacccccggtacatccagacccacatcggcgtgggctaccggatgatccgccagcccgacgaggaggccggggcggagagtgaagcatgagcgggggaggagaggccatgctgtatccctaccgccccgccggggagcaccggctccccggactgcggcctgggtgcgcggcaggccctggggcgctgctgggcctgatgcgggatgtgggacagctctttgactgtgagcctgtggtgctccagcggccggacagcccggcgctgctgctgttctacccggacacagtgttcccgtggcgggatctggcggaggtgtgcggcggggcgctggcggggctggcggggctctggcccgtgacggtgtacggcaccaccgcccggcgggagaccggcgagctgcgggccgccgtgcgtgcggacggcgccacagtcatccgcctgcgctcggtgtccggccggccctttgaccagctcaccggcctgtgcctgcgggtggagatggacactccggcccgggccgccgcctgggccgccctgtgcgccgggagcgcccgcacccggtccagcgccgccctggagcccgcccaggccgccgccctgggggatggccttccggtccgccgccccacggggagccgctacgcctacctggcctgggaggaggacgccggtgtgctggacgcgctggaggccctctcggcccggcagaaggaggcgctgtggcgcggcttcctccaggacgggacccagcccatggaattccagtggctgtgggatgcctaccgggagggggcggtggactccctgctggagtgggagctcaccctccagctcaccctggaggccctgggcttcgcggtggtcaacggggcgggccggtttaccgtcaccgggccggacggttcggcgcgcagctttgatctgatccgcggcggcccggccgaaaagctgtttctgaaaatcctgtttcccctggacaagcgggaataaaagatgtcccccggaaccaatcggttccgggggacgcttttgtatggaagaggaagatcaggaggtacttacatccagtgctcctcgccgtcatagacacggtagctgtgggcgttggtggcctccacaatgtcgtggtaggcccagtaggaggcgctcacatcggggaactggcgcagctcgccggcgtggtcgtccacgtagtcctcgtccgccgcccggtccagcaggcggttggtgatggccgccacctccgcccgagtgatggtggcctccggacggaaggtgccgtccgtataccccgtgatccacccgtactgcgccgcccccaccacctggtcgtggaaccagtcggaggagctcacatcggagaagggattctccccgccctcgggcaggcgggcaaagcgcatggccatcaccgtgaactccgcc

SEQ ID NO: 4243 - DNA, 1226 bp, Unknown
  gut microbiota DNA sequence
ttgcgcatggcgtcggccagggcctcctcgaaggtggcgcgggtcttgaggcccatgctgcgggcgatgcccggctcccgggcgcccacgatgtagatggcgctggtgtgctcctcggccagatggccgcagctcatcatggagaagccgtggaaggggtggaaggcgttggcgaagcggtacttgcggatgtactcctccttggtggcgaagtactcgccgtaccggttcatgtcggggaggatgttcatgtagtcgtgctggaacaggtcgtacagctcccgcaggtagggccagcgctcgtcgtggaagtagccgtcgcagatggaggacacgatgaacacgcaccggtcgctcatgatgcgcctatggcggatgacctgggcggacagggcctgcatcatctggatggggttggtgcccatgccgttgccgtagtggaagttggtgggcatgccgaacacgatgatgtcgtacttcttctccgcccagtggacgtaggtgcgcttgtccgccgtcttccaggacacgggctgcatctccctggcccagccggagtgaatctcgatctggcggctcttggtgtccagcacggcgtcgcagcagaagaatttcttgcccatcttctcctccatgtgcatgccctgctggtcgaacttgtgccgcatctcgctgttcgtggacacgggcacgaagtcctgccggtgcatcacctggggcacgtggtgggcggagatgctccgccagtgggagatgccggtggcgcagtgcttgtagccgccggagtagccgccgtaggggttgccctgggtgtgcccgatgagcaccgccacgtccgcgtcgtagacgtacttgttcatgatcacgtggtccccctgggcggtgtagcccaggtccaccaggtggtcatagtcctcgctgtcgtggctggtgatctggccggtggggtagaactcgccgaacagctcggggcccaggatggtctgcatctcggccacggtggcccgggggtgcaggccgttggagaacagcagcagcacgtccttctgctccaccccggcggcgtacagctcgtccaggcaggcacggatggccaccttccggtggctggtaggctggttgccccccttgacgatgtccgggatgacgatgaccaccgacttgcccggcccggccagctccttcagcgggggcatgccgatggggttgcggatggacgccagggt

SEQ ID NO: 4244 - DNA, 736 bp, Unknown
  gut microbiota DNA sequence
taaagatattgttgggtaaaaaagaaaggtcagtcgattttgccgatgaagcggtagtagatttctacttcctgctcacggcttccgtcctcgcccttgacagcttcgtgaacggttattttttcaattagagtgttcagaagttcggcggtcagctccacagggttgacatactgtttcatcagggcaatccacttttcagcatccgctgcggtctgtacggcggcttccatcgtttcgtgaagctgtcttatttttgtttcaagctccttttgctcgttctggtacttctcggacagcatattgaagttatactcggttatgcgtccggcagaccagtcctcatacattttagcaaacagcccgtcaacctcggctttacgcttctctgcctttttcagctccgcagcctgctttttcttcgcagagtttctttccctgtcgctggcattgagcagccgtttcagcagcttgtcctcgtctttctgtaccatcatagaccagtattgcagtcttgcaagcacataggcatacagtacatcatagcggatatagtgcatggaacactggcgtaatccctgtccgtacttactgcaatggtagtgtgcatagggatttttgttctggctgtttacaccataagccaatgaccatccgcagtccgcacattttaccagcccggaaaatatctgcgttgtgccattcttctgtcgtctgcgtctgcttgcaatcagct

SEQ ID NO: 4245 - DNA, 13505 bp, Unknown
  gut microbiota DNA sequence
ccctgcctggttgggggcatatcgagttccgcatgatacgcggcgctgtaggggcggggcttgtccccgcccgccgatctgaccgggggacatcccgcctccaatacataaaaaactgatatttacagtttattcacattaaagacacgatttagtcttatttacacggtatgatacagacagattcagagatgaatcgaatgagaccatcctcccaaaccaattcctctcttatccctctccaacacctttgcaagacacacaacacacacaccgaaaagccccggcctttggccggggcttttcggtgtttttgggaaaaaggcttgacttggagtgtactccagggagtaaggtaaactgaaatcaatgtatgggagtgacatttcgtgatctacaaggactttcaaaacctgcgcctgcccatgctgggcttcggcagcatgcggctgcctctgctgcccggcggtggggacggcgacgtggacgaggcggcggtggccgagatggtggctctggccatggagcggggggccaactactttgacacggcctatggctatcacaacggaaattccgagcgggtgatgggccgcgtgctgtcccgctacccgcgggagagctggctcctggcctccaaattccccggctacgacgtgtccaacatccggccggacagggtggaggccatcttcgaggagcagctggagaagtgcggcgtggactacttcgacttctacctctttcacaacgtatacgagcgcaacgtgggcccctatctggacccggacaaccgcgtgctggagtacctgctccgccagaaggaggccgggcgcatccggcacctgggcttctccgcccacggctccctggcggtgatccagcgcttcctagacgcctatggggaatacatggagttcggccagctccagctcaactacctggactgggacttccagggcgccagggccaaggcggaggagctgaaccgccgccatatccccatctgggtgatggagcccctgcggggcgggcggctggccaggctgtccgacggggatgccgcccgcctggccgtcctgcggccggaggagagcatgccgggctgggccttccgcttcctccaaggggtgcccggcgtgactatggtgctctccggcatgtccagcctggagcagctgcgggccaacctggacaccttcgaaaccgaccggcctctgagtgaggctgaaaaggccgccctgctggatgtggccgccggcatggtgcgggagcaggtgctgccctgcaccgcctgccgctactgcgtggaccactgcccccggcacctggacatccccggcctgctggccctctacaacgagcacaccttcaccggcggcggcttcatcgcccccatggcggtggaggccctgccggaggagaagcggcccgccgcctgcatcggctgccggagctgcgaggcagtgtgcccccagcagctcaaaatctccgaagctctggccgacttcgcccgcaagctggggtaaatccccggggcgggcgttgcaatccaccgcggtttggggtatcataaaggcacagatcatgatacgccataaggaggcgcctttctatgcgcgatggattcatcaaggtggccgccggcacgccccagatccgggtggccgactgccgctacaacgccgaacagattttcaccctcatgcgggaggccgataagcagggggtgcgggtgctggccctgcccgagctgtgcctcaccggctacacctgcggcgacctcttcctccaggacaccctgctccgtggcgcggaggaggggctggccaccatcctggaggccaccaagcacctggatctcctggccgccgtggggttgcccgtgcggcaccagaacaagctctacaactgcgccgccgtgctccaccgggggaagattctggccctggtacccaagacctacctgcccaactacggggagttctacgagaagcgctggtttgagcctgccggccccggcgaccgcctattctccttctgcgggcaggaggtctatctgggctccgacgtgatcttcccctgcgagagcatgcccggcctcactgtgggggtggagatctgtgaggatctgtgggcctccacgcccccctctgtggccctggccgaggcgggggccaccgttatcctcaacctgtccgcctccgacgagctggtgggcaaggccgagtaccgccgccgcctggtgtgcggccagtccgcccggctggtgtgcggctatgtctacgccaacgccggggagggggagtccaccaccgacctggtcttcaacggccacaacatcgtggccgagaacggcgccctgctggccgagcgccgcttcgccaccgggctcaccgtgtccgaggtggacgtggagcggctggactacgagcgccgccgcctgaccaccttccgctccaatgcggacagccgggtgatcaccgtccccttcgccctggagccgtgcaccaccaccctcacccgccatgtcaaccccctgcccttcgtcccggaggacggcgccgagtgcagcgaacactgcgacgagatcatcctcctggcggcgctgggcctcaaaaagcgcatggagcacagcggcgcacaggcggcggtggtgggcctgtccggcgggctggactccaccctggccatcctcatcaccagcgtggccatgcgcctgatggatcgaccggccagcgacatgattgccgtcaccatgccctgcttcggcaccaccgagcgcacccgggacaacgccgtggagctggccgagcggctgggggccaccctcaggcgcatcgacatcggcgcggcggttcggcagcacttcaaggacattggccagtccatggacgaccacgatgtgacctttgagaacagccaggcccgggagcgcacccaggtgctcatggacgtggccaaccagtgcggcggactggtggtgggtaccggagacctctctgagctggccctgggctgggccacctacaacggcgaccacatgagcatgtacagtgtcaatgcctccatccccaagaccctggtgcgccgtctggtgtcctatgtggccggggacaaggcggaggaggacgaggccctctcccatgtgctcagtgatatcctggacacccccgtttcccccgagctcctgcccgccatcgaggggcagatcgcccagaagaccgaggatctggtgggcccctacgagctgcacgacttcttcctctactatgccatccgctgggccttcccgccacggaaggtgctccggctggctgagcacgccttcggccgcacctacccccgggccgtcgtgctccagtggctgcgtaccttctaccgccgcttcttcgcccagcagttcaagcgctcctgcctgcctgacggacccaaggtgggctcggtcagcctctctcccaggggcgactggcgcatgccctccgacgccgtggcggccctgtggctggaggagctggaggggctggagtgagatgcgcggcatggggcgccagccgcccgcgagcgggggcgagccgcgcctttggcgcgtccaagcgttttggcgcagccaaaaccttgccgcaggcgggattgattcccgccgaggatgatggaaatacaggggtccccatggaagcgcgcttccatggggcggaactggaggggctggagtgacgtgaacatctatgccgacctgtttttgacctttgccaaaatcggggtttgcaccttcggcgggggatatgccatgctgcccatcctccagcgggagctggtggagaagcggggctgggccacggaggaggagctctccgactacttcgccatcggccagtgtacccctggcatcatcgccgtcaacaccgccacctttgtggggcacagccggaagggagcggcggggggcgtggtggccaccctgggactggtgttcccctgcctggtcatcatcatgctcatcgccgccttcctccagaactttgccgagcagcccgtggtggtgcacgccttcaacggcgtgcgggcctgtgtgtgcgccctgatcctgtccagcgtactcaagctgcgcaagagcacggtggtggacgggccgacggcgggcgtcttcgcggtggtgctggtgctggcggtgctcggtagctttgtgtccttcccagccgggtgggcggggagcgtgctcagctttctctgttcccccgtggtgctggtggtggccgccggcgtggccggactgtgcatccgggcggcgagaggagggctgcggccgtgatctaccttcagctcttcttcgagtttttcaaggcggggctgtttgccatcggcggcggcctggccaccattcccttccttaccgacatcgggcagcgcaccggctggttcacctccggagagctggccaacatgatcgccatctccgagtccacccccggccccatgggggtgaacatggccacctacgtgggcttccacaccggcggcatcgcggggggcgttatcgccaccctgggcctggtgtgcccctccatcctcgtcatcctggtcatcgcgggctttttgaagaagttccgggagagccggggggtggacgcggtgttctacggcatccgccccgcctccaccgcccttatcgccgcggcgctggcggaggtttgctccatcgccctgctgaacctgagcgccttccagaccggcggcgcggcggccctgttccagtggaaggggatcgccctggcggtggtcatcttcgtgtgcctccaggtgaagcccctgaaaaaactccaccccatcgtgttcatcgccgcctcggcggtgatcggcgcggtcttccagttctaaaaaaatcccgtgcggtgtgtgccgcacgggattttctggtttattccgcaggggaggccaccaggaagaggaagtcgctgccgccctcctcctccgggaaagcgccgtacatggagaagttatacaggaagcgctccgccatcagcacgccgtagccgtcctgacagtggtcggtggtgtcgtaggggtcggccacgatgaacacgtcgtcctgctgggtctcggtgcccatggtgtcgtagccgatgatcacctgccagtgtccgccccagtcgttccagcagaccatgaccggcttgccctcggccagccagccctggatggtgtccatccagacctcggaggaggggtcctcgtagtccaggttggtggtataggtaaatccgcccacgccgtcaaagatatccatggcctgccgcagggtggtgccggggtagccggccagcccggtgccctccagggagtggcgcagggcggccaggctctcctcgttccagtcgcccagccggtcataccagttgagcaccatcagggtgctggtgacgccgcaggcccattcgctggtctgctgcatggtctggaagccggtcaggatcgtgagggtgtcgctggactgcatgtggtagtagtcggggtgggcaaagtagggggagtccgcgtggtcgcccagccgctccacggagtcggcgccgtcctcgggggagagatccacggcatgggggatcttcatctcgtcggtaaaggcggcgctctgcgccgcgctcggtgtggcatccgcaggggatgtttgggccgccccagtcggctggctcccgcccgtcgtgtcggcacagccggccagaaggccggccgccagggtgaggctcagcgccagagtgacttgttgtttcatttctcgatctccttcaatgtccgattctgcgcattgcgcagtgagtgacattatagggaaagaaggcgaaagatgcaagcataaattttgagggccccaaaggggccctcaaaggggtcagggcaacacgcagcggtcaccccggtcgatatagtgggcgtcggcccggagagtcagcccctccgatcccgcgccgccgggcaggtagaagcggatgccctctatccgcacgtcggcggggccgtcctcatggtggggcggcacggtatagagccgcgtgccccggagctgttcgccctccagaagctccaccgccagggccacccgccgctcgggcaggatatccgacaggcacagggagcactccacaatctgaccgccccccacctccagagtgcccagcgcacagacgaggagcccgccctccggctccagccggtattccaacatggtcagcacctccttcatacggcatggcagccgtatgtaccaagaagcgcggaggcgcggggcgcaggcgggtaagacccaaagcggagcgaacggaccggagggcccgaaggggccgcaggccggcttgcacagtcggagggtcttagacgccgtcgcgcagccgccgcagcgtgacaagaagcgcggaggcgcggggcgcaggcgaaaccgcagcggctatgccgcgcggagggccgggcggccccctagaatcctatgctcaccggacctgtccggtgccgtagattacatatttggagctggtcagctcctccaggcccatggggccccgggcatgcattttttgggtggagatgccgatctccgcccccaggccgaactcgaagccgtcggtgaagcgggtggaggcgttgacgtacaccgccgcggcgtccacctcgtccaggaagcgctgggcggcgaagtagtcggcggtgacgatggcctcggagtggccggtgccgtgggaggcgatgaagtccaccgcctcgtcaaagccggataccaccttgacggccaggatgtagtcgccgaactcggtgtcccagtcggcctcggcggcgggcttgacccagtcccccaggatggcccgggtttccgggcagccccgcagctccacgcccttggttcgaagcagctcccacgccaggggcaggaagtcccgcgccactgcccggtccaccagcacgcactcggcggcgttgcacaccgaggggcgggaggtcttggcgttgtagaggatgcgggctgccatgtccaggtcggccctctcgtggacgtagatgtggcacacccccacgccggtctggatgaccggcacccgggcgttctccaccacgctgcggatcagccccgccccgccccgggggatgagcacgtccaggtactccgtcaggtgcatcagctcgttggcgctctcccggctggtatcggccaccagggccacgcagtcccggggcaggccggcctcctccagggcgtcccgcaggacggccacaaaggcctggttggagtggaaggcctccttgccgccccggaggagcgccgcgttgcccgacttgaggcagagggctgcggcgtccaccgtcacgttgggccgggcctcgtagatgatgccgatcacccccagggggacccggcgctttccgatggtcagtccattgggccgggtgtccattttggtcaccgccccgatgggatcggggagggcggccacctgccgcaccccctccacaatgccggcgatgcggccctcgtccagcgccagccggtccagcagggcggggcggagtccggcggccatggccgcctccagatctgtggcgttggccgccaggatctccccctgccgggcctcgatggttctggcggccgcctccagagcggcgtttttcctggcggtacccgccacggccagcgcccgggccgcgtgccgggcggccagaccctgggtctccagtacagtcatgggattcctccttcttttctattgcagcgcgccccgccgggcagaaaagcgggtgcccacgttcttcccctccacgatgtcgtagagggcctccatccgcgccccgttggcgatgaccatgtccacccccgcctccaggcagagctgggcggcgttgagcttggtggccatgccgccggtgccgcgccaggtgcccgcaccgccggccatggcccgcagctccggggtgatggcctccacctggtggattagccgggcgtcggggtgggtgcgggggtcggcgtcatacagtccgtcgatgtcgctgaacagcaccagcaggcccgcgccgcacagccgggccacgatggcggacagggtgtcgttgtcgcccagcaccttgcactggccggtttcgatctccgctgacgacaccgagtcgttctcattgaccaccgggatcacccccagctccagcagggcctcaaaggtgttgtgcagatgctccgagcggacgggggactccacgtcctcgccggtgaggaggatttgggccaccgtccggttgtactcggcaaagagcttgtcatagatgtgcatcatcctgcactggcccacggcggcggcggcctgcttcatccgcagctcggtggggcgctcccccagccgcagctttttggtgccgatgccgatggcgccggaggacaccaggacgggctgataccccatgccctccagatcggccaatacacgggccagatgctccatgttttgcaggttgaggctcccggtctcccgggtgagggtggatgtgcccaccttgaccaccagcctgcgcggattgcgcggttgtttcacgtgcttcacactcctcttccattcgcccttcatcatagcacatttcaccggcgcacgaaaggggcaataaaaagaaaaggaaggggctgcttccagaaagaaaactgaatgttttagcgcgtatttacacatttaaggttgaaatccttgctgttttggagtacaatagcctgcgctgaccaagtagtaaccgggagggggagacagggtgctcaatatcgtgctgtttgagccagagatcccccaaaatacggggaatatcgcgcgcacatgcgcggtgaccgggacccggctgcatctcatcaagcccctgggctttgacatcagcgacaaggcggtcaagcgggccggcctggactactggcatctggtggacgtgcgggtatatgaaaacctggacgacttctttcagaagaccggcgcggaggatatctggctggctaccaccaaggcgcccagatcctatactgaggcggttttccgggacgagtgctacctggttttcggaaaggagaccgccggcctgcccgaggcattccgcagagctcacgccgaccgctgcatccgcatcccaatccgggcggaggcccggtgcctgaacttatccaacgccgcggcgatcctcgcctacgaggccctgcggcagcttgactttcccggcctgaccggggagggcgcgatgaaaggagaggctctatgaactacaacaagaagaccgtaaaggatatcgacgtagcgggcaagaaggtcctgctgcgctgcgacttcaatgtgccccaggacaaggccaccggcgtcatcaccgacgacaagcgcatcgtggccgccctgcccaccatccagtacctgctggagcagaatgcggcggtgatcgcctgctcccacctgggcaaacccaaggagggacccgatcccaagttcagcctggctcccgtggccaagcgcctgagcgagctgctgggccgcgaggtcatcatggccgccgacgtggtcggccccgatgccaccgccaaggccgccgccctgaagcccggccagatcctgctgctggagaacacccgctttgagaagggcgagaccaagaacgaccccgagctggccaggaaaatggcggccatggccgacgtgtacgtgtccgacgccttcggcgccgtgcaccgcgcccacgcctccaccgccggcgtggcagcctacctgcccgccgtgtccggcttcctgatccagaaggagctggagatcatgggcggcgccctggctaaccccaagcgccccctggtggcgatcctgggcggctccaaggtgtcctccaagatcggcgtgatcaatcacctgctggacattgccgacaccatcatcatcggcggcggcatgtgctatacctttgccaaggcccagggcatcggcgtgggcaactccctgctggaggccgactggctggactactgccgggagatgatgcagaaggccaaggacaagggcgtcaagttgctcctgcccgtggacggcgtggccgccgcggagttttccgccgatgccaagccggtggccgtggacggcgcgggtatccccgacggcatgatgggtatggacatcgggcccaagaccatcgccctgtatgccgcggccgtgaaagaggccggcaccgttatctggaacggccccatgggcgtgtttgagttccccgcctttgccgagggcacccgggccgtggcccaggccctggccgagaccgacgccatcaccattgtgggcggcggtgactccgcggccgccgtggcccagctgggctacgccgacaaaatgacccacatctccaccggcggcggcgcctccctcgagttcctggagggcaaggagctgcccggcgtggcgtgcctgctggatcaataagacttccgtgccgggcagctcctccgccggggcccccgcacgagccaagcggctccgccgcgggtcgtgtggggaaaaggaggcgcagcggagggagcgagctttcccgcaaggcgtggaagcgagtgatccaaagcttgcgccgacgcgcccggcgtggcgtgcctgctggatcaataagacttccgtgccgggcagctcctccgccgagggccccgcacgaaccgctgcgctggggccgcgccgcccccttatagctattccaaaatcgaaaggattgtttgccgtgaaccgccgctaccgtaagacgattatcgctggaaactggaaaatgaacaaaaccctctccgaaacccgtgcatttgccgaggagcttaagcccctgctgggcaagcccaactggtgcgaggtagtgctgtgcgtgccctatgtgaatatccaggccgccgtgcgcctgttcaaagagtgccgcgtctccatcggcgcggagaactgccactatgagtcccacggcgcctacaccggtgaggtggcccctgagatgctgaaggagctgggcgtcaagtatgtggtgatcggccattccgagcgccgccagtactataatgaaactgatttcacggtgaacaagaaggtgcatgccgccctggaggcgggcctgtaccccatcgtgtgcgtgggcgagagcctggagcagcgggagctgggcgtgaccatggatctcatctcctaccaggtgaaggccgccctgtccggcgtgcccgccgagaagatgcgccatgtggttatcgcctatgagcccatctgggccatcggcaccggcaagaccgccaccgccgagcaggccggtgaggtctgcgaggccatccgcaccgtcatccgcaagctgtacggcgcccgcgtggcccgctccgtcaccatccagtacggcggctccatgaacgcaaagaacgcccatgagctgctggcccagcccgacgtggacggcggtctgatcggcggcgccagcctgaaggcccccgacttcgtggagatcgtgaacgcggccaaccaggagtaacgccgtccgcgtcgggcggcggttcgggaacccaacgagagcccagcgcagcacccgcaaggggtacgccgtattgtaaggcggcaaagccgccgacggcgatacagcgggtctcgttgggagaggaggagcaaggaagcggagtgaaatttttgccgggaggcggaaatggagcggagcggactttgcgacgacgaggacggcggcctgatcggcggcgcgtctctgaaggccccggactttgtggagatcatgaacgcggccaatcaggagtaagaagcgcggagggcaggcgtacaggggagttaaggcagggcgcagacgaaaaaacaggcgacgggcgataccctggagcggtatttttcgcgcagcccggacttaacgatccggacgtgcgcccaacccgcagcgtgacagcgagaagcgcagggccgcccgcgcccgtctccgttttggaaagagaagaagagattcgaggttattatgagtaagacaccgactaccctgatcattatggatggcttcggcgtatgggacgagcgggctggcaacgccatcgccgcggcccgcacgccgaacctggacaagatttttgcggaaaaccccggctgccgcctgtccgcctccgggctggacgtgggtcttcccgagggccagatgggcaactccgaggtggggcacaccaacatcggcgccggccgggtggtgttccaggatctgccccgcatcagccgcgccattgaggacggcagcttctttgagaacgaggcctatatcgaggccatggacgactgcaaggagcgggacggtgcactccacctgatggggcttctgtccgacggcggcgtgcacagccacatcacccacctgttcgccctgctggagatggccaaaaagcggggattaggccgggtgtatgtccactgcttcctggacggccgggacgtgccccccgcttccggcaagggctatgtggaaaagctggtggaaaagtgcaaagaggtgggcgtgggccaggtggccaccgtcatgggccgctactacgccatggaccgggacaagcgctgggaccgggtgcagcgggcctacgacgccatgacccggggcgagggcgtgcagaatcccgacccggtggacgcggtacagaggtcctatgatgccggggtgaccgatgagttcgtggagcccgtggtgtgcaccaaggacggcaaggtgaaggagggcgactccatcatctttatcaacttccgccccgaccgggcgcgggagatcacccgctgctttgtggaccccgccttcaccgacgtggagcggaaaaagggctacttcccggtgacctatgtgtgtactaccgagtatgacgccaccatgcccaacgtgctggtggccttcccccaccgggagctgaccaatatcttcggtgagtatatcgcccgccagggctatactcagctccgcattgccgagacggagaagtacgcccatgtgactttcttcttcaacggcggcgccgagcaggtgttcccgggcgaggaccgctgtctgatcccctcccccaaggtggccacctacgatctccagccggagatgagcgcccccgaggtcaccgaggaggccgttaagcgcattgagagtggcaattacgatgtgatcatcctcaacttcgccaactgcgacatggtgggccataccggcgtgttcgaggccgccgtcaaggccgtggaggccgtggacgcgggggtgggcaaggtggtggaggccacctcccggatgggcggcgtgtcgctcattaccgccgaccacggcaacgccgagcggatgctggacgctgacggtacgaccccctacaccgcccacaccactaacctggtgcccttctatattgtgggcgccgatgtcaagctgcgggacggccgcctggccgacatcgcccccaccatgttggatctgatgggcctggaaaagcccgccgagatggatggggagac

SEQ ID NO: 4246 - DNA, 112661 bp, Unknown
  gut microbiota DNA sequence
acagcgtccgcggcggtttctttgccttgcccctaatagaagatcacccgcaccgcccaggcagcagccataaagcccgccaggtcggcgcagagggctgccgggacggcatagcgggtcttgacgatgcccgctgcgccgaagtagaccgcgatggtgtagaaggttgtctcggtggaacccagcatcactgccgccgttcggccgatcagggagtcggggccgtaggtggcgatgagctccgcccccacccccagtgctgccgagccgctgaccggtcgcaccagcaggagtgccacggtctccggcgggatgcccagggcggtgagcaccggggccagcgcccgggccgccagctccagcgccccggaggcgcggagcatatacaccgccgtgagcaggcccaccaggggcggcacaatgcgcagaagcacccccagcccctccccggccccctgaaccagggcgtcatacacatccacccgccgcgccataccgtacaaggccaccgcggcaatgatcaggggcaccagcatggtgaagaacagctccatgcctaccccctccacacccggccgaagagcttgaccgccccgatgccggtgcacaccgaaatggccgaggccagccacaccgcgggcaggatatcaaagggggcggcgcaccccgcggccaggcgcaccgaggccaccgtggtgggaatgagctggatggacgccgtattgcacaccaccagcatacacaaagcgtctgaggcccgtccgggagtacggcggctcatctgccgggcggcctggatgcccaggggagtggccgcattgcccagccccagcaggttggccgacacgttggccgagatggtgtccatcacctcccggtcccgcgcaaactccgggtagagccgccgcagcaccggccggagcagccgggacagcccatccgacaggccggagcggcgcatcacctccatcacccccatccacagacagagcacccccgccatggacaggcacagctccaccgccgcggccgccccctccatggccgcagccgccaccgccggtccgtttcctgtcgccagaccgcacaggatggagaccaccaccatcccggtccagatcactgtcattgccataccggacacctccccgtcttcccccatttatacgggctgtccgcaggaaacatgcctgcgatccaggctgttgtaaactgcttttccaccgcccgtcgaaaaaccccgctttccctcgtaaagatttccagatttcgattgacaatccaatacgatatgttataataatgtcagtttatagataatgacggaaatatgtggaaattcgtagggaaaggaagtaactcttatgaaatcgacgggcattgtgcgcaaggtggatgaactggggcgaatcgtgctccccatcgagctccgccgtacgttggacattgcagaaaaggattcgctggaaatttacgtagatggggcttcaattgtactgaaaaagtatcaacccgcctgcattttctgcgatgacgcaaaagatgtaatcaacttcaagggaaagaacgtctgtcccaactgcattcgagagcttcagttaaaataacaattcgtttcatattgtaaaaacaccttgctttttctgaaaaagcaaggtgttttcttctttttttgtcccttttttcgatcgaaaccgcaggtgtttcgcggtttcccaataatactaatagtaatatttttgattccaaatacttctaaataaggatgtccttttttccgcacagttttattcgcagccgccggttttccccacggcacggtcgtaaagttcatttttagccaggcctgtttcccgcgccgcctgccgcactgcgtcccgcagggagaggccctcggcccgcagcgcctccacccgggccagcccgccggcgagggtaggggcctcctccgccgtcccggccgcgccctctaccaccagcacgaactctccacggggcgggttggccccgtaccactccgcagcctccccaagggtggtgcgccgcacctcctcgtgaagcttggtcagctcccggcacagggagatgcgccggcccggcccaaaggcctccgccagatcgtccagggtggcacagagcttgtggggcgcctcatagaaaatcatggtgcgccgctcccccttcagttcctccaggtgggtgcggcggttcttcttgttcatggccaggaagccctcgaaggtgaaccggccggtgggcaggccggacaccgccagggcggtgaccagggcgcaggggccggggatggccaccacatccaccccactctgggcgcagagggccaccagctcctcgccggggtcggaaaccgccggagtgcccgcgtcggtgaccagggcgcagctctccccggccagcaggcggccgagcaccgcctcgccccccgccccggtgttgtggcggtaataggagagcatgggctttttcagccccaggtggttaagcagcttgagggtcacccgggtatcctccgcggcaataaaatccaccttccccagggtgtccgcgatgcgccgggagatgtcccccaggttgccgataggggtgggtaccagatacagcgttccggccatgtatattacctccggtttgacagtagtgtgggcagaatctccagccccggccggccctgccgcaccgcctccagcaggacggcggagggcgggcaatccagcccgtgctggagcagccggagccgcttgggctccagcccggcggagcggagggcggcaaagagatcgcacaaacgctccggccggtgaacgagggcgaagcgtcccccgtttttcagcagccgcccggcggcggcgcaccagtcctccagggcgcagtccccctccatccgggcgggcccgccgcagccgccgctccccgccttgaagtagggcgggttggagaccgccagggagaagctcccggcggggagggttttgctcacggcgcagagatctccggtgcaaatcgccccatctaggccgttttccgccaggttctggcgggccagggcggcgtcctccgggcagtattccacaccggagaggaccagtggggaaacccgggcggccaacagcaggagcagcgcccccgccccgcagcccaggtcgcacacccggtccccccgccgcaccgaggcaaaggcggccagggccaggctgtcgccccccagggggaagcaggcgtccgactgacggtatacatagggccccagccgctccggcgctctcatggcataccctccagcaggcggcgggtgatgcggccggtcaggccccagatagcccgtccctcccaggcgtagatgggcacctccacccggccgccccgccagcggtagccctggggaaagccgatgcgggcataggggaagtcctcccccacctgggggatcagcgggtaggcatacacctccggcggatgggcccgcagccagtccaccggcacaaagaaggtctccttcacctcggcggggccggggcggagccgctccgccgcctccggggacacgatccccaggacgggatagagcacaaagcccccctggtgggtcagccagtccagctcggccaccacctccaccgccggccggggaatgcccagctcctcccacgtctcccgcagggcgcaggagaccgcgtcctcccccggctccagccgcccgccgggaaagcacacctcccccggctggcggcccagggtgtcggcccgcacctcatagagcaggcacaggccctccggccgctccaccaggggcaccagcacggcgtactcccccgtcacgtcctgcaccttgggcacatgtcccgtccagcgggcccgaaactcctccgcggtcatagcccctccatccagcggttcagcgcctcgtaaaaccggcccacgtggacgccgtccagcaggcggtggttcagctccaggctcagcagcaggcgggtgcggctcccttcctcctcccagcggccccaggccgcccggggtaccgagtcggagggattcacatccttctcgtttttcagggctgtgagggggaaccagggcaggcaggtgaagtagacgagctgatccccgtcccaggggccagaggtgatgaactcggtctgggccgccgcctgggccttggcccggcggcagaagtccgccgcgtcctcccccgcctccacggtgacaatctggaacagctcgctgcccggcttcaggtcggtgaagctgggcaccagggtgtcgtggcggacgatcaccccgtcccgatccttgtagtggaaggcgtccaccgcctccatggccttggtgacgccgaacaccatggccgggtaaaagggcatggcattggccctgcaccaggcccgcaggggggtcacgtccaccgggaacgtcagggtgtagaaggggtcggacatgggggtgaaaaagtcgtaatgggcccggcggggccaggtctccttgtcaatgatggtcatcggtatcctcccgtcccagcaggtaatcggtcgtcacgtgaaaatagtccgccaaagcaagcagtgtgagggagggtacgtttacatagccatactccattctctgatagtgacggtctgtacactccagcagttctgccatttccacctgggtcttgtgcttctgggttcgcagttccttcagacgtttgccaaacgtctccataatcttctccatatgtgcaaatcctccttgacacaacttttaaagtggtgtataataaacacgacattggaggtggtgaaatgacggactttgtacaatttttgtatacccagtatatccagtcgtatatagacgccatgcccatggacgcggcggacgagtaccatcacgatctggtcaaaaacgaatgtacgccggatctatggactgatatagaggcaattcgggcctttgccgccgcccacgcctttctgctgggcctgcgcaccggcgcggggctggctgcacacgggcggatgtaggcatccgcccctacacgcacgccgcagggcccggcactctcatccccccgccgtccacacgccggcgcggggcgggcggggacaagccccgcccctacgcccgggcctgtgcggttatccgcatctgtaggggcggcccttgtggccgcccggccgccgcggatttgtgccgcttcgggggaaacagcgtgtcaggcggcccgcgtgtctccaagtcggccacacagccatgcctccagatggcgggcggggacaagccccgcccctacgcccgggcctgtgcggtcatccgtgtctgtaggggcggcccttgtggccgcccggccttacgactccggccgggtgaagtgggccagggggtcgggacgctcccacagcaccaccgccccggcggccagggacttgggcacgtcgatcagccgctggttggcgctcccccggaacagggcggcgtaggacttctccgcctccacaaagggcccgtccaccagcacgtccacctgctccagcagggccagcgcgtccggcacctctccggcgagcagtctcttataagtataccccgtataggcccacacgttcaagcccctttcccgggcgatgcgggccagggcggcgcactccgccgcctggcagaagggctccccgccggagagggtgaggccgtcggtcagcggattgccggacagctccgccgccagctccgccaccgagacctcccgccccccggctggatcgtgggtgcacgggttgtggcatccagggcagcggtggggacagccctgggtgaagacggtgaaccgcaggccggggccgtccacgatggagtcggatacggtattggcgatgcgcatggcccttcctccctcaaacagcagggccgccgctgatgcggcggccctgttcgctttatgtctcgtccaccacctggaagatatagaacttcaggtagagggactggtcggccccccacagcaccggatggtcgggggactgggtgcggtactccacctgccgcaggcggcggcgggcgtcccgggcggcctccccgatggtcttggtgaacagctccggcgtcatgaagtgggagcaggagcaggtggccagatagccgccgtttttcaccagcttaatgccccgcaggttgatctcccggtagccggtgaccgccttcttcactgaggcgcgggacttggtgaaggcgggcgggtccaggatcaccaggtcaaatttctcgcccttccgctccagctccggcagcagctcgaacacgtcgcggcaggcaaagcgtacccggtcggacatgccgttgagggcggcattctgcgtggcctgggccacccccagctccgaggcgtccacccccagcacctccgccgcgccgcccttggcagcgttgagggcgaaggccccggtgtgggtgaagcagtccagcacccggccgccgcgggccaggggctggatggccagccggttgtacttctgatccaggaaaaagccggtcttctgcccctcggccacgtccacctgatagcggacgccgttctccacaatctccaccaccggatcgaaggggtcggacaagaagcccttcacccgctccatgccctccttgaggcgcaccttggcgtcgcttcgctcgtagatgccccggacggagatgccgtcctccttcaaaagatccaccagcagagacagaatggtggatttcagccggtcgatgcccagggccagggactccaccaccagcacgtcggcaaacttgtccaccaccaggccggggaggaaatcggcctccccgaagatcacccggcaggaggaggtgtccaccgtatccttgcggtactgccaggcggcgcgcacccgccgctccaggaagtcccggtcgatcacggccccggcgtcccgggacaggacgcgcaccgcgatggtggaggctcggttgaggaagcccacccccagggggtagccgttgtagtcctcgatacggacgatgccgccgtcggcgggttcgcccagaatctctgcaatctcgttgtcgtaaatccaggggccgccggccttgaaggcgcggccctctccccgcttgagacggatggcgggcgtgtctgacatggtatctctcctctacaagactggttgagcaggccgatgtgggcatcggcccctacgaggcagcgctagggcttgtttgaacattggcgatgtgcccagcggcgagggattttggaccgctggcaagcaattttttcgcgggaatcctgacggatttcaaggaaaaattgcgccgtccaggggacaaaagacccgtcgattgggcatgttgatatttttcaaacaagccctaggcttgtccccgtccctattacaccgaatgctttacccggtcgcgctcctccgcccgcttgccgttgttgaagcggtccagggttcccaccagatagccggtgatgcggcggatgcgctcaaagggcacgccgtcggcctcggtgcggccgcagccggggcactggtcgccgatgatgccggagaagccgcacaccgggtcacgatccaccgggtggttgacgctgccgtagccgatgccgctctccttcatgcagcggatgaccttctcgaaggcctccaggttgtcggtaggatcgccgtccatctcgatatagctgatgtggccggcgttggtgagggcgtggtagggggcctcaatccggattttatcgtaggcggagatggggtagtacaccggcacgtggaaggagttggtgtagtactcccggtcggtgatcccctcgatggagccgtaacgggcccggtccagcttgacgaaccggccggacagcccctcggcgggggtggcgatgagggagaagttgaggccccgtttggcggcctcctcgtccatgcgggcccgcatgtgggagatgatctccaggcccagcacctgggccttctcgctctccccgtggtggacgccaacaagggccttgagggtctcggccaggccgatgaagcccacggtgagggtgccgtgcctgagcacctcccgcacctcgtcgtcccagtccagcttgtcgctgtccagccacaccccctggcccatgaggaaggggtagttgtatacgtgcttgcggcactgaatctcaaagcgctccagcagttgctccacgcagagatccagcatccggtccagcccctcgaagaaaacgtccagatcccccctggccttgatggccagccggggcaggttgatggtggtgaaggacaggttgccccggccgttgcagatctcccggctgggatcgtacacgttgccgatgacccgggtacggcagcccatataggcgatttcggtctccgggtggccgggcttgtaatattgcaggttgaagggcgcgtcaaggaaggagaaattggggaacagccgcttggcggagcaccgcatggcaagctggaacaggtcgtagttgggctcgccggggttgtagttgaccccctccttgacccgaaagatctggatggggaagatgggggtctctccgttccccaggccggcctcggtggccagcatgacgttcttcatcaccatgcgcccctccggggaggtgtccatgccgtagttgatggaggagaagggggtctgggccccggcccgggagtgcatggtgttcaggttgtggatcagggcctccatggcctggtaggtggcccggtcggtctccttcaccgcccgctggtgggcgaaggcctgggcccgctccacctgctccgccgtgccgaaggcggggaccagggccgcccgctcggcggcggcgtaatccccccagtcctccagggtgggcaccagcccggtgtcggccttgagctgcgtcataagggccttcagctccctctccgggtcctcccggccctccagcagcatgagggcccgggccaggttctggcggtacacccgcgcgaaggtcttgcgcacgccgtcggccatgccgtagtcgaagttgaccacgctctggccgccgtgctggtcgttctgattggactggatggcgatgcagcacagggcggcgtaggaggagatgtcgttgggctcccgcagggtgccgtggccagtggagaagcccccctcgaacagctttttgatgtcgatctggcagcaggtggtggtgagggtgaggaagtccaggtcgtggatgtggatgtccccatcccggtgtgcccgggcgtggtcggggttgagcacaaacatgtcgtagaactgcttggccccctcggagccgaacttgagcatgctccccatggccgtatccccgtcgatgttggcgttctcccgcttgatgtcggagtccttggccttggagaaggtgatgtcctcataggtcttcatcagccgggtgttcatctcccgggcgcggctgcgctcctcccggtagaggatgtaggacttggcggtctgcacatagccgttgtccatgagcacccgctccaccagatcctgaatgtgctccacatcgggctgggcctgcccctccacctccaggatggagagcacctcgtcggccagctttctggcctcctccccccgtccgggcttgtaggtggcgttgaacgccttctcaatggcgcgggcgatcttctcctcgttgaactcggccaggcggccgtcccgcttgcggatctttgtcagtgtcatggctgtccgcccccttcttccttcatgaaaaaagccaacacagggaaagacaccccgtccaggcttggcactacatcttgtgttcttatgttcttgatgtctcctatgataccgtatcttggttagcccgtcaaggcacaaaacaaaaagcgcgccccaaaaacagggcgtgctttttggcggtttcgctgattttggaacaggggacttgacgggatttacagcagcaccaggccgtatttccgggccatctcctggaggaaggccgcctccagctccccggtgccgtcccagaaggcccggccctggtagagccgcagggcctgctccagcagctcgggcacgtcggtccagaggcacagcgcatccttcaccgcgtattggttctcggcaaaggtgtagaggtcgtcctcgtcgtaaatggcgatcttcagcgcgccctggggggcgttctcctccgcctccagaatatcctccagcagatcggaggtgcactcgatggtctcccccacatcgatgtcgggcgtaatgaaccgggcctccttctcactggcgcagggaatcacatcggggtcccgcctgggcgggacaaaggcggagaaatccaccgcctccaccgcggagcgcagggcggccacatgctccgccgtagtgccgcagcagccgccaaagatacgaacgcctgccgccgcgaagccggcggcgtaggaggcgaactcctccggcgggcagtggtacaccgcctgcccctccaccgtctcgggcaggcccgcgttgggcttggcaatgagcgggacggtagtgtagggggtgaggcggcgcatctgctccagcatctccgccgggccggaggagcagttcagcccgaaggcgtccacccccatgccctgcatgacgatcagggcggccagcacgtcggtgcccgagagggtgcggccgttctcgtcgcaggtaaaggtgacccacaccggccgatccgacacgctcttgcaggccagtaccgccgcccgggcctcgggcatggtcatggtggtctcaatgaggaagaggtccacccccgccgccgccagggcagccgcctgctcggtatagatggccaccagctcctcaaagctgctctccccgaagggggcgatgaacagccccgtgggggccatgtcccccgccaccagagcgcggccgccggcagcctgccgggacagctccaccagccggcggttgtagtccgccacctgcccgaagataccgtgctgctccagccgcacccggttggccccgaaggtgggggcgatcagcacctggctgcccgccgccacataacccctctggagctccagcagggcctccgggtggccgagcacccactgctccgtgcacgcgccggcgggcatgccccgcttatacagctcggagccggtggctccgtccagcaggatgggcagggataagggggggatggtgtccataattgttttattcctcctaaaattgcatggatgcatgattgggagatagtatatcacaaaacgatatgggaatgcaagtacagcctcatatagacaaaaacaaaggggggccgggagtatccgcggcccctctttgtttatcccagctcgttgattttcttagtggcggtgtggtagatgggcttccactccaccttctgcaccagtgcggcaatggaaatgggaatgtaggtaaacataaagatcgggaaggtgaggacataccccagcttctgcaccggcgcggcatcgatgtgacgccactcggacagcaccgtgatcagcccgtagaacagcaggcccacatagaaattccacacggcggagcccatgaagcccacagtctcatggatgatgcgggtggccagataggccggctgggtgaggcaggcggccaggatcacgccgttaaagagaatcatcagcagggtgagcagcatgccgggcgccaccgtcacgaacatgtcgtagcaggaagtgcccaggcggccccggcggaagcagcccttcagcagggggagggtgtactcccggtccacctggtagaagcccttggaccaccgcagccgctgatcccaggactgccggaaggtggtgggctgctcgtcgtagaccaccgccttgtcgcagtagccgatcctcttgccctggatggcgcagtccacggaaaactggatatcctcggtgagcaggtggaagggccagccgccgttgtcctcgatgacccgggcggacaccaggaagccggtgcccgacacgtggcagttggtgcccagcagggtgcgggggaagttgaggaaccgggcctcccgcaggaaccagatggagtagccggcggagatccagttggccgcgaagttcttggagttgcggtagcaggtcaccgcatcgtagccctggtcaaaggtgcggttcatctcggcgacaaaattggcgtccaccagattgtccgcgtcaaagacgaagtagccgtcatagcagtccttcccctcctctttgaggcggcggaagaggtagtccatggcgtagcccttgcccttatgtacctggtcgaagcgctcgtacacgaacgcgccggcccggcgggccgccccggcggtgtcgtcggtgcagttgtcggccaccacatagagatccagcagctcctttgggtaattctgccggttcagactctccagcagttccccgatgaccccctcctcgttgcgggcggatacgatcacggcgaagcggtgcaggcggcttggctggtgccggtcctgccagcggcggcgaaccagccccaccactacatagaagccctggtacaggtagagcagggtaaacagaaccaccacagcaaaattgagatgcttgacaagttccaacatagtcattcttgtaatcctccatagtttgggcggatggagcacgcgctgccggagacgccccgtttgcgcgtagtgcctatcataccacgtttcaaaaagattacaagagtgttacataccaattaacagattattaagaaaaagtttttatttcttttatacaaatgtaaggaaccgccatactgtgctgacaggattccccagcccgccacaaccgcgcggcgccgggggcccccggcgccgcgcatttgcgattgttacattttctccggggccgccacgccgatgagggacaggcagttggcgatgacggcgcgcaccgtgtcggccagcttgaggcgggcggcgagcaccgccgcctcctcacccttgatacggcaggcattgtagaagcggtgaaactccccggccagggtcaccagatagcggttgacgccggagggatcgtaatcccgggcggccaggcggatgacctcgggcagttgggacagggttttgataagggccttctcctccgccgtggcgtagagggcgggatccaccgccgccgcgtcgggcacgaggtgtccctcctcggccagccgggcaatgagggagcagatgcgggcgtgagcgtactggacatagtagaccgggttctcgctgtcctcccgcaccgccagatccagatcgaagtccagggcggaggtggaggagcgggagttgaagaagaagcgggcggcgtccacgctcacctcgtccagcagatcccgcagggcgatggccttgccggagcgcttggacatgcggacgggctggccgtcctggaggaggttgaccagctgcatcagcacgatgatcagccggtgggagccgtccaggcccaggccgtccaaggcggcctggaggcgggccacgtggccgtggtggtcggcgccccagatgttgatggccttggagaagccccgctgctccagcttgttgcggtggtaggcgatgtcggcggcgaagtaggtgtagaagccgttggcccggcggagcacgtcgtccttcaggtcgagcttgtccacctgctcctggctcttgccctcggccaggaacttctgcttgagcagggcggtggtgttgagccacagggccccgtccttctcataggtccagcccttgccggccagcagctccacagtctcggccacatagccgctgtcgtggagggatgactccaggaaccactcgtcgtactcgatcttgtagcggcggagatcctccttcatcttggggatgttgacggacaggccgtactcggccatggccgcctgccgctcctcctcgctcttgtccttccagccggcgccgtgctggtcgtagaagccccgggccagctccttgatgtcgtcgccgtggtagccgtcctcggggaaggggacgttctcctcccccagcaccaactggagatagcgggcgtcgatgctcatggcgaacttgtggatctggttgcccgcgtcgttgacgtaaaactcccgccacacgtcgtagcccgcccgctccagcacggcggccagggcgtcgcccagcacgccgccccgggcgttgccgatgtgcatggggccggtggggttggcggagacgaactccaccatcaccttctcgccgcggccctcatccaccgcgccataggtctccccctcggcctggatgtcggcgagcacgccgccgtaccacttgctgcccagggtaaagttcaggaagccggggccggcgatctccaccttgtcaaaaaaggtgccggccagatccagatggctgacgatcacctcggcgatctggcggggggccttgcgcagggccttggccccggccatggcgaaggaggaggcgtaatccccgtgggtgacatccttgggaatctcgatggtggccttgacctccgcgccggcgggcagcaggccctccgccgcggccttctcataggccgcctgggtcagagcggcgacctgctcccgggccgcctggatcatattggacatggttctatctccttttcgattcatctctctgtgtgccgcgcagccggccgccgcgcgggatagtcactgcttgatggccggccccttctcccgcacgtggatgcggaacaggttctggcccgccagcgcgtggtcgatttcgatggcgtagtcgatctcgatgctgccgcccctggcgtccagctcggcccgcatcttgcgggtgttgatgcctacggacagggcgccgtagggggtgtcgtacatggacaggtgccggcggccctcctcaaagaccatctgggagttgacctcccccacccgcaggagcgtgacccggtcccgctcgatctggaaggtggtcagggtgccctccaggccggtgagctcgctctcctgatagctcagggtgtagccgtcgtccccgtcgggctccaggcagccctccgtgaccagctcgatggtgtcatcgccctgtgcctcaaaggactgctttccctggatggaaataatcacgttgttctccatggttgttccttccttgtcccacgttcaaactgcaaattgcacattattatacccaatggagcctcagatgtaaagggctttcccctcaatattggctgatatccacctgctccaccgcctgggctacatcccagcccaggaaagtggaggccaggcgggagaagtcctcctgccggtcgctgacaaagcagcggcagctcccccgcccgggcccggccagggcgtcccgctcccgcaggcagtccgccgccgcccgggcgccctcggcgccggagttgatgaggcgcacctccggccccatataggccccgatgaccttctccagcagggggtagtgagtgcagcccaacaccagggtgtccacccccgccgccttcagcggggccaggtactccgccgccaccgtctcaatgaccacgtcgccggggcggaagcggccgttctccaccaggggtacaaagagggggcagggctgggccagcacccgggccgccgggttctccgcccggatgagccgctcgtaggcgccgctgcggatggacgcctgggtgccgatgaggccgatgctcccgcttcgggtggcccgggccgcggcgcgggccgctggggccaccactcccagaaccgggatggggttctccgccgccagcacgtccagcgcggtggtggacacggtgccgcaggcgatgacgatagtcttgagatcgaaggtgcgcaggaaggccacgtcctgccgcgcgtatttcacaatggtctcccgggagcggctgccgtaaggtacccgtccggtgtccccgaaatagacgatatcctcctccggcagcaggcggcacagctcccgtaccgtggtcagcccgcccaggccggagtcgaacacgccgatgggtctgtcatccaaggcgattcctcctaataaaaagagcgcaaatttgttatctgtataatgatatgcgaaaatttaccggaagacaaggggcgttttcatgttttccgacgctctccccgtttgacattttggcggggctgactataatatgaggtaggggatggccgttcacgccccgcaacgtcatgacagcgaggaggtttcgtgtgatgaagctggaactgacgaccaaacaattccggcgcctgctggatatggcctatatcggcaactggattttgaactccacccgcggcgacgaccggttcaaggattacgacgacgtggagagcctgctctttgccaaggcccgggaggagggcatgggcgtgctggccgaggactggcagggcgaggtggtgccctcccgcgcctttgccgagggcggcatccacgaggcgatcatggaatatgagaacaacgtgttcttcgatatcctggccgaggatctggcccgccgggatatggaggacgcctccatcgaccagaacaactatgaggagctgtccagccgcattgacgcctatattgccgagttcgagcagcacggcactgacaacattctggtggacagcgaccagctataggccagacacacagggggcggcgaaccgcatacgcggttcgccgcccctgttttgttctctttcattcacgtctcctggagcacccaggtcgggaacagggtatcgtatactgtgtccagggagccgcggccggcctcaatggtgccgcccggcccgtccagaacggtcatggtgcagaccgtccctggcagatactccgcctcggccagcttctcctggaagagggccagcgcatcctccgcccaggccgcgtcataggccgcatatccctcgtctgtggacgtatccccggtgtagcccgcattgaacgcgtccagccgctcccagagtgcatcgtttacccgcgccagcgcatccacgggccgcaccgttatctccacctcggagccgtttcccgtcgggacggcggcccccacggtatagtccgccttggcgtacagctcctccagcaggccggccgcctctccgcggatctcctcggtggggaattcaattatcagcaggttgcagggcgcctgtacgttctcctccgcaatttgggcggacaggctctcctccgtctccccaagggcggtcagaaactccgggtcatacccacgccccagtcgggcatccagcaggcactggacatagcgggccgcgccgaaatcggcgggcacgcccggctccacctggccggagagcacctcgaggcgctctaccgtctcccccgccggaggcgtggtgacgggctgcgcagcggtttccgtgaccctcccgttcaggcttagctccaccttcccgatgtaagccccagtgaactccatctccagctccagacgccccggagcggcatccagggtaaagccggcgtcggctgggatgcccagcacatccagctccatctgtccgctgccgtccagcttctccagcgcaccgccccgcaggaccgcctccccatgcatgtccagagcaggcagcccctccacagcgggcgcgtcctccataacacccagcatacgggcccgctccagcagggcgggcagatccaccgcccagcgatagttggtccgtccaccggaggcgctgcgggtgaagttgccgtcgtccaggagcaggcggacgggcagggcggagtccatcaccgtctcccaggggctggagcggtagtaataccagctatggccgtacgcctccaccagcagctcgcccagcgtcccggggagcgacagggtgttcacggcaggcagctcccccacctgagtactcacccaaacgtcatcaggtaacggctctccctccaggctatagagctgtacgcccttttggtagagggtgccgctctcccggtcgtagagggtgacgctgtggttttcgagctgggccagctcctccggggagagacccgcaaagagggtgtcccccagaccgcccagatccacctgctgctcctgctccatgcggtagctgccgtcccgggtgagctgtttcacttccatcgtcagcgaggcggtgtcgtgctcctcctccccgtacagggtggcggagaggcgcatggatgctgtggactcatagcccttgcccgcctcgcggggaatggtatcccgtatcgcagcccaaatcccgttggcggcggtaaaccggctgtccagctccgccgtcagggcggcgtagtcggtcagatgggccgcctcataggtatcgtcccagtatacgtccagccccagtgcctccgccgcggcccggacggggatgtaggtgtgcccatcccgtacaaagggggccgcccccatgtccaaggtggtgatccgcccgccctgggtgacggtcagctcagtggcccccaggaccagctccaggctgtcgccgttctccagcaccgccgcgatgcggctcccgtcaaaggcaacctccgcccccagcccctccagaaaggcccggaagggcaccatggtgcaccccgacgcggccaggggggccgtgccgccgaagtccagatacgccccgttcaggctcacattgatgccgtcggggtagggcattcccatttcctccttctccacccggaggtactcgtcccaggggtccccgaaacgggcatagctccaccgatcgtagtcctcgttgtaccggttcagcgccgcccacatctgggcgtcgtactccgtccagtagtcgtcccactggccgtccgtccaggtctcctccgccgcgtccttctgctcctggggccactcgccccaggggccatactgctggtacaggctgagttcggcgtccccctccgccgccagcgccggggtaaggcagcccaacagcaaaagggccgccagggacagggcaagtctccgtttcatgggtacagcctcctgtctatttcgttttccaaactcatcgtatcacttttctctacctttgtccatcctcctgcccattttttgcaaaaaagtgcccctctgcgatgcagaggggcactttttcatgcttatttcagctcaacccggatatcaccaaacagaacatgatccacccgttccagggggacgggcgcgtcaaagtaggtggtgccctccataaaggtcccgcccgccgtgccgctgccgccatccacagggatttccgtcccgtcggccagcaccaggcggatcccggtgtcggccagggtggcgctctccggggtgtcatagtgcatgcggtaggtgaggctgagggaggagaaggacagcttttccagcaccagtgtgttctggtgcgtctcatcgtaccacaccgcctcagcggtgtccgcttccaccaccgctctgggttcgccgggaatctccagacggcagccaccgtactggaggtgatccagctcacgcaaatccaggggcgcgtcaaaattgcggacgccggtaaaatagtcggttccgccctgtccgtcggggccgtgactgcccttcccaccgccgccgtcaatcgtcacggaggacccgtccttgtagaccagttccagttggagatcgacaaactcccagctttcctccactgggtaggagatggtataggaggccgccaggggggagagcgtcagtccctccagggtgaccatccgctccgtctcctcatcccatcggacggcccctatggtgttgatctccacctcctttccctggtagaaggagtccagggagaagctccactccccctccagatacgtcttcccggcatcctccggctcccgggggcagagaatcaggccggtgatggtcagggtcttggaggtgccgtccacccagttggccccgtttggtccgcccagaagcatgaacaccagctccagggagttgtcccccggggtgtcgtccgggaggaagcgggccttctgcatgccccagttgagccgctccccggtgtccgcgtcgaccagctccacatcgtgggcgatgtgatcctcctgctcccccatgtcgggcaggacggtgccctccggggcctccagccgcaggcggaggtagagggtgtgctcgtcggcgacggcggccaggggggtgagggtgacgccgttgctggtgacggggggcaggtcggtggcgccgatctgatccagcagctccttctgcccgccgttcagcggggcgctctccagggtgaagaaggggtcgaacagctctcccggcccccagaggtgataggccgccatggccgatacggtgaacaccgccgccagggcggcgcaggccagcagccggacgcccatgcgccggcggggccgcttggtttgtctgatttgttccatcgttctctccttgatccgctccggggacatcccggcgggcggcggcagctccaccgagccgtcctcccagccgtccagcaggtcagtcatccgcacaggcacaggaataccccctttccatcagcagctccttcagcttcttccgcccccggtgcaggcgcaccttcaccgtggacggcggcatggccagggccgcgccgatgtcggcggcggtctggccgtagtagtaatggcgcaggaagatggcccgatcctggggtgaaagtccgttcagcagcgcccggatcagctccgcccgctcggcctgctccacggcctccgccgggccgggctgccggtcgggctccagcgccagccagtcctcctccagaggcagctcaccgcccagcgcccgcaggcggttgagggccttgttgcgcaccacccggcccagccaagggcggagcttgcccggttccacctgcccggcgtgctcccacagggccaggaaggcgtcggacaccacctcctccgcgtctctggggcggccccgcagaacagagcccgctaggccgcaggcaaagcccatgtcccggtccatcagctcctccagggcggaggggtccccccgccgcaggcggcgcagcagctcccgctcctccaaccataccacctccctgctccggtttcgagcgcgctctcactgatcttaacacagaaaccgcccccgcggtttcacagactgtcaaagaacctttcccggaggaaagcctcgcagagttcctgcggccgcagccgcaggaatcaaatgaaaatccgtcatttccggggacatgcgcctcggaaatgacacctctcgcgcaagatgggccgacttttccctgaggaatcgaggtccatcttgcgcacatccctctcaaaaaagtggccgtggccacttttttgacacgctgagaaaccgccccttcggtttcatcccttcccctcctttttcccggcgcgccgcgttccgaccatatttttccaaatactgggttatactgtcactcaacgagggcggacaagcctgatttggaaaaggagacggaaccatggcgacaaaagagaaactcaagacaaaggcggcccgcgtccgggaggaggcccgggagaccggcaaggtcattctgcgcgcccccgccctggtgcgggcggccgagtgcgtcatccgcttcctgctgggggccatgctctccggggcggagattttcggcggatacgcccccttcgggctggggctggtggcggcctccggctcggggctggacggcttctgcgccctgctgggggcctgcttcggctatctctccttccagggcttcgccgaggggctgcggtacgtggccggctgcatcctggccttctccctggcctttgccttcttcgacgtgaaggcttaccgcaagagctggttcatgcccctggcggcggcggggatggacggcatcacgggctttgtgtacttatctgaccggggctggtcgccagagggcctgatcttcttcggcaccgagctgctcctgtgcggggcgtcggcctacttctaccgcatcgccttcaccccctggacggaaaagcgggaggaggagggcctcaccccccggcagacggtgagcctgctcattctggcgggcaccctgttgctcaccctgtccaagatcaccctgctgggcgacctgtcggtgggccgctgcgccgccgcggcggcggtgatggccaccgcctacaagggcggcatcggcgtgggggccacggtgggggtggcctgcggccttgggatggatctggcggcagggggcatgcccttctactccatggcgtttgccctctccggggtgatgtgcggggtgttccaccggcaggggcggctggccgccgccctggcctacgtgctctccaatgccctggcggtgctgtggacctggtcggagggccttcacctctccctgctctacgaggtctttatcgcctcggtggtctttctggtcctccccgagcgcgccctgcgccaggtgggggcgctggtggcccgggagccccggcacgacacccaggagcgggcccgcgcctatgtccgtgcccggatggaggccacggcagccgccttcaagagcctatacgagtccatgcggtcggccttccaccccgccgcacccaatgacaacgacgccgcatccgtcttcgatcgggcggccgggcggatctgcaagcgctgccctctgcaaaccgcctgctggcagcgggactacgtctccaccttcaacgccctcaacgacgccctccccgccatgctggagcggggccggggggagagcggagacttccccgcctacttctccaaccgctgcatgaagttcccggagtttctctccgccgccaacgaggagctggccgccctgctgtgccggcggcagttccagagccgcctcagcgagaaccgctcggcggtgtgccgccaatatgccgagctggccggggtgctgaacacggcggcggccgagctgggggcggagctggtacccgacccggtgcgggaaaagcgcctgcggcaatacctgaccgcccagggcattgattgccgcctggccgcctattacgaccaggccgggcacctccgcctggagctggagggggcggggctggcccccctccgcaccgaggaggggacagccaagctttccaagctggtgaacttccccctccgggccgtggaggagggccgccgggaccggctggtgctggtacagagcgagccgttgatggccgtggccggggtggccgccaaaaagaaggacggccagaccgtatccggcgacacaggggcctggttcaagcacgacgacggctccctctatgtgctcctgtgcgacggcatgggctccggctccctggccgagcaggagagcgccctggccgtccgcctgctggagcagtttctccgggcgggcgtccggccggagaacgccctgcgcaccctcaactccgccctggccctgcgcaacgacgaggccgccggcggcttcaccaccatcgacctgctgcgggtggatctgttcaccggtgaggccggggtgtacaagtacggcgccgcccccacctatgtgaaaaagggctactccgtcagccgcatcaccggcacggccctccccgccggcctcaccgccggagagggggtctcccccgacgtgacccgcctccagttggaggccggagactgtgtccttctggtcaccgacggcgtggccggcagcgcatccgaccagtgggtgcgggaccggctggccgcctttgacggcagcagcccccgggagctggcccaggctctcatcaacgacagcggcgcccaggtgggcgccgccgacgaccgcaccgctctggtcctcaagctcgcccgccggaacggatgaaacagcagcccccggaaccaaacggttccgggggctgttttttgcagttcagcaggtgctctctgtttgaaaacctctaccttttcaaacaaacgtctgtcctcatctttttacataatataccacaaatgaagggcaaaaacaagcgctattgctaaaaatttagcaatagcttttgttttgtctgcatgttttgacacttctgcccgcaggctgaaaaagcagaggtttcccaacaaagcccgaaagaggcgcagctcctcgccctccccctccaaatggtcatccattttcggatgtttatatagaggcacctgttttgaataaggaggaacgttttttatgaaaaagcgagtcttgtcagcgctgctcgccctttccatgctgctgacaacagcacccgccgcatatgcggcagagcctgccacccagtcgggcggcgccgaaatcgactggccggagccgacctgcaccgtggactacaagccgcagtccgactcggtaagctgtgaatttgtcgaagaaaccggggacgcgcccgccaagctggtctacaccatccaggagggtgcagagggcgaccaggttcttgaactgagcaagctggcggacgcccttgcagataccgtgcagtatcctggtgacgcggcgcagtttgacattgaaattcacaatgagtccgggaattcctaccgctacaaacccggcagcttcaccctggcatccgccgatacaagcggcatggaacagagtgaactgctccccgtgctgggctatgacggacagtggatccccttccgttttaccagcagcatggtttccaaccagatgctcaaagacctgtttaacaccagctcggtcaatatttcgcttgagcagattgtcaccctctacgacaccctggcggaagagggttatgacagcctgacaaactactttgtggcctggtataacaagaagaacagcacggattacgcctcttttgacgcgatcatggcggtcgcccccgccttctttgaggatatccagaagggcaatgccatgaaattctcctgcaccgctgaacaatttactaagttagagaaggcacaccctgaagtgatgcgctgggcctacttcccctccggaaaggggccgggagacaccttccagctaaagtggccggagtccgggcttcagactgccggttatgacggctggtatcagtccatgtttgccttcgccttcggcgacgatatggccaacctgagcacatcctcctccggccacacgtcctgccatgagcggggcgtcggcgactacatggagggaactgacctctgggaacagaccgacgcatatttctgcggggacggccaggctctggcccccgagtccggctcagtactgagctacagcggcaagtgggcgctggatggcccatgtatcaggaacgcatatgcaaattatgaattctctttctacggctccatcaccctggaggaggtcggtccggttaccattacgccggtggatatgaccctgtatatcggcggcagctccgactattgggaggacgtcgacggcacccaccttcccgacgccgacagcggaatccccgccccccatttctacgtggagagcagcgaaatcccggcggagcatctggctggcgtcaccttccacggcaccggcgcggacggtacggaaaagtcctggaagctggcgccctacggcggcgaaggggaccagcaggccatcggcgaggacggccgaaaggtgtgggatatcgtctcggcggacccctccaccgccgccgatgcctcctgcctctactttgcggatgaggcgtgcaccattcccgccagtacagacaacatcgccggaaaccacttcactcacctctatgccgccatcagcacatccgacgccagcggtgcgggcaacaccggcctgtatgccgaggtgaacggccagaaatacgccctgcggtacggcgttggcacgctgaccgtccgctcggtgaccaacgacgccaccgggggtgagccctacaccttcgacgcggttcacagtgcgcacagcaccgtggaggcggccgccggcgacacagccgcagcggagaccgccacggacggcggctccaacgcgggcgtagttgcgcccgcgggcacgaagtacaccgtcaacggccacgagaactgggcgatggtgggcgatgagcagccaagcatcctgttcgacgacgtgctcagcagctacgagctggacggcggcgcggaatccgaggtgggccagaccatgctggaaaaggccgtcatcgacaacgccgacgcgcttggtctggacaaccccaacgaccgccagtatgagagcaaatacttcgacttggtggacgccggagacggcaacgtctgggtcaaggctgaccggcagctcgtcatctactggccctaccccgacgggatcacctatgagacggcgggcagctatgacttcgacgtgttccacttcaccggcctgcaccgcgagtacacaaccaacggcgaggtgcaggcgatggtgaatcaggcggccgcaaacatcaacaatgaaaagggcgaggccgccagcaacaaaacgctctccctgcaggtggaggaggtcgtgctgaccgagcacggcatccagctcattgtggatcaggaccgttacggcttctccccctttgtgctgtcctgggcaaaaaaggacaccggcggcggggatcacggcggcggggatcacggcggcaccacctactacaccctgcgctatgagagcaacggcggcacgaagtacgacagtgagcggtaccgccgcaacaccctggtagagctggacaagcagcccgtccgggagggctacacctttaccggctggtacgccgacaaggccctgaccgagcccatcgacgacatccgcatgacctccaacaagaccgtgtacgccggctgggaaaagaccggcgtgcccgaccggctcaacggcgacgaccatttcgcctacatcatcggccgggacgacggcctggttcaccccgaggccaccatcacacgggccgaggtggccaccatcttcttccgcctgctcaccgacgaggcccgggcggagtacctgaccgagaccagccccttccacgacgtggcccccgacgcgtggtacgccaccgccgtggccaccatggaggccatgggcatcgtggagggccgcgcccccgcggtctttgaccccgacgcacccatcacccggggcgagttcgcggccatcgcggcccgctttgacagtgcgccctatgacggcgcggaccgcttcaccgacatcggcggccactgggcggcggagtacatcaaccaggcggcggtgaagggctgggtggaaggccagccggacggcagcttcgcccctgaccggagcatcagccgggccgaggcgatgacactggtgaaccgggtgctgggccgcctgcccgagaccgcggacgatctgctggacggcatgatcacctggcccgacaacccgccggatgcctggtactatctggcggtccaggaggccaccaacagccacgactacgggcgcaaggccgacactgtccacgaaacctggaccggcctccagcctgtggaggactggacacgctacgagcagtaagcctgcttttccgcaaaaaaacgcctgtaccgacatggtacaggcgtttttttgcgctgtcttactgcttggagaagtgctccttgccgacgccgcagagaggacatacccagctctcaggcacgctctcccaggcggtgccgggggccacgccgttgtcgggatcgccctcagcggggtcgtacacgtagccgcagatatcgcagacatacttatccatggttatagtctcctttttgatcaaatcgcaattcatagtatcacccggaggccgggaatccatgccttgccgaacccccgcctttgtggtatgatacatttactatttataacacattgggggacactgtgaaaataggcaaaatcaccataaattcaaagctggctttggcgcccatggcgggagtgaccgacctaggcttccggacggtgtgccgggagctgggggcggggtacaccgtgacggagatggtcagcgccaaggccctgtgctatcaggacaaaaaatcccttcccctgctggagctgggcgagggggagcacccggcggcggtgcagctcttcggcagcgacccttactgcatggagcaggcggcgggcatcgccgcggagaagtcgggggcggacattctggatatcaatatgggctgtccggtgcccaaggtggccaactccggggatggctccggcctgatgaggaaccccgagctggcggtgaaggtggccgaggcggtcatccggggggcgggcggacggcccgtcaccgtcaaattccggctgggctgggacaagggctccatcaactgcgtggagttcgcccaggccatggaggccgccggtgtggccgccgtggcggtccacggccgcaccaaggtgcagatgtactccggccgggccaactgggactatatccgggcggtaaaggaggccgtgtccatccccgtcctcgccaacggcgatgtctttgagccggaggacgcggttcacattctcaaatacaccggggccgacatggccatgctcggccggggctgcttcggcaatccctggctctttgcgcgtgcccaggccgccctggaggggcggccggtcccgcccctgccgccgctggcccggcggtgcgagacggcggtgcggcagttccgcctctccgccgctcagaagggagagcacatcgcctgcctggaggcccggaagcactacgcctggtacctcaagggggttccctacgcggggtattataaggaacagatcagcaaaatctccactctggaggacattgaccgcatcaccgcaggcatacagcgggatctgagggactgaccgccggcaaacgcgccggcgaggaggtgagaaaggcatgaccgaggaacaggcgctggtacagcaggcccggcagggggacgagggggccttcgccgccctggtggaacagaatcaggggcgcatctaccatctggccctacgtatgacgggcaatcccgacgacgcggcggagctgtgccaggaggcctttctcaacgcctggaagggcctggggaaattccagggggagagctccttctccacctggctctaccggctgaccagcaacgtgtgcatcgactttctgcggcgggagaagcggcgcagtaccctgtccatgacggtctccctggacgatgaggagggcgcccggcaggccgagctgcccgacgagcggtacagtccccaccgccaggcggagcagcaggagctgcgggacaccctgcgggcgggcctgcgggccctgtcggaggagcaccggcaggtgctgattctccgggagctggagggcctctcctatggggagattgccgccctgctgggggtggaggagggcaccgtcaagtcccgcatcgcccgggcccggctggccctgcgcaaatatttgctggaacaggggaactttttcggctccccctcgtccaaagcataaaccagatccacgggacggaaaggaggcggcggcatgctgacctgtgaacaggcgctggagctcatcagcgcgcagctcgacggggcgctgacggcggaggaggccggggcgctggacgagcacctggcccagtgcccggcgtgccgggcgcttcgggccgatctctccaccctgcaccagcttctgcccactctggcggaggagccccccgccgggctgaaggacgatatcatgaaggcggtccacgcctccaaatgcacccccttccacaccagaaagcgtcagtggcgctggcgctcctgggcctctctggccgcggtgctggtgcttgtactggtgggcgggcaggccgtgcacctctggagccctccgggcagctccgggagcgtacccagagccaatcttgccgggttgaccggagcggcctccggcgggagcgccggacaaaccgccccggctcaggaggaccgcgcgggccccgccggggagcccgccgaggccgccagcggcagcgccgacggcgccaaccggaaggacagctccgccggtgagaggccccagaaccgggacgtgacgccacccgccgacgggccggagggcagccagatgccggcgtctgctcaggagccgtctgtctccgcgctccagcctaccccgtccgcggggccctccgtcatgtccctgatgcccgaggacgccccgcaggacacccatcccccctcctccgccctgacggaggagggcgcacgccaggcgctgctggagtggctgggccagcccgacgcgcctctaacctcccttggccggtcggaggacgggacggcctaccgcttccagacggaggacggggctctttactccgtccctctggacgggagtcccatcactgcggaaccctcctgacctgcacacgcggccggtgttaccggccgcgtgtttttattcggctgcggcacattgagtctgtctccccgctcggctccggccccaagcttgtctcccggcggacattccctccccctctcccgcgtgcaaatttcccccctgcggactgctgcggggtattttgcgcgatttttctaaaatttcagttgtatctccggttgatttaatgtataatgaacaacaggcagtcctccgtccccctcgggagccctgcccagacgattccaaatgtaaggagaggaaacaagtatgagctattccgtacaaaacatccgcaacgtctgtctgctgggccacggtggaaatggtaagacctccctggccgagagcatgctgtatttgaccggtggcaccgtgcggctgggcaatcccgccgacgggaataccgtttgcgattacgaccctgaggaaacccgccgtcagatttccatctccaccgcggtggctcccgtggagtacaacggctgtaagatcaacgtgctggacacgccgggctactttgacttttccggcgaggtgatcgaggccctccaggtggccgacgcggccatcatcgtctgctccgccaaggcgggcatgagcgtgggcgcggagaaggcgtggaagctgtgcgagcagcgcaggctgccccggctgctctacatctccaagaccgacgaggagaactccgactacaacgccgccttcgacaccctgcgggagcgcttcggcaagaatatcgcccccgtggccgcccccatctgggacgcggacaagaaggtcattggctttatcgacgtgctccacaagcgcgcctttgaggccggccccaagggcgagcgcatcgagatcgacgtccctgacgacaagaagcccgtgctggacgagctgtacgatgccctcaaggagtcggtggctgagaccagcgaggagctgatggacaagtacttttccggtgaggacttcacctacgccgagatgatccagggtctgcgccagggcgtgaaagacctgtccctcttccccgttgtgtgcggctccgccgtctccggcctgggcacccgcatgctgctggacatcatcgtggagctgctgccctcccccctggagggccgccccctcatgggcgagaacgccgacggcgaggtggacgagttcgtgcccttccccggcgccctgcccgccgccctagtgtggaagaccgtctccgaccagtacggcaagtactccttcgtgaaggtcatctccggcaacctcaagcccgacatgcagctggtcaattcccgcaccggcgccacggagaagctgggccgcctgtacgtgatgaagggcaagaaggccgaggaggtcaaggagctggagtgcggcgacatcggcgccatcggcaagatggagaaggtcaagaccggcgacaccctctctgatccccgcaaggtggtcaagctggaacccatccccttccccgagccctgctactccgtggctatcacccccaagaccaagggccaggaggacaagatcgccgccggcctcatccgcctgaacgaggaggatctgaccttcaactgggtcaacaacgccgaaacccgccagatggtggtctccggcaccggcgacatgcagatggacgtgattctctcccggctgaagagccgcttcggcgtggacgccgagctctccgagccccgggtgccctaccgcgagaagatccgcaagaaggtggaggtgcagggccgccacaagaagcagaccggcggccacggccagttcggcgacgtgtggatgcgctttgagccgggcgacaccgaggagctccagttttgcgaggaggtcgtgggcggcgcggtgcccaagaactacttccccgccgtggagaagggcatgcgggaggccgtggttcacggtgtgctggccggctacccggtggtgtacctgaaagccaccctgtacgacggctcctatcacccggtggactcctccgaaatggccttcaagaccgccgtgcagatcgcctacaagaccggtatgccccaggccagccctgtgctgctggaacccatcggcgagctgaaggtcaccatccccgacagctacatgggcgacgtcatcggcgatctgaacaagcgccggggccgcgtcatgggcatgaaccccgacggcgagggcaaccagatcgtggaggccgaggtacccatggccgagatgggccgctacgccatcgatctgcgctccatgacccagggccgcggttccttcaccttccgcttcgtccgctacgaggacgcccctcccgccgtccaggagaaggccatcgaggccgccaaggcgatgcaggacgaggccgactaaccgaaacctcaacgcgccccggccggtggccggggcgcgttccttacaggcggcgggtagggcgtccaggagaaggccatcagatatccccaggtccccaagcgagcccagtgcagcgggtcggttggggagcggaggagcaagggagcgtttgaggaatggccgccaggctgttccgaaaaaagcgtactctgcgacgacgcggtgatgcaggacgaggccgactaacccaatctgtaaaaagggccgggctgatttcagctcggccctttctttaaaagcagcttatcccccgccgctttgcccatccggccacccgatgataccgggcagatcacagtccgcttggggtacgtccctcgtgtcccggcgaatacaggccgaatttattccatgcataccattccgctagctcctgctctgaccgaaatttcagcagccgcagtatctcttttgccagctccagcgctccgaatccgttggcggtaagaatgccgttgtcacaaaccgcctccgcctcaacgaaatatgcctcccctttatagtgcggagcctgggatttgaggaaaggcagggtattcccagtatgtctgcgctggtctaaaaaaccgttttccgccaggaagtttaccgcgttgcaaattgcagccaccgggatatggcatctgaccagttcccgtacaaccggcaagacagcgtcatttttccgctccagccacgctgtcccgccggtcagcagcagcaggccggcatcccgcggatagtcagcgacagtaaaatcgggcgtgacacggaagccccccatagacaccttgggcgcccggtcaagcccaatggttttcaccgcatatccagttccaggtgcatttaactgcgcacatacataggccggttcccagtccgcatagccatcaaaaataaataccaggatttgtttcatcccttcataccacctttctgcagacagcttaacacaaaaaaggtgacagcttagctgtcaccttttgtaaaagtcgtttatctttttcagctcatctctgagctcctcacggagctcaggtggcgcgaccaccctgaccttgcccagcagccccatgacaagctcccgtgcaaaggaaagttcgggggcataaaaacagatccggccggtgtcactccccccaccaggcgcatccaacaggcaggcatctattttctctgtcagggtaaatgcgtcccggcgcttatattccaggacaatctggtaatatccgtcctttttcacggcggacagtccaccccctccaaacctctgttcaaatgttgtttcgtccatttggcgcgtggaaaagcgctccccagaggggacgcaggagacgatacgcctgagcttaaacaggcggaacgcgcttcgctcccgacagaacgcatacaaataccagtcagactgtttgaacaccagcttatggggttctaccaaccgggtccggcgccctgtttttgacacataatccattttgcacaccatgcggctacaaattgcgcggtgcagctcagagagctttttccaggtaatgctgtccgtaaaccacggggtgtagtcaagcagatagcggctgctggagcgtgcgtcagtctctgggaccggaaccagtctggccagcagtgccgaaaccgaaccatctccgacaaggctctttaatccatccagggcggtaaacaggctggcgatatcctccctggaaagcagtcttttgtcttgccggtagcccttcaggatggagactccgccccctctccccggccgagaggcaacagggaaccccgcctcgttcagtgtgtcaatatctcggaggatcgtccgcctggatacctcaaaccgtactgccaactcctgaaccgttatatgctctacctcggcaagtaccgagagcagccccaacagacggtatattctcattttgttctcctttcccctgaaagcagaaggaacggatttctcaccagtttaaaagctggtgagaaatccgttcttttcggtgacgggtacactccggatctgcggaagtgccaatgctcaaccgttcttcctacttgtgataaagcttgttggtctcatactggggctcgcaggtgaggcgcaggcccaggcggctgtaggtgccgctgtccaccggggagaggatgacggtggagtgggcctcgcatccccgcagggcggagagctggtccagcgcccgcttggccagcgggttggtggtggcggagatggccagggcgatcagcgtctcatcggagtggagccgggggttgacggagcccaggtggttgaccttcacggcctggatgggctcgatggcctcccgggagatgaggtggtgctggtgatcaatgcccgccaggcgcttgagggcgttgagcagggtggcggaggaggcgcccatcaggtcggtggtcttgccggtgaccacctcgccgctgggcagctcaatggctccggcggggttgccggtctcctcggccacctgggcggcggcgaccaccacgggccggatggagggatccacatgggcctgctgcatgagcagctccagcttgttcaccagctcgtcgccagcggcacccacccggcggtcgcacagggctgtgtagtagcggcggacgatctcctgccgggcggcggcctgcacggcctcgtcgtccacgatgcacttgcccgccatgttcacccccatgtcggtgggggacttgtaggggcactcccccatgatcctctcaaacatggcggagaggacagggaagatctccacgtcccggttgtagttcaccgtagtttcgccgtaggcggccaggtggaatgggtcgatcatgttcacatcccccagatcggcggtggccgcctcataggccaggttcaccgggtgctggaggggcaggttccagatggggaaggtctcaaacttggcgtagcccgccttgatcccccgcttgtagtcgtggtagagctgggagaggcagacggccatcttgccgctgccggggccgggggccgtcaccaccaccaggggacggctggtctcgatatagtcgtttttgccgtagcccccgtcgctgacgatcaggccggtgttgtgggggtagcctgcgatggggtagtggaggtaggttcgcacccccaggtgctccatccggcggcggaaggcgtcggcggcgggctgtccggcgtactgggtgatcgccacgctgcccaccagcaggccctccccccggaaagcgtcgatgagccgcagcacgtccacgtcgtaggtgatgcccagatcgccccggatcttattcttctcgatgtcgctggcgcagatggcgatgaccacctccaccgagtcccgcagctccttgagcatacggatcttgctgtccggctcgaacccgggcagcacccgggatgcgtggtggtcgtcaaagagcttgccgccgaactccagatagagcttgttgccaaactggcggatccgctcccggatgtgggccgactggagctccagatacttctggttgtcaaagccgagcttgtccatctttctcatcctctcctgtcattcattcaatctgttattttaccacatccgccgtccccctcaaagccctttttcccatttcggcaaaattgacaaccgctcttgacaggcagctcctacaggtgtagtatcattacgaatgcgacaactgtaggagggctgtgacatgaagctgagtgacaaggagtggagggtactgaacgccctctgggtggccccggaggggctggccctgggggccgtggtggacgctctgcgtccggatacgggctggagccgcagcacggtgctgacctacctcacccgcatggaggccaagggcctggtggacatccgcaaggaggacttcccccaccgctaccgggcggcggtgagccgggaggactgcgccgcggcggagcgccggggcctgctggagcgggtctaccagggctcggcgggcaggctggtggccgcctttttgaaggacgagaagctcacccctcaggagcgggacgagctgcggaagctgctggacgagatggaggtgtgagccgtggacaacctctggtctgttctcgctcagaccctggccctgtccgtggcggcgttggtgctgctcgccgcaaagcgcctctttctggacaagctctccccccggtggcagtacggggtgtgggccatcctggccctgcgcgccctcctgcccgccggcctgctgggccgcaccctggtgcccggcgggcgggtggtgctggaggcggccaggctccaggtggaactccccctgtcctccgttctcaccgatccctacggcgtaacggaggtgctggccccggtgcccctcttccccttcggcctgcccgtgccggggagcatcaccgacgtgctcttctacgtctacgccgccggggtgctcctgctggctctgtggtttttcctgtcctacgcgcgcctgcgcgctgccatccggcggggcctctcccccgccccggaggtgctggcccaggtggagggcgtagcggcgcggtacggcctgaaggccccccggcgggtagtggtgctgcccgggctggagagcgccttcgtctgcggccccctgcgcccggtgctggcgctccccggccggccggtggacgacaaggtgctcctccacgagctgctccacctccgtcatggcgacgtgtgggccggggtgggggtgtgcgccctgcggtgcctgcactggtgcaacccactgatctggtactgctgcgaccggatgcagaacgactgcgaggccctctgcgaccagcgggtgctggagcggctggagggggaggagcgccgcgcctacggcgtgattctcctgtccatggccgacggccggtacgcccgcgcccccggcacctcctccatggccaacggcgggcgcaacatcaaggcccgcatccaggctatcgcccgcttcaggcgctaccccgccgggatggccctggcctcgggctgtgtggccgcggtgctggccctcacctgcctggggggcgtcagcggcgcggcggaggtgcccggcggaaccgaccggggcgctcttgccctagctcaggcacagctcaaccgccccaccaccgtggccggagccctggacacctatgccaaggcgctgctcaacgacagccccctgtactatgccatggtgctgccggaggaggggcgggaggccgtctggaaggacgccctggtcccctaccaagaggtggagctggaggactcccctttctggaccctgggcttccactggcaccgcccctcctggctggcggagtggtcggtaatgaacctcctgcctgacggggcggagggctataccggaacgctgtttttctcccctctgtcggaggacaacacctatggcatcgtgtaccagcaggtggcggtacggcccgacggggacttctggacagtggagccgctgggggatctgaccgtgcggccggaccccaaccaggagggaatttacctctgtcccagttcggaagcgccttacaccacctatgtggcagagactgtaactcttcacgtggaggtagatgtccaactccagctcaacgtgaacaacgccatattctccacatccactgacctgcccgcctgggcttccacctatcagcttgacccggtcccccatcctgacgccagcttcaccacaatgcgcgatgccctcggcctccgggtcagccagaaagacaccggcgaggccgtggatctcatggtggatgccatccttatggcccaccccgccgccccggcggcggctcttctggacaccccataccagtacacgcttgtccccggcgagctatatgaagggcccaatatggagctgtcagccatgcctgccgccctggctctgacctttacctacaacagccatacctacacctgcactgcctatcccgcggaggtgacgccatgaatcacgcaggtattcggagcgccctgagccgcatcgcctgggcctatctcctcatccatctgcacttccgcctgaacaacctggatctgctccccgactgggctggctacctcctgattttctccgcgatcggcctgctggccggagagctgcgggatctgcccctgctcaggcccttctgcatcctgctgggcgcggtgtccggggtggactggctgtcctttctcctcaccggcgcggagttcaccggccgcttctttctcctctccgccctgatcacctgtgtggccctctatttccacttccaactgctcaccgatctggccgccctggccgaccggcggtcaggggagggcggccgctcccccctgagccgccgcctgcggctgtgccgcaacgcggacgcggtgttccgggtggccttctgcctgctcccctatctggcgaactggcggtgggtggagctgctgattgctctgctgtccctgctctggctgggcacctgtgccgtcatctgctgcgggctcttcgccctgcgccgcctctatcccgcggaggaggacgaatagggcgaagcggcggggccgcccctgcgtccttgtgccggagtccgctccccccgcgctttccgcgcaaacaaggggccgtgccgccaaaccggcggcacggcccctctctgctcttattcctgctccatatggctcttgacccgctggatgatcatatccagggccaccgcgtttttgccgccctccggcacaatgaggtcggcgtagcgcttggagggctccacaaactgctcgtgcatgggcttgacggtggtgaggtactgctgcaccaccgagtccagagagcgcccccgctttttcacatcccgcatgatgcggcggaggatgcgcacatccgcgtcggtgtccacaaagagcttgatgtccatcagctcccgcagggcggggtccacgaagatcagaatcccctccaccagaatcacccgggcgggccgcacctccaccgtctccgccgcccggttgtgcacggtgtagtcgtaggtgggactgtgaacagcctccccacgccgcagcgcctggaggtcggcgatcaacagctccgtgtcgaaggcgtccgggtggtcgtagttgagcctgcaccgctcctcatagggcatgtcgtcgtgctgcttgtagtagttgtcgtggtagaggatcgacacgtcctccccaaagtgctccttcagccgcagggtgagggtggtcttgcccgacccggttccccccgcgatgccgataatcatggtttccatgcttccgcccccctgttttttctacagtataacacagggcggcgggaggtacaagcctcccgccgccctgtccggctagggtttgagcacaatgcgccgcgggccccgggggcgcacccgcccgacggcggcggcggtcacccccgcgtccgccaggcggcgcagcagctccgccccccgctcctccgcaatggccaggagcaggccgccggaggtctgggggtcgtagaggcagtccagcaccgcctgggggaaggtccccgccgtctccacctccggcccggcaaactccagattgcggtaggcccccgccgggatgatgccgtcccgggccagctccagggcctggggcacgatgggcacccgccccggccagagctcgatggtgcacccggccccctccgccatctccctggcgtggccgatcaggccgaagcccgtcacatcggtgcaggcgctgggccgcaggggcacggccgcccgggccgcgtcccggttgagcgccgccatcagatccgtcatcgcccggtactccgccccgctcagcagctccgccttggcggcggtggtcaggataccggtacccaggggcttggtgagcaccagcagatccccctccctggccccccggttggtcagtaccgctccggggtggaccaggccgctgacgcacaggccgtacttgggctccgcgtcctcgatgctgtggccgcctgcggtcactgcgccagcctccgccaccttggccgcgcccccctccaggatggcccccaccgcttcccgcggcaggcaggaggggacggccagcagattcatggccagcctgggctcgccccccatggcgtacacgtcggagagggcgttggccgccgcgatctgcccaaagtcataggggtcgtccaccaccggcgggaagaaatccaccgtctggatcagcgccagctcatccgtgaggcggtacaccgcggcgtcatcgctggagtcatagcccaccagcaggttgggctcaagcgtccggggcagcccggacaaaatctgttgcaggacacccggtcccagcttggcccctcacccaccggccgtggtcatggcggtcaggcgcagcttctcatacggcatagactcaccccctctctttttttatagtgtaccacagcctccaggcaaaaggcaaccataccgcgccgcacccccctccccctccacgcatacgctggagtgagaaactagagacttggagggtcatttatgcaagcggaagcaaaggtttgtttttatctgggcgccaattcccccaccggcttctactccctgtacgaccaactgcttgagcccgagcaggccgaaaccatctacatattgaagggcgggccgggctgcggcaagtcctccctgatgcgccgggtggcccaggccatggaggagaagggggcttcggtggagtacatcgcctgctccggcgacccggactccctagacgcggtggtgttccccgccctgaacaccgccattgtggacggcaccgctcctcatggctgagcaacagaaggatactttaggtatctatctttgtgtcatcggttatctgtccctgcaccggccggttcatttcgatccaaacccggtttacctcttccatacaggtaaaatagagactggtcagcagattcgtaggaattccaagctctccggtcagtctatcaatcttttcccaatccgcatgttcatagctcagggccagatcgtacagcattccagcccggccggtatgctgtaaaagggcctccttagcctccgcacacagaggaatgggcttcagaatctccgccagcggagcatcaatgagataattcagggtagaaaacatccccattaagtaggcatccggcttggagatcggcatatcctttgcgtagttcatcagcttgctacagaagttggcccgcatgaacgacattctgagaaactcctccgcgccctcctccatctgattctcggcattgctggcgctcagcaggtagacccattgacgcagttcgctcaggcccatagtcatgatcgcctggcgtacgctggttacccggtggcggagcgcataatagcaggagtttgccatccgcagcaggccataggtcagcgtagcatctacggaaataatctgctcaatctcctccacatccggctcgtcccgcgtcatcgccaccatcaggcggaagaagttgctctgcaaatagccgctgctgtgggtctgtgtggtcagcttttccgccacataggggccctccagggcatccacccccagcttgacggccttctggtaggtttcctcccggtcaatccccacggcgatacactgctttttcatgctgtgggcgatgtcgatgatgtttttcagcgtcagctccggcgtggtctggatgttcagcttaatgtagtcgatccggtccaggattcccagatagcgcggggcaaactggaattcattgaccgccacctgatagccctcttttgcatactgctgcaccatatgcatggccaggggatgaatgataacgctgtcgtcaatctggatcaccagctcccccttgtcaaagaggtggggcgtttttttcatcagaagcgtggtggtgaaggtcataaaattcagtgagccgcgcagcagcttatcggtattcatggtgaggaaattgtaaatggtgtccgctgcggcaaagtcgttctccctgacgtttttgccgttgtcgccaaaggcctggttttccccatggtactggatctcatagccgatgatcttatttgcctggtctttgatgggctgacgaacgatatatttgctgctcatgcctgtcctgcctcccgcttccgtctgctgcgctccaaaagatggtccacaattccgatcaaatgcccgatttccggcttgctcaactgctcatccgcaccgacctctttgcccttgcggcgcatctcctctgtaatcagggaggagaaaatgatcactggaatggcctgtagctctttatcctccttgatccgcttggtgaggttatggccgtccatctggggcatctccaggtcggtaatcacaatagaaacctgtccggtggggcccccgccgtccttacacgcctgcagcgcctcccacagctctgcgccgttttggaacatgcgcaggttggtataccccgccttagtcagcgcggtacggatcatctgggacagcaggatggagtcctccgcgacccagaccggctcgcttcgcttctcccgcttacccatagcatccacctcactgagctggataccggtctccggcgcaatctcggccacaatcttttcaaaatccagaatcgtgaccaagtccttgccgcactgagcgattccggtggcaaccccgtctgcgcccccggaaaccgtgttgtccggcttctggatgtcccgccacgagatacggctgatccccactaccgtatggacgcggaaggcaatgtgcattttattgaaattggtgataatgaagagatccttttcccctttgggttcggtatgtccactgagatactccggcagatccaccacggtaatcacgatgtcccggggtttaaaaatcccttccactgccgggtgggcatggggcattgggtgcaccggcgccgacagcataatctcacgcaccttggccacattgatcccgtagagatttccgtcaatggtaaactccatgatctcaatctcgtttgtccccgtctccaataaaattccgtctttgttgttttccatgacccattcccccactttcagattgttctattcctaccggctaaaaaatgagctccggctttccgtagcagcggacacagccttgtccggtggccgcgtcaaagagcagggtccgggccaccgtgccgcctacatcctcctgtagcagccggacgccctctgtacgcagcgtcatatggacgctttcaatattccgctgtccaatattgcccagatttccaccgccggctacctcaaacatgcgggctccgccggcaattttggctgtaacccgcgcccgtttggcgcctcgccgctccatttcccgcagcgtctcccggatgccggtatccgcatacttgagcggggacttccgccccgtctccagattcaggggcagcatgatgtggagcagggcggccagcttgagcatgggatcatagaagcagattccaatgcaggagcccagggcgtaagtcaccagcatcccactgccctgcgccattttcatgtcggcgatcccaaccaccagcttgtcattcatccaaaacacccagcttccgcagcaggaaattgagggaacgcacgtcaggtgacagcaggaggcggcagggtacgctgtgcttttcgcagatgaaattggtgccgatggtcataatgtaatccgactgtcctccaaactccgccatgggcaccgtaataatcgccccctgcatgtccacagcaaagccaggcaccgatggctgaatcgttaccccagccaatccagagagggcgttgacgaaggtggagatcatgatgttgcccacctctaccagggctgagcggtccagctccgagagctgcccatattcgcaaaccgtccggttcatcatgcggcccagcacctgattgataaagtccatctgctgtaccgagagcataataccgttgatttccccgcccagacgcaccagcacaccggccgtgatcacctccggcccgccgatccagtcgatggcctcgttgtaaccgaggatgcgcacctccggcatttcaatgcgcacctcacactggagcaggctggagagggccgtcgccgcgttgcccgtcccgatgctgccgatctcccggagcgtatccagttccaggccgctgagttcattaaaatttttcacgtattttccctgcctatccgtttgtcaggttgttgaccgtcgtctcgatttcgtccgctgtctgcatcatgcgcaggacatagctgtatgtccgctgggcctcaatcacctttcccatctcagaagccaagtccacattggagctctccagatagccctggcgcacctccgaggggctcatccacaccgcaccgtttttctccgtggtcacaaaccggccgccgcccacatgctgaaggccgtccaggtattgaatggtaaacacgcccacaggctggcgcgcctcagcgtccgtcaccacaatgggatagccgttggtgtccagaacctgccggccctctccatccgccagatagtaaagcgtatccgttgttccgtcctcctttgtctgctgaaacgaggacagggcgaaggagccgtcccgggtgtaggaaatctctccggtatccgggtcatacagggcgaaaaagccgtcgcccacaatggcgtaatcctgcttgcgccccgtctcctccagcgctgcggagcggaaatccgtgatggtggacaccatgcgggtaccgctgcccttggggagctgctggccgtcgataccgtctaccatccggtacattagagcctcaaaggcgggcttctccgcccggaatccaaaggtgttcgcgttggccatattattgccctggactcccattcgctccatttgctgctgcgcgcccaccgtggcggtataaaaagcctgaagcatcgttctcctcctctgcttataagcgtcccagctctgttgtcgccttggtcagcacgccgtcatagagcttcagcacctgtgcggcgctctgaagcgcccgctgggccgtcatcatatcgctcatctcctggagcatgtccacgttggcattctccacccatttccagtggagcttcgcctgggagggagccggcgcctgcccattcgcaccgaacaggccgctctcatttttctccagctgcccgttgtccgcaaaggcgtacagacccagccgccccacatagccgccgccctctgtatagaggttccctgcctgatcggcccggatacggtcggtggccagatagattggttgtccatccgcccccagaacccgcccatgggcgggcaggcagagatagccctccccatccagagaaaagctgccgctgcgggtgtactcgacgccctgagccgtttgaatggcgaaaaagccatccccttcgatggcgaagtccagcgtcagccccgtctcctccaggcttccctggctatagtccacatagagctgactgggggccaggatatagctctcctcaccgatcacggtggggctgcttttgtccttattgcccacccggctgatcagcacttcctggaaggtgctgtccgtatactgctccgccttatacccggaggtggagagattcgtcatgttgttggcaaccgtgtccagccggcggctctgggacaggatgccggaggtcaggttgtaaaacccttttgtcatatggccttctcccttctgctgtgtactacgctcctatgtactgcttcatgtaggcctggagccgctgaatggcccggttatggatttgtgaaatacgcggcgcgctgaccccaaggacctgtgcaatctccttcatggtcagctctttttcataatacagggagagcaccagccgttcattctcccgcagggaggcgattccccggcgcagcacctcgtgcagctccttttgctgataagcatcctccggcggattgccggacagtgccttgccggttacattcccataggtgtccaaaagcacctcgaaagacatcaggttggaaaacgccgtttcagagaggagctcctcatagtccttctggctgagcttcaggtagtctgccatctcctgatcgctgggggtatggcccagctctatggacagctcctcagccgcccgcttcagccgggtggccttctgccggaccctccgcggaatccagtcctgcttgcgtaccaggtcgatcaccattccccgcagccgctttgcgatgtacgcctcgaacttgacctccttttcggggtcatacttgtccacagcgctgagcagaaccaaaattccctcatggatcacatcatccagctgggtaaacccgctgaacagcccgcaggtctgaatcgcaatccggcgtaccagatcggtataccgcagcaccagggcccacttcagctccatatcccccgtctccttgtagcgcagcagaagggtctgattgtccatctggtcgaccgcctgctgacctccgctgggggctagggccgtttccatctgttttaacttattcatgcagatacccttccccatctctatgcacgcttttcctgcggctgaagtgtaatgttgccaatggcctgtatctgcacattgctcgtgatttcattaaaggagagcacatagatgtcgggatagaacgtggcgagcatacggctgagatagacacggataatctggctggtcagcagaatgggcgtttgggagagctcctcaaatttcttccgcagctctcccacctgctgtacgatctgctgcacaatatcagggctaagcgccagatagacgccgtgctcgttcttggtcagggcggccagtaccttcttttccagctccgcgtccagcgtcactacccgaagctgcccattttcgcagaacttccgggtaatggtccgtcccaatgcaccgcgcacctgttcggtgatcatgtcgatatcatgggtcgtggtactggcctccaccaccgcctccagaatggccgccagatcccggatggggatgccctcacgcagcaggctgcgcaggatcttttccaggttggcgtaggagatgacgttggggatcacatcggccaccagctccggctccgtctttttcagattctccacaagctgcaaggtctccgagcggttgagcagctcataggcatgctttttgatcgtctccgacaggtgggtaagcataacggtcaggggtgtgataaccgtatacccgtagatctccgccatttccttgttctccggcaaaatccagcgggaggggatgccgtaggccggctccaccgtctcaatcccgtcaatcgttcccgccggattggacggctccagggccagataatagtccaccagaatctctccccgggccacctcctccccccggattttgatcacatactggttggttcccagcgccgcaccgtcgtggaggcggatagaggggatgacaaagcccatatcctgggcatactgccggcggaatatcacaatgcggctgatcagcttgccgccgcttttctcatccaccaacgggatcaggctgtagccgaattccatctcgatcggctccaccgccaggagggaatagacattgttgatgtccttgaagtagtcggtttcgctggccgcctgaagctccggggcggctgccgcctccggggcgggctgttcctccagtgccttctgctcagtgagcttccggtcgctcaagaagccgccaatacccaggccgcagcccaccagcaggagcggcgccgtgggagcgccgggcaccagccccagcagcgctaaaataatgccggtggccaggatcgccctgggctgggccttaaactgtcccagcacgtcgctgttcaggctgccgtccgacacggaacgggtcacgatcataccggtagcggtggagatcatcagggccgggagctgggacaccagaccgtcgccgatggtggcgatggaatactggttcaaaaccgtagccagatctccgccgccctgcacgatgccgataattaagcctgccacaaagttgatgaccgtaataatcagcgacatgacggcgtcgcccttgacgatcttggttgcaccgtccatggcgccgtagaagtcggcctccttctggatcttataacgccgcagccgggcttccttctcgtcaataaggccggagctcaaatccgcgtcgatggccatctgctttccgggcatggcgtccagcgtgaagcgggcggccacctcggagacgcgctccgctcctttggtgatcacaataaattgcaccagtacaatgattaagaaaatcaaaattccgatgacaatattcccctgggtaatcagcgtaccgaaggatttgattaccatacccgcatcgccgccctcggagaggatcaggcgtgtggaggatacgttgaggcccaggcggaacagggtcgttatcagcagcagggaggggaagatagagaactccagcgcctccgagatgctcatggtgatcatcagaatcatgatggaaatggcaatgttcagtacaatcaggatgtccagcgcctgcttgggcagcggcaccaccagaaagagaacgatgatcacgaccagcagcgatatggagttgttcagtatccgtctcatagctctccaaggctcctactttctcgccgctacttcagcttttcatccatgcggtagaggtacaccagcacctccgccacggcgttatacagctccggcgggatctcccgattcagctccgccgtggcatacagcgccctggccagcggtacattttcaataatggcaatgtgatgctcctccgccttgcgcacaatgcgtccggccagctcgtcctgtccctttgccaggacaatgggcgccccatccgtctcagggtggtagcgcagcgccactgcaaagtgcgtcgggtttcggataaccacatctgcctttggcacctgctgcatcatacgggattgggccatcctgcgctgcacttctttgatctttcccttgacctggggatcgccttccatctgtttgtattcctctttgatctcctgtttggacatgcgcaactgccgctcatagtcccaccactggtaaaacacgtccgcgccggccagcaccacaaaggctatggcgatctgcatcaccatctggaagccctcatccaccagatgggcgcaggcaacggccagatcggtgtggagatatttcgtaaaggtatctacaattcccaccaggaactgatagatcaggaacagcagaaccgttatctttaaaatccccttcagcgcctcaatgacgctgcgcagtgaaaacaggcgcttgatcccctgcagagggttaatccggctgaactttggcttcagcgcctccccggaaaccagcagcttggtctggaaaaaggtcgccgccaccgctaccaccgccgtagtggccagcagcggtcccgccgcaaacagaaaggtcttcagcatctccagcaccaggccgctcaggttgtcctgcaatccagtgtgcgccgcgccggccacaagccccatagcgtactgcaaaaagcggtaaatctgctccaccattggcgtggcagtcagcttgagtacaaaaaagctggccagcagcaccgccacggaaactgcatcgttgctgaaaaagacattacccttttttcgctcgtctctccgctttttaggggttgctttttcggtttttgaactgtctgccaaagccttctcacgctccccctatcaggcgcagtatccgccccagctccgagagcatgccgctctccagctccagcaggaattcgttgatcggcgtcaagagcagaaagaacaaaagcagcccgatgatcaccttcagctcgatattgatgacaaaggcgttgatttgcgggatcgccttcatcagcacccccatgcctacctctcccagcagctccgctgccaggatcggcatagccagctttaccgccaggagcatacaggcgagaaacagctcaatgacataggcgtagactccatcgccaagggcggcagcgccatagggaaccagctcaccggaggtggtcagcaggcgcatcagggtatagtgtccattctccgcaaagaagtccagaatcagcaggatattgagcagtgatgcagtcaccgacaggttggcctggctgctggcgtcgtagatctgcgccattgtcatacccatctgtgtgtcgatcacctctccgccgatctggacaacggaaaacaccacccgcattacgaatcccagaaccaggccgattcccagctccagcagaaggcgaaacgccagctccaccagggtatccggctgcggcacccccgtcccggccgtcccaaaaaccagaatggagagcaccagcgccataccggtcttgaccatggccgggagattggagcgtcccagcagcgggttaaacaggagaaagcccgacatgcgcataaaaatcagttcaaagagatagagctgtgcccaatcgaccatgtcccacacccttacatcagcgtaaacagataccggctgaaatccagcagcgtctccagcatccatccaccgcccaccagaagtacagccaccaccacgatcatcttgaggataaacgagagggactgctcatggatctgggttaccgcctgaaaaatggcgaccagaataccgaccagcatgctcagaatcaggagcggtgcgccaatccgaagcgcgacgcccaccccttcccgcaaaatgtcaactacttccatatttaggttctcctatcggaagctctgcaccagggtcgagaacagcagctcccacccattcagggcgataaacagcagcagcttgaacggcatggagatcatactgggcggaagcataatcatgcccatggacatcagcgtggaggccacgattacatcaatcaggacaaacgggatgtacaggtaaaatccaatcaggaaggcacgcttcagctcacttgtcataaaggccggaaccaaaacccgcagcggcagctccgcggccgatgccgcagacggcgtatccagtcctgccagatcgcagtagagcttgagcgagctctcctccacctggcctgccataaactccttcaggggtttctccgcccgctgccaaaattcctcctgggtaatctcctccgcaatatatggctcgtatgcggtggtctggatctcactgatgaccggagacatggtaaacagcgtgagaaacagggcgatgcccacgaggaccatattaggtggattctgttgcagccccatggccgagcgcagaaaggagaaggagataatgtacctggtaaaggaggtcatcatcacaactgcggagggcagcagggtcaacagggtggtcagaaacaggatctgaagggtctgtacgttctcgccatttacattgatcagcgcatccaccggctatggcctcctctgttgtttccgctgctccagcacgctgtgcagcgcttcctggaaccccatcttgggcgcggcggcgccgtctgcgccgcccatccaggcctcggcctcctcggcagtgagcttttccagacaggtgatgctcccctgagtcacccccaggaaataatacgtttcgcccgcgcggaccaggaggagcctttgatcctttcccaccgccacctggtccaaaattgtaagcatccgctttcccaggcggcttggaccgccgccctgtccccgtccggcaacatagcgggtaaacagataggccagcaccaggacgcccagaattgcacagatggtccaaagcacttccggcattggcccgctcccgtcagggattccccaggatggaattgaccgttttcatcaggcggtcctccttgaagggcttgacgataaaatccttgatgccggcctgtaccgcctcgactaccatggcctcctggcccatggcggagcacatcaccacattggccttgttgtccttggcgcggatcgccttcagcgcctccagtccgtccatgttcggcatggtgatgtccatcaggaccagatccggctggagttcaaaatacttttccacagcatccttgccgtccaccgcctcgtgcaggtcggtaaagccattcttggtcagcgtgtcccggatcaccttccgcatgaaggctgcgtcgtcaacaatcagaatcttagccatgttcttaatccccttttttatttcagtctcacttgaagtttgtcaggctccacagttccggcttctggagtacctctgtgatacgcacgccgaagttatcgtcgataaccactacgtctccccgcgcaatgcacaggccgttcacaaagacatccacctggtctccagccagcttgtccagaacaaccagtgagcccttggagaaggttaaaatatcctctaccttccggcgggtccggccaatctctaccgacacctccaggggtacggacataatcagctccaggttttccttctgttcggctcccagcgattccgccgcagcgaaattgggcagcgcgaccggcttgctgttaatgacccgcggctcctgcaccgggggctgatacacaggctgctgataaaccggctggggggaggcggcctgataggcctgggccggctggggagctggctccggcgccggggctgcggacatgctgcccatcagccgttcgatctcctcctgactcatctttccgctggaagacggagccgcggcaggctctggagccggtgtggaaacaccgccgcccatcagacgctcaatttcttcctgactcagcttcccgcctgcgccggaggagggctccggctgtgcgggctgtgcggctggggtggcatccgcctctgcttccccggtgtcctgaatgcccatcccaaagccagccagcagctcccgggccagctccacggacatgatattgacaaactcactcttgaggacgccctctatttccaggataaagtgcaccgccaccagcatcccggtttcgctgtggaagcgctcccttttgatctcctccaaatcatccagcgagaaagactggggcgttgagatattgaccggacgccccagaaaatcggacagagcagtggaggccgcacccatcatctggttcatcagctcgcacaccgcactgatcgtcagctcattgagctcgaactcctcctctgggatctcggttcccatcagcagctctacaattgccttcacatcgctccgcttcagcagcataatattgctgccttccagaccggagacatacttgatttccacgccgatggcgggctccagctcacccagggtaaactcactgatgggtaccactgtaaccttcggcgtcgtaatatcaacgcggtgatccagcaggttggaaaccgcagtggcagaagagcccagactgatgttcatcatttcgccgatggcgtccaattccatcgcgctaaatatattctgcgccatgtcgcttattcgtcccttcttccctcgttatagtagttttccccaatcttcactgccatggagttgttctgcacacccagcttcccaccaaaccatggctttcctccaatatacagatagatgggctcgtccttcggatgtcccaggtcaatgacatcacctatattgaggaaataggcatcttgcagctttacctcggtacggcccagctcggccgtgatctccagcgtggaatcccgcagtatatccatgatttcatccgagttgtcctccccactcccgtgtcctgcctgatttaatgacacaattctggaaaaaatattggtcagcatcattccgggcaggcagacatcaacacggccggagcagtttggaaagcggatattgatcccaacaataacaaccgtctcatccaggccaatgagctgtaccagagtcggattcgtctccactctgcgcagcttgaaatccaacgcgatataattctcccagcttccgcccagaacggaaatcaggtcttttacaatgctttcatagagcctcagctccaaattggtgaaattgtagccggcggggagtcggctgtccacatctccgtcgccgcccatcaggcggtccatcatgctcagcatcagcgtagtggaaaagtggaacagcaccggcgtctcgtccggctgtacctgcccctccagcgctacatctgccagggccaacacgtccccctccaacagcgcgttggaaaactcgtaatagcgctgctcttccacggattccacctctatctcacaggtggtatgcagcagtccgttgattctggagttaatgatcctggtgtaattttcaaagactccgctgagcattttaagccggtctttggtaaacttccttgggctgtagaaatcatatttacggtattttttctcggaactgctctctgccttcgcggccaaatccatctcgccgttacgggccgcgttcagcagagcgtcaatttggctctgagataaaacttccgccatcttcatccctcctcggcagagtttgggccttccccccgtctccctgcacactcaaggattggcagaagtaccggtactttcccgcatggtataatattgtgtaatgttatctccggcctcgtcgtccaggtccagccctgtgacaatcagttccacacgccggttttccgcacgccccgcagaggtgtcgttgctggacacgggacgccactcgccatagcccacgctgaccagccgggccgggtcaattatgtctttttcctgtaggtaaatagtaaccactgtggcacggttggaagccaggaagcggtccgccgtgacgttgttcacccgaccgggcacggcctgggcggtatgacccaggacacggatctcgtcgatggagctgctgacctctgaaataatctgggagacttcgtccaatacaaccttgccctcatcccgcagttcgtagctgtctccactaaaaaacacggtgtcgtcaaaggagataaagacgtagccgtttccttcgcccagtgtcacctgattggccattccagcctgttggacatagtcctgcatcgcctggtagagctcctccatgtcctggtcgatatcctcctgggttccggttccctcacccccggacgcggaggggggctgggtttccgtcacctcctcggtggggttaaaggactgtacgagtgcaatccacttttccttgtccagggtagacatggagtagagcatgacaaaaaagcacagcaataaggtcaccatatcgccgtaggtatccatccagttggcaccgccgccgccgctttttttctttttcatcgtgggtaccgcctccctgaagcaagccgcggcttatttctccttgcggcgcttccgctcttttttctctccggtgccgccgccggattctccgccttcccggagtttttggttcataaaggtcatcaggcgctcccgaaggaatttggggttctcgcccgactggatcgccatgatgccctccacgataatctgacggcaaaggatctcctcttcgtcccgggccgtcaggttcgacgcgatggggttgaatacaacatgggccagcagagagccgtagaaggtcgtgatcagcgccaccgacatactgggaccaagtgtctccatgtcggagtcggagagattcttcagcatgttgatcagtccgatcagggtaccgatcataccgaaggccggggccgcgttggagccccgttcatacatggcgataacctcctgatggcgctccgaggtctgctcgatatcattttccagaatgctgcgcacccggtccgggtcgttggcgtctacaatgagcatgattgcctgctgaaagaaggggtcttcctgctccttggctttctcctccaaggcaagcaggccgttctttcgggcaatctgcgccagctcggtcagcttctccacatattgttccggattgaacgcgtccagccggagcatgattttgaagtgcttggggaaggacttggccagcttggggtagcaggccaccaccaccgcaagcgtaccgccaagtacgatcaggatactggcgggatctacaaaattgatcagtgtatccagattgaacggaccgaccatgagccctccggtcccgccgggatcgaaggtaattccgaatattacaaatacgaacgccaggacaatgccgagcaaataaacaatgttcatctttggttctcctcccgcacgaagatgcagagcagacacatcactctttataccgctccacgacggctatctcgcggtgaatgtcctgtaccttggcgttatactttgcgatcttctcgatgatttcctcgaccgtgtcccgtacgatgtaatagtcgtgattcatcatgacgattttgctctctggaatcagctcaatgcactcaatttggttgtggttgagcaaaaaacgctcattgttcatttttctcagttcaatcatcgtgccgccctcccctgcccaatccccccacgcctggcggcgtgggggagatcggcaattccatttcttagcgcttcatgttgaccagctcttccagcatggtgtcggtcaccgtaacaatgcgggtatttgcctgatagccccgctggtaaataatcatgttggcaaactcggtggccagatccgtgccggaggcctccaggaagccggtcatcagtgtggcgccgctgccctcagccagtgcggaatcggggtcaaccacgttgtttccgtccgtgatcttgtcatttctcaggtttccggtgacggagtttccaggggtacccacccggatatccccagcggcattgcccgccgtgtaataagggccctcggtatgaagcacgccattgaggttttccacactgcccagggcgatgtagcccaccaccaccgggtcgccggtgtccttgttggtgccagtgatcttaccgttcttgtcgatgctgatgttctccagatctacaaagccgtccactgtggcagccggatcattgtctggatatacattcgcaccagtttgatcatccacgcccacataaaccgcgtcgcccttgctgttcgggtcggtagacttcataggaaggcggatgggaaccaagtcagtgctgggcttatctcccggcgtggttccgggatcatccccgttggaccgcgtgataaatccatagaccacattgccctgtccgtccgtcaaatagccgtcccggaactcaaagttgcccacccgggtcagggttagtcccttgagggcgtccatgctgtcgatatcgtgggtcttatctcccaccaggaaaaagccgtcgccctgaatggcgcagtccatcccccgtccggtggagtccagactctgactgctcatatccaggtcgatggtgccgatgcccacaccatagccggtctgccgggggttggtaccgcccaccgtagccgttccggcggagccggcggactgggtgctgtaaatactctccataaaggtgacccggccgggcttgtagccctgggtatttacgtttgctacgttgttgcccactacgttcagtgcatccatgtgggccttcaggccggaaataccggcactcattgctcctgtcaaagccatttggattcgctctcctttgcgtgctctgattcattgacatttctccggcaccgccgggggacggcccatccggcctcccccaggacatcctttcggtcctgccctctgtgattcacaggatcacggcgccgtcaatgttggtaaagatattctccttcatctcgtcctgggacagggtggtaatcacccggttgtgggggacattgatgataaaggcgaggctctggtccagcgccaggatattcgtcgctcccttggcctgcgcccgctctacggagtcggtcagccggtccagaagggcgggtgtcactgcgatcccgcgctcctccgcccgcgcgatggcgtgcttggaaaaggcgatctgccgctcatctgcccgggccagctcctgctgaagcactgctccaaagccggaagaggtctgtttcccggtgctgtatgtatggcctcgtcccagcgcggggctgccgaggccctctaccgcatgctccattccgctctatccctcctttggacggcccctgccgcccgctcaaatcgtccgggcgctctcctccggcggattctctccgccttctcccgttccgtcgccgtcaccgccctcaccgggcccctcgggctcctccggaatctccggcagcttgcccaccgccatgatggaattcaaaggatacatctcgtcattcacgaagatcacgggtaccccctgatagtttccggtgcccgtcacgactccctcaatctcctggagcttcccgtcttcgtcatattggcccaccgtgacggttttccctaccagggaggccgcataggtcagggtgctggcatccaccagggtctccagtccggtcttaacgctggacagcatctgtacggtggacatctgcacaagctggttaagcatttcgccggtatccgtggtgttgtcaatggtctggttctgaagctgctgcaccatcaattggagaaagtcgttaaagtccaggcccatgtcgttctctcccggcttgtttaccggaatgcccagctcctccagctcttcctccgtaatgcgggagctcgcaccactgccggcagcccgcgcgctctgctgtcgggccagactgtccagcgccatcggcataaattcactgctcattgcgtgctactcctttttctgttactccgcttctacgcccagcaagcccagccgaagctgctgcaggaagtcctctgtactctggcgctgccgtccctgttcctgtgggttgcggccgtgctgctgtccgggctgctgctccggctgctgccagggctgctctccctgctggggccggggcacctccacctggatctcgccgctgtggctgccgtgcagcatggataccagcgtcgcggagtgctcctgaagcagcttcatggcctgttcgttctccgcgtggaatacgatgtgcagtacaccgtccttcccctgcgtcagctcgacagacagctttcccagatgctcgggcgccagcttcagctcgacatgcctggctccctcctgctccgcttcggtaatggcctttgccagcctaggagcaaaatcgggcaccgtggcgtccagggtatccgcctcgcccaccttcaccggcatgtgctctgtccggtcaaagagcggctgcgccgccccctccgtctgcacactgtccagctcgggcagctcctgctccccgccggccggacggcccgccgtctctccagcgtccgtcggggtctgcgcgccgctctcccgggccgcaggagtaaccgcctgggccgtggctgtaccgccatcctccgcggcaggaaggacctccgtctggaccgtggactccgcctcacccgcaagcgccggctccgccggtaccgggagctgctcccctccggcggtctgctgcccgggctgaggcaatacggccccttcttccgccgcagccggagcttgggccatgccgggaaccgcagtctgcgggacctgctggagggatacgtcgccctctggcgctgcctgggcgcccatcagcaggctccggaacagctcctccagccccggcgcctggggtacggactgcgcaccctggctgagcgcacccccatcggccgcagccggaacctcacccttttggctctccggaaccgcgcgtccggtttccgttccggccgcctccacccgcttctctgccagcagagtggagaagtcccgccggtcaccggcatcctccgtccggccgctgaccggcggagtggtgttttgggcaatctgtgtggctgccaaagtcatctgaagcaataaatcagttgtattcatggttctcacctcctttcaaggtgtggctccgggcggtcaaaccgccgtccgggcccgggctgcggtcaccagctcctcaatcagcagttcctcgcccttctgcacctgcttctgatagtcctcccacttcttgtccttgagcttttccagggaggcggtatcctgccgggcggccactacctgcctgcgcttctcctccgctgcggcctcatactcccgcaggcgcttggcctcccgctggatctcatcctccagaaaacgcaggccgctctcataccgcagggcctcggctatggtcaggccctccgtctccgcctgccggaattccaggttcaggccccggtagcgctcctccgccgcctggagcaccagctcctgctgccgtacctggtaaaggagttgtccatgctcattctgcagctcctccagcacctgctgcttgtagctcaacaccgtattcaggctgaactggaaccgcttcatccctgtcccctcttctcttacaggagcttccgcatggcctccagatcctcctcataggagaacgcctcgtccactccctgggtcaaaaactggttgatcccgtccatctttcccaaagcataatccagccttgggttggtgcccgccttgtacgcgcccacggaaaccagatcggcatttttctcataaatccccatcacgtcccgcacccgggccgcaagccgcttgtgctcgtcggagacgatgtccgccatcaaacgggagatgctggccccaatgtcaatggccggaaaatggttgctgttggccagccgccgggaaagcacgatgtgcccatccagaataccgcgcaccgtgtccgcgatgggctcattggtgtcgtcgccctccaccagcacggtatagacccctgtgatggagcccttctggaagttgccgctgcgttccagcagcttgggcagctcggcgtagatggatggggtgtagccgcggcttaccggcggctcccccaccgccaggccaatctcccgctgggccatggcaaaccgggtcagcgagtccatcatcagcagcacgtcatacccctggtcccggaagaactccgcgattccggtggccacggaggggcactgcttgcgcagcatggcgggctggtcagaggtagccaccaccaggatagaccgccgcatcccctccggccccagatccttttccatgaattccagcacctcgcggccgcgctcccccaccagggcgatgacgttgatatccgcctttacatttttggcaatcatgcccattagggtactcttgcccacgccggagccggcaaaaatgccgatacgctgtccctttccgatggtcagcatgctgtcaatggccttgacgccgaactccatccgctcccggatgggagggcgggtcatggggttgatgtagtggttgttctccacacagaacagcgtgccgccctgaaaggggcccttgccgtcgatgggctgccccagtgcattaatcacccgccccttcaggaaggggcccatgcgcaggctgagcctccgcccggtgttgcgcacaaaatttcccgcagagataccgctcatgtctgaatagggcatcagcaggatgtggtcattcttaaagccaaccacctcggccattacctggccgcccgcgtccccgttgtagatctgacagatatcacccacagcggcccgtccgccggatgcctcgatggacatgccgacgatattttcaattttccccgtataactgatcgtctcggcccgctgaatctgccggatcatctcctggaacatggctttgggtcccttccttgcgctgcctccgccctatatctcgtgtatcaggtcgcggatattcttgagctgtgtggaggcgctggcatcaatgatctcatcgggcatctcaatgatgcaggtgcccgcctcatcgtcggacagcggaatgattttgatgtggtcggacaggccggccagagccgtcatcagctccggcgtaatggcagacacctccttggcggcacagccgcccacgtagatgtgcacccactcccgccgcttgagcttttcggtggccacctggatcatccgtgccaccacctcactgctgctgttcaggctgacatggatcaccttttccgcaatggccaggctgagctcacacagctcgccccgcgtctcccgcagcagctcctcccgggcagcggtggccttttccaaaaaagcctgcagctcctcggcctgctgctcccgctgcttctgcagctccgcctggccctcgaccccggcctgccgcagcccttctgcatagccctgccggtagccctcagactgggcctgctggcgcacctgctcggcctcctgctccgcctccatctgccgccgggccaggtagtcctccgcctgccgcctagcatcctccagaatcttctccgcctgaatctgtgcaaagtcgaccgcgctgggggtgtccttttcctctgcctctggagctgattcctccggctctccctcttgctcgcccgcggtatccgccggctcctcctccacaagctcctccacgtccggaaacacaaagtcggaggtgttgggctgcaaaaagcgtttgaatatattaggcaataatatcgtcctttccgcccttgaggataatcagctcgtttttctcctccagatcccggatgatccccacgatgcgctgctgggcctcctccacatcgcgcaggcggacgttggtggtgatctccagatcgtcccggatgctctgggccatacgggtggacatattctggaagatcttgttggaaacctcgctgttggcgcccttgagggccagcaccagatccttgggatcgcagtcccgcaggaaacgctgtaccgagcgctcatccatggtgacgatatcttcaaacacgaacatccgcttccggatctcgtcagccagctcggcattatgctcggacagatggtcgaaaatacttttttcactggtgcggtccaggttgttcattacacccgccacatagtccacaccgcccaccttgacctggttggaagtgagcaggtttgtaaactttttctccatttccgcctcaatgatttttacggcggtcggagacgcgctttccatattggcgatgctctccaccacccgtacttgggtattggagtccaattcctccaccacggcggccgccttctccgggtcgatataggagagcaccagcgcaatcgtctgaggccgctcgtgctgcagcgccgcaaacagcgacttgccatccgccttgttgagaaaagagaattcccggttttttaaggacttggttactttctccagcaagttgtctgcggcctgttctccaaacgccttttcgagaaccgcgcgggcgtactccaggccgccttccgttacagccttgttggtcaggcacatctggtagtactcattcaggacgtcttctgtagtagcggcatctacatagcccagctttgcaacctccagggtgatctgttccacatcatcggggtccatgtactgatagagctgggatgccttctccgcgccaagagagatcacgacggccgctgccttttgctgtctcgtcaactgttttgcagcttgagaagcggctgcccctccggtagctgtctcgctcattcgccatccccctcacgcagccagctcttgaccatctgagccgcaatctctggattgtcctcggcaaacttccggacatccttccgcagttccatactcttttccgtctgaagattcataatatccgccccctcctgcggcgtgagcggagcggtctccgtctgggccacggcggccagtcccgccgcctccagttctttgcgccgcttccggcggcgccggcccagcaggaggatcaccagcaggagtaccaggaacagcacgccgcctcctgcggccgcgtagatcacccaggccgggattccctccggcaccgggagcacaggctcatccgcctggtagaaggggctgatcaacaccgagatcttgtcccgctgatctgccgtggcgatgcccgctgcccgggcaacgtgaggatacagcgcggccgcatccgtaccgtccgccgccgcctgattgatcgtgacggataccatgacatcgctcactgtgcccgacaggtgctccacctgctgattcgtctcatccaccaggtattttttatctccggagacgtggacgatctggccttctccatccgcctccccgtcctcgttcacatactggttcagatcagcattggtgctcgtaccaggcacacctccggccgtgtcgccgccgggaaggaggatgtccccctcatagatcttctccccgatgataccctcaccgccggtactgccgtcattggcccagtcctccagattgtaatcggtggagtccgtatagctgcggtccagatccacaatgctgttgacactgactttgacgttctccgtaccgtaaatcggtgtgagtacctgtagcacgctggtgcggattttattgttgatctgctcctccaactgaagcttcagcgtggacaaatcctggatatccgtaaaggtatcccccgcagaataggtgtttccgtaagagtctgtgatggtgacattgtcaatttccagtccctgaacggagtggctgacaaaattgcggatgccctgcacctgcttttgagtgagctctgctccgtcccgcatggtcacaaaaacggcggcgctggcatcatacttgttttcgctgtccagaatgaaggtgttgtcctcccccggcgtgatatccacgacggcctcctggaccccgtcaaagcaacgaaccaccgccgcaatgcgatcctggagctcatagagctccaactgctcccgttctccctccgtggtcaggctccccacatgatccaaatacatggagtaggcgaagccggacttggggtagccctgctgggccaacgccgccttgagccgtacctcctgctccgccggcaccagaattgtatcgcttccctcaatccggtaatcggccattccctgctcggacagataggacacaatttcatttaattccgtctgattgagcccggtgaacagggtcgtatagggctggttcatctgcatcgccaatacgactgcaacgacagccacgaccgcaatcaggccggctatcaggaagagcttcacctttttcccggccgccttccaccagcctgccaccttgcccaggtatccttttattttctcctgcacacttgttacccccagctccggcaaaccttacacgctgaggcgcataagctcgttataggactccactgccttatttctgagctgaatcaacagttccagcgacgcctgcgcctccgtgatggaagtcatcagcgccgccggattgtccagttggccggtagcgagttgatatgccacctcatttttggccgcgtccgtctcccgtacgcggtcaatggccgactgaaaaatatcagaaaacagggtcggctgggtacgccgggtaccgcccacttccgcgcccgcatccaggcgcatgccctctgtctgcaagtccgtccacagcggctgaatcctatcgattgcttgcacactcatactcgtctctccttcgtgtgtcccgtgcaaaaccgtcccattccctgcggcacaggcttactttccgatctccagtcccttggccacgacctgcttcaggacgttaaacgcagtaatgttggccgacagcgcctgattggccgccatagcgtccgacatctctttgatcaaatccacgttgggcatctccacatacccctccgcatttgcatccgggtgggtcgggtcatacaccagcttaaaatccgagggatcctcggcgatctccaccacacgcacccctccggcctgggcgggagccgccgcgcttccggcgcgggccagcgccaactgaaacggcgtgcgctccccctgctcctccagcaccacaacctttctccgataggggccgcccccctcggtacgggtagtgttgatgttcgttatattttcagagatcacgtccaggcgcagcatttccgcagtcagagccgagcctaccacgttcattgaactcataaacgccactttgattcccccttatccccggattgcggtacgcagcagcgacagttcacccgaaatagcactcatgacatactggagctgatagccatttcgcgccagctccaccgactgctccataatatccaccccattgtcgtccatccggacgctctcctgcgcctcgtgaagctgtaccggggtgtctgcaattgcctcacgcatggcggcgcccggctggggcttgtccgccgcggcctggaccgcatccctcaggctctcctcaaatgtgacatattgggtcttgtagccgggggtttctgcgttggccagattatttaaaatacagtcctgcttgctccaaagaaatcccatggaccgctgaagcatcagcatggagttgctggtcagaatattcacaacagcgccttccttccctcttttttgggtggttcctataaacagccggcttgattcaacgacataatgaaacattatgtcgttttgaattcgacaaaattatctaaaatacgcctttaattgtataccatatttctattttcttcaagtcccatatttgtaaaaacagaggttcatttttttagctgtaattgtgaaagctgtatctgacctttatacataacataaagttgttttaaatgcatttttatctgcattccatcagttaaagcatcaacttcatatttgtaatgcagccggcttgattcaacgacataatgtttcattatgtcgtttctgattttggtatgccgcttgatacggaaccgttaagtgaagcgattctaactgttcccggtgttccgccccgctggagacaacgtagatccgggtcgtgttgacattttcatgcccaaggatatccgccagacgcgagatatccttttcttttttataaaaagtacgggcaaacaggtgtcttaggttgtgcggatatactttttccggcccaacctgtgcagatttgcacagccgtttcatggcattccaaatgttgctgcggttcagtgtccgccccccgcgggtaacaaaaattggtccatcctggattccacgctccctggcatagtccagcaaatttcggcacagctcctttggtatcagtatgatacggcttttccccttattgcttgcaattgctcttccaagacgggccgcttccaccgtgatataggcaagttcacttacccgaattccagtcgcacaaatcgtctgaatcgccaggtggagccgcatgtccccatttcgtcgggctgcctccagcaggcggaagtattcggcctggctcaactcttttttcttatcgcagaaggtctgccgctgtaccttaagcggcttgacgcagcagtccccggccccttggaagcgtaaaaactggttcagtgcaatcagcatggaattggtactgcgcacagcgtaatgctccgccagccaggccttgtattggatcacatcctccttacagacggtctgttttccgtgatacgataaaaagcgtcgaacatcatgagtatatttttggatggtcgcttctctcttttcatccaatataagctgctttctaaacgattccactgcattttccgccaattgataggtctgattcactaatttttgcatactaattttattccctccatttcatttgtagtgatacccattttagtcttttcacataatgaaatccagaaagctattattttagatatttcttacactattagtccataaaacgcaaaaggccccccggccatagtgtttccactatggccgggggacccttgaattcttttagaaagtgattgcacgcgcgagcataaccgccatttccgcccgtgaaatcgactgtatgggattcagtttttgttccggcgtaccggtgatgataccatactctatcatatgggacatggcctcctgcgcatagggcgccaccattccgccgtcccggaatccggagagatagccggtattcgctgccccgaggctccagcccgtggcctgcatggtgcgctccagaagcaccatggcatcctgccgggtgacaggctcctggggatggaagcccccgtccggatagccgctggcgatcccggcggcccgtgccgcctggattgcctgggcgtagtagctgcccggcggaacgtcggggaacccggcgccgctggccggggtaagctggaacgcccggtagagcatcagcatgaaatccccccggctcaccgcgtcggcggggcggtagcgctggccgccggtaccagtgattacaccggcctcatacagcaggtccacatagggcgcagcccaggcatagctgcccatatcctgaaagtaacgggagcccgatccctgatttacctggatgcggatctgcccacggaaggtctttccacggctgtccgtgccctcatagccaatctggacgctgcctgtgaagcccgctttgggcaggaaagtgagatctgagaggttcggactgccgtccggggtgtactgggtaccggtgcgcacttcggtccccttttcgctgatatcccggtagttgtagtacagccgccccgcgctcccggagggcagggaggtaaagcgcacctcccgcagctcgccctctccgcgtgcggcgcaggcggtacgaaagtcctggctgcggaagggcagcgccgtccccagggtggtatatacaatttcgctggcgccggccggttcttccactgtaatctcgatggtgccctcaaagcgctccccctttgtgttccatccggtaaagccgattttcaccgtgccatagaaattttcgtccggaacgaaggagacccggtccaaataggcgctgctggagcggtagtaattccggctggcggacaccttgctggcgtatttcccgtcatcgtagtcgtagtagagagtgccctctccggagtccggcagttggaaccgcacatagttcaggtgctctccggtcagcagctccgacaaatcgtcaaagtccccgtccgcgaatgcggcaggctttccatgtttagtctgatagcgtatcgttgtgtcgccgctgtccacgccgatgattaccgttccatagaatttctctcccacggagctccagccggtaaacgggatgtctacggtgccggagaagtccttcttggggacaaatgtaatccggtccacataggggctgctggaacggtagtagttccggctttcggataccttgctgtcgtagctgccgtttctgtaattgtaatacagcgtcccctccgaagcgtccgggagttcaaagcgcacatagttcagcgtagtgccggtcagctcccggcacagggtattgaaatcgccgtcatcaaaggtgatccgtccgttccggtaggtggagtagcgcacatcgccgtcacccgtgcgccccacctccaccgccactgtgccggaaaagcggttgcccttggtgtcccagccggtaaacgggatatgagccgtgccggaataatccttccccgctacaaatgtaactcgccggagatagggggaggaggaacggtagtagctgcgtccctccgtcacctggctgtcatagctgccattgctggagtagtcgtagtaaagcgcccctttggaggaatccggccgctcaaactgcacgtaatccagggggtagcccgtcacagccttggacaggtcgttaaaatcgtcgtcatcaaaggtcaccttgccgccctgggcaatggtgtaggtgagatccccggtgttctgagcctgagagacgcggatggtaatgcgtccgcggaaggagcttccgttgctgtcatagccggtataggggatcaccacctctccccggtagcctgcggcagccacaaaggtgatgtcggacaggttggggcttccgctgcgcttatactgcttggaggtgtccaccttgctgccgtaattctgctcggagatatagttgtaatagagtgtcccccggccgctgtccggctgggaaaagatgacatagctcaattcccggcccgtgtggctgcggcaaatccggttaaagtcatccgcgttcagtgagaggggctgctgtccggccacggagtaggagacatcctcctgctcctccaccgtgacctcaatcgtcccctggaaaaaggagctcccgctggcatagccggtatagtggatgacggcggttccgctgaaatccggcttcggcacaaaatacagctccgagagggacatctgccccagagacggatcggcataatattgttccccggtgcccacgccctttccggtatctccctcagatttgtactggtagtagagagtaccctgccgggtgtccactgtcagtccgctgatatagcgcagagagcttcccaacacgctgctgcactggttttgcagtttggagcgaagggaggagaaggccagcggctcccccgcccccgccgagccgaaaatgatatcagcggtgttgcgcttgacggtgacggagcaggcggcctgataattcccgctggcatcggaaactgtaatcaccgcgtcgccctgggccttggcatagaggtagccgtccccggtgaccgtgacgatttccggtttgctgcttgtccacttcaacgtccccagcgagccatacggattcgctttcagcgtgtgggtgtcccgctcgttcatggtcagagaggtttcatccagaaggataccctttactgtgatctcgcaggtgtccgtattgctctccgaaatcgccgtgatgacggccttgccgggggccatgcctttgacttcacccgtagcgctgttcacggtggcaaccgaggggctttcgcttctccaggtcaaaggggccccctccggtgtaaccttggcggtgagttggagggtctgcccaatatcaatctccgtaacggcaggcgggtcaatggatattccaggagtgaccgccggttttaccgtgatctcacagcttgcattgccgatatcacctgtcccactgttcagataggcagtaatggtaacctttttttcgtcggtcgtttcccctgtttttacggccatcactttggtggtcagggtgcctgttgattccacgcttacccggccaatgtccccgctctcccagcggatcgacagccccgcgcctttcagtccatcctcatcaagcgggcctgtatccgatgttacgatggccttaagcgggagggactcgccctctaccaggtcaatactcgacggctccacctttatgctgtaggtcggcgccggatcagccgaagccaccgccgccgggagcattgtccccaacaaaacacaggaaaggaggagggaaagcacccttacccccaccttctttttcacggaaaatcactcctttgttctctggaaagcaggggacgggcagggtctgcccgtcccctgctttccaacatgattcgcggctacgtagtgggagaatccccctcaatcgcaccttgcgtaatgacaaaacgtccgtttgtcaggaactgcccggtgccgcctgcctctgtcacataggtcaggattgtttttgtctttgcttccatcccacgtccgttcatgttcatatcgctggcgtaaccggtggtaaagaacaccagcgtgtctccctccacgactccctcatagctgaatgtgaatgtgccgctcggggaggcgagagccccgctcgccagtttcagcttgttcgccgcactcccgccgatgccgaaggcctcgtccagaatatagaccgccttctggccctgggttgcattttcaggcttcttggtccagacctccttgagcgtctgccggtcctcgctgagccaatacagattttcactgaacgaaagcgtcacggttcccgaccagcctgtacccgtggcgttggcctttccacccgttacggtgagaaccggcggatcattgtccgggatgttgaccccgccgatcgccttaaagccatcctccgtgccgtccttgttccgggcaaccgcgagacagtaatagagtgtattcatgttcatgtactgctcaaactgctttacctgcggtacatttttctccaggctgatcgggccggacgccacggtagtcatgctgtcgccggattgattccgccgaatcaatttcccaacacggtcgcggagagatgcctttgcatacatatcaaagacagagggcccttcatttccgcttccctgacgcaccgtttcaatcagcgcctcaaggatagtcatatcctgattcaagccagagctctggaacttctttaaatcttcttggtccatattggcctcagtggcaaattttcctttcagaaaatcgggaatctgattatatgccaccagaacataattcagctccgagctctccgaggttttaaattgtacatccgggctctggttgttcaacgtaatatagggcgtccccacatctgtcgtggtaaaccggtaacactgtacctcagaatagttctgcgccgtattctgaatgacaaagtaaacgatatagtctgtctgtggagacagatcctccaccgaaagctttaccacgctggactggcatgcagtattgtcatacttgatactgggatttttactgtaactcttctccggattcaaaatatccatgacctgcggctgattgaaagagggcatagtaattgtactgtcgccttctatagggaggctggaatagtgaggctcatccttatagttattgccgtccttgtccgttgtcaggatatcccctttcggcgccactacatagtagaccgtacccggccggttcagcagcagctccatctgtgcatcggtcgcaccaggagtaaacttggggtatccgcttgtaaactccgggatactctggtcgctgaagggcactttcaacgtaaagtctttcggcagcccaatgtctgtgagatcgccgtttaccactgtgtccatccagttttgttccgtcaccgatgtcgccatcatacgcagatcattgtcttttcccgccaccacgttgacgcggatattgacccgtccgttccacgcctgcttgtccctctccccgttcacgctggtaaattccatggcgtactcgtaggtctgtccttccttgagttcgttaagcgggtcaaaatcggtcatcgtttcgcccaccttcaagaaatccttggtcagactgacgcccagaaagccttcagttgcagaggaaagcgtaattgtaacttcgcccttcttgttcaactgctcccacggacctccgtcggtgctccgatagaggttaaagctcagattggtatccgtccaaatgagcatatcccaatcaatgaagtcgcctactttatctgtggtcacagggtccagcttccataccgcattaaccgttttcttattatcgggacccgatccgaccgtgatttcagcctggttgacagtggaaatatttacctgggcaaataccgttgtaaacttgtccagagtcaccttacccatgacattcttactctcagaggtatccgcgatctttccggcctcaatctcaaagtaataagtcgcaccgctctggaggttgagggcggcatcggcacttccgcccgaacccgggaacacgaccaccgtcttgccatcctcctgcttgatcaccacattttcgtaattgatcgtccagttgtccttgtcatccttgtaatccacaacctgagtggccgggccgtttccggtgtcctggtagagcttgatgctgtcccgcagcagcccggccagctttgacttcggctcggtgccagccgccaccttctgatagagctcatacaggttctggttcgtccccgcgtcctgaatcccctcgctgaacaccagccggacatcggtattgggcagtggggtagtggagtcggttccgttatacttggtgaactcctgggttacagtgggcgcattgggatccagcgtatgaatcgtaatctttcccaccgtctccgagtagtttcccgccttatcctgggccacataatagaggtcataagcagtttctttctccaggccgctgacggtaaaggagacgtccttcccctcggtcatggtaacctttccgttcttgagtgcgttcataccggccgacacctggagtttggcgttgtcgctgctcaaatccacctttccggactgtccggccaggggcttggggtactcctccccctccttcaccaccacccagtacagagtgcccgcctcgttcaggttggcatacagccccacagaggtggcattcaccttatttactgtagggttggtattgaagcggggcggtgtaccgtctacggtggtaaaggacacctttttgacggcggaactctgcccaccgtccacgtcggtgagccacaggtacaggtcgtaggactccagctcctccagagggacgttgttcacgtcaaatgtattggagacgttcttggtcacatcgagggttccaaagcccagattgccgctgacggcgttggccttaaagtcgttggccgtgggggcggacgcccccttgggcagcaccgcccagtacagccggcaggacttggtggccatggtcgtcacctgcccggaggtgctggtgattttggacatataggggtaaccggaggcgaaattgggcacggtgttgtccggcgtagtaaaggagatgaccttcagcgggctccgctcctcccgcgcgtccacaaagacggcggacaggtaataggagccgtcggaggtcaggccgctgattttgacgctgcccggctggctggagccggtcaggctcagggtgccgctcttgacaaccttggggctgtaggacgaggggttgagcaaatcgtccacccccacggagccgtcggtcaccgaggtgaccgcccaatagacggtacccttcttattggcgctgaaccgggcggtggcgctagtgggcgccagatccgtgacctccgggtagcccgccagcagccttgggtccgccgaggactccgccgccgcttcactgtccatcttctccccgtcgatggtggcctccacgccgggccggatggtgatttgatccggcaacatcgtcaccgtgctgcccggggcgttgacggtcaggtggccgatgtccccgtcgccggtcacggaggtggccacgtccaggttcacgttgtccacctcagcgcccgaggcaatgttcagggtcgaatccgtggccttttcgtccacgttgatggtatccacatgtccgctggcgacgccaatgctggacttgggcgtcaggttcgtgacctccttgacattgcccgccaggttaagggaaaggccgtcctccccctccagggcgatcttgctcaggccgtaccccgcgggggtgcggtcgtccagataggcgtcggtgcgcacgctggtatgttcaatgaccccgtcgccctccacgcggatggaaatctgctggttggggatgttgtccacaatcagcttgggcgcgttcacattgcgcagcacaatgctgtcgtctccgccctcgctcacgccgccgccgctgatgacgatctcccccagcacggtcacattctccagcgtgatctcgcccagatccacgccgcccgttatgtagaggttgccgcccaccacggtatccctcagggtgacgccggagctcgtaatggtcacattgccccaggtgctccccaggctgtggactccggctgtctgcaccggggtacccacggcctttaccaccaggatcgccgcctctccgcgggtaatctggttcttggggcggaagctgccgtccgggtagccgttcaccaggccgtaccgggctgccgtggcaatatagccccggctccactcgctcagctcccggctgtcggtaaagctggtgttctcgccggtatccggctgcagcatcagatttcgggtgaggataatggccgcctcctcccgggtaatgctgctgtcgggggaaaaggtggtcttggacgtgccggaaatatagccctccgtataggcgatatccacatcctccgcataccaggcggaatccggcacatcctggaagggatcgccccccagcttctcatagcccagcgcccggttgatcaccgtcacaaactccgcccgcgaaatggggttgtccggtcggaggttccccgatatatccccccgcataaagccccaatccaccatctgctgcaaataggagtctgtataggctgccccggcctggcgaggcagctgcgggagcagccccagcagcaggacgcatgccagcagggtggcgcctacacggcgcacagttcccttccagaggttcatcatcgtttcgccatcctttctcttgctctgcttacatttctgccgtatgccggaactgaaggctgaacacggcctcacagaccatattttcttcctcacggagcatatcaacaaactccgccgcatagagaggaatcggctccggagagggccgctcgcgtaaaatctttaccctgagtaccagcggctctgctgtaaccgggattacaatctcggctacctcgtccacctccagcttccgggcgcagaaaaaggccgctccgccgcagctcagatcgttgctcaataccggcatccgcccgcgccaccggccgctcaccggatagaggaagctctcaaaccgcaccggcatgcgcaggttgcggcgcacctcctcccccagcatgcgcaccgactctaccgagacgagattatcccggcaccggacaatccgcccttccatcgccgggaactgctccgaggttcccaccaggctgatgtactcatgccccagcacccgcttgatatccccgtgggcgatccggagctgccaaacgtttttttccggtccatcctcggaaaccccctgggccaccggggctccccggctgtccagcagcatgtatttatagctcatcgcatgctcactcctttgcctgcttcgcctccagccgttcccggcgctcccggcggtatttctccgggtccgacgggtcgaactgcaaaaagtaaatgtaaatgtccacgatggcctgatagagctcctccggaatctccctgcccagctccatctgggacagaatggtcgccagggaattgtcctcatagacgggaacgccgctgtccaccgccacttctacaatccgctcggccaggtggcccatgccggacgccacaatcaccggcgcaccactgcccgggccatattgcagggccaccgcgcgcccggaaccgccctgtttagattttgacattgataccgcgctccccttcaaacagtcccggaaatacttccgtcagcgtcagcggacgggtgtgcttctgtacctggacacttctccccttcaggccgtgatcggccagaatctgccctaaatcctccgcaatcaggccgctgtgggctgtcacactgtccgggccgtagacactcacatccacctgctcctttccggcccccagtgtcatctccaaaaagcccactgaggggagatccatcttgaacaggaactggatcttatgtccgtccccgcgcccatcccgggcctcctcccgctcctccgcgtccgggtccacccataactccgagtacatccgcctgccctcccactccagcgggacaatggtatggtgcagtgggaggaatacgctctcattgagcagcatggaccgcacgatctcctgaaacgcctcccgcaggtccgtgccgtattctccctgcagcgcccgctgcgccgtccgggccagctgctccgtaaatgtatccgcctgggcggccttggtaaactggttctcccggagcagcttccacagcgtctgatcgtccaactgattgagaccggccagggtatctccatagccgcccaactgccggaacgccagcatgaccccctcctccgcgccgttttcatagcgggccatatgcagcatcagcatcccaagcagcgtccgtgctgttcccatatcgtgataacgcttgatataagaacccaggtagggcagaatctgtccctgcagcagctctaaattctccgcccgcgccccggcctgaaggccgttttccagctttcccgtcagctcagccaactgtcccctccaactctggggcagatagtccgaaagctgccggagcagggagagcatgctgcgtccaatgtgacccgtggcggaaaaatcactgtagcgtttggcaaagttcagaattgccccccgcacggtgtcgccgggcgtcttttgataaacctccctcagcagggagaagaggggccctgcaaatcggttgcctgcctccatctgcgtctgaaaaaactgtcggaacgcatcggggtccattttaagcagttccagaaatccggataactcttctgtcacacctgccgccaagccgggcgtggttaccaatccctgcatcagtgtgaccagcttggacagttccgcccccaactccggcatatcccgcatctgctgcaggaaaaactgaaggttggaatcatagcgcagcacaccggagttcagcgcatcattggccccctgctgatcggtacgggcgtccggccggcccacccggctggggtccgggatgttctgaatccgggtgtcacttggctttggagctgccggcagtgtgcggttgttatttgaggcgtcataattgggaaccggattggtcacgcccactaaattcgccacgtgcaaatcacccttttctaaaatctcattcctggagagggtggcaatgcggccggattccactccatgtatctttttcgcgttctgctcttattttttggctaatcctgtcgatcggaacatcagaagttcaacgcaaaggaaggatgtaccgatgggcaatggaaacgacagcattttagaggcataccttttcgaaaccaattccctgctggagcagcttgacagccttgttttggccgccgaggaaaaggacagcttttccgaagaggatgtcaacacgatcttccgcatcatgcacaccatcaagggctcttcagccatgatggaatacagctccctgatgacaatcgcacaccgggcggaggatctgtttgccattgtccgtgacaaatcgatggagattgtcccggaggcgctgcgccccgccctgttcgacctgctgttccagatcatcgactttttccgcggggaaattgagcgcattgaaaacggacaacctctcactcagacgatcgacagtcttctccaaaaagttaatagttttattcagcaaattcaaaatggcgccgccgctgcgccggccgaggttccgccggccgcgccggaggcgccggccccggcggattccggtccgacagccgtccccggcttcccctatgctctccagatcttctttgacgagggtgccggcatggagaacctgcgggcatttatgcttgtgagcacaatccgcgacggcggctccgaggatagcttccaataccttcccgccgatgtggagcacaatcccgacaccgcggcgcagatcgtggactccggctttacgctctatttccgggatcaggcacagcgggatgctgcaatccatgcagtcacgaacgccggctctgtgcgtacctaccaggccatcgatcaggaggcgcccccacccgtcgccccggaacatcagtcccccccggcggaaaagccggcggccccggcttcctcccgggaggcccccaaggccgagtctgcaccccagcctcaccgcgagagcctgatcagcgtcaacctgagcaagttggatcagctctccgcagtggtgggcgagattgtcatcaccgaatccatggtcacctcctcccctgaactgaagggccttcgcctggatgagtttaccaaatccgcccgtcagctgcgcaagctcacggatgagcttcaggatgtgtccatgtccctgcgcatggttcccgtatccgccaccttccagaaaatgcaccgcatcgtgcgggatatgtgcaaaaagctcaacaagcaggccaagctcacactggtgggcgaggagacggaaattgacaagaccattgtggacagcatcggcgaccccatcatgcacattgtccgcaactccatggaccatggtatcgaggaggatgtccaggaccgcatccgtgcgggcaaggaccccgttggtgagattactctctccgcccggcagaccggcagcgaggttatcattgagatcagggatgacggccagggcatcaacgatgaggccgtattgcgcaaggccgtcaaaaacgggcttgcctcccccgatgtggagtacagccaccgtgaaatcctcaactttctcatgtctcccggcttctccaccaataccgaggtgacagagttttccggccggggtgtcggcatggatgtcgtcaagcagaacgtggaagcggtaggcggaactgtttctctcaccagcgagcttggcaaaggcatgaccaccacgttgaaaatcccgctgaccacggcaattatggacggtatggaggtatctgtcggaggctcgattttcaccatcccgatccacaatatccgccagtccttcaaaattcactccgatcaactggtacacgacgctgccggcggagagatcttcaagtgtatgggcagcttttatcctgtggtgcgcatgcgggagctctatcagatcgaggagggatgcacccaggtagaggacggcatcctgatctggctggaggccggtgaactctcctactgcctgtttgtagatgagctgctgggcgaacagcaggtcgtggtcaagcccctgcccagctacctaaacagcttcaacatcaagcgcagcggcatcgcggggtgcacgattctgggggatggcaacatcagcattattctggatgtggccaatctctactctccctttcgttaaggaggcattataaccatggatcaggataaccaattcaacgccgtaccggaggagggcgtacctgccccggcactggatgcccagacggtgaagtatctgctcttctgctcggacaacctgctcttcggcgtgtcggcagattacgtggtggagattattaccaaccacgccattaccaagctgcccctggtaccaaattacatccggggaatcatcaacctgcggggacagatcatcccgatcgtagacatccgcctgctgctgggacagcccagtcagagtgacaactgtatcatcattctcaacattgaggacaccttggtaggtattctggtggacactgtgcagaagatgattgatgtggatacagcactgattctgccctctccctctcaggacacccggaatctggtttccggcatgtgttctctgtccgaggaacagaccatgctggtctttgactgtcctcaaattctcaaccagccttagggcagaaagtgcaggctcctgttttgaatatgctgtttcgcgatatgtccgtttcagacgctgattttcagcgcatggtgcgctttattcaggataactacgggattgacctgagtaaaaaaaagcagttgattaccagccgtctttcccattcccttcgggagcgcgggtatccggacttctctgcctttctggaccacctgctcaaaaagcaggaccccgctgatctggagctggtactcaataagctgaccacgaattataccttttttatgcgggaacccgaccattttacctttttccgcgatgtgatactgccggagctctcccgccgccatcagaaagaccgggttctctccatctggagcgcgggctgctccagtggtgaggagccctatacgctctccatctacctgaaagagttttttgggccccaggcatcccagtgggacacccggattctggccactgacatctctcagcaggccctgtccaaggccaaggcggggcagtacaagctgcccgctgatatgcccggtgaatggctcaagcgctattttgtaaaggatgacgccacctgtctctatacggcggcgccccaactgaagcagaatgttatttttcgcacgttcaacttgatggaccccattcacttccggctgaaatttgatgtaattttctgccgcaacgtgatgatttattttgatcaggcgacccgggacgccctggtccggcgcttttacgatgccctgcatccaaccggatacctgtttatcagtcactccgaatctctggggcagacccggctgttccgaacggccgctccggcggtttatcaaaagcttccactcgggacgcaccagtaaatctcgcaaagaaaggttccggtacttatgcagaccacaaatcgaaagatccgcgttttggtcgtggacgattccgctgtggcacgcagcgtcatcatccaggggctttccgcctcaccccgcatcgaggtggtggggtatgcagtcaatgccatggatgcaaagacaaaactccagcacctctcccctgatgtaatgacgctggatgtggaaatgcccggcatcaacggcattgattttttaaagcaatttcttccgtcacatcctctccccgtcatcctcgtctcctcccttaacctgcgggtctttgatgcgctggccgcgggagcggtggactttgtgcgcaagcctgacgcggtagagagccgggaatccttcctccaggccctgacccataaaattattgtggcctcccatgccaggttatcccgtgccaacctgccccaccctgccgcccccgccgctccgctacgttttggcggcgatggggcgccggagcagaccgtcattggtctgggcgcctccacaggcggcacagaggccacgctgaacgtgctcaggcggctcccggccaacattcccggcatggtgatcgtacagcacatgccggtcgggttcaccaagatgtatgccgagcgcctcaaccgtctatgccaaatggaagtgcgtgaggctgtcaacggcgatgaaatccgccctggcctggcacttgtggcgcctgcggattatcaggccaaggttgtgcgcatgggcccgcgctacacactctcctgtattccgggcgaaaaggtgagcgggcaccggccctcggtggatgtcctcttttcctcgatggccgcctcggtccgctgccgcatggttggtatcatcatgacggggatgggccgggatggggccagcggcctgctggagatgcggaaggccggggcgtacacgatcggccaggataaggactcctgcgtagtctacggcatgccaatggtggcccatgatattggagcagtcacggttcaggcctcctgcgacaacatcgccagtgttctgatgaaccacctcaacaaccgctgatcatttcagtaaaaggaccgcttcctgtactggctgtgcaaaggcaggcgcaggaagagaagggataagtgccaaacgagtttcgtgggcccaatcaattggccagcagtctgtgtttggcgcctatcctttttcttttggattggtgaaataggttcttatatttaggggggtaaactattttttacaagggcataatgccaagtgaaaaaggttttagattttccagtggattgtaacgctctcactggtcgcgtcaatgtgggatatgagaatatccaccaccttgcgcttatcgtcaaaactcacggactcccaatcgttgaggtaattcgtgatacagtcaatttgcgtgtccgaaacggaattagcggtaaggtctgctaccagctttaactgcttttgtcgttctgtgtccagctcctcgatccggttatttgcgtattgcaggagcagcggattggccccggacaaagtgtccagaagtttctcgatctcgctttccgtctttgccagggcaacacgggcggcggtcagctttggattatagccctgttccttgccgcctttcagcgtgtgatacttccgcattttctccaccatctcgccatacacaaaggactccatgctttgcgccgtcagcgtaccggccccctcgcagctcccgttatccgcccgctgcttgcaccgcaggtaggtaacaccgttttgagctcgcagggcagtcaaagcataaccgcagcgcccacacttgattttcccggccagccaggtattatggcatttgcggccattctggaaagacgtgttctgtgacagcttgcgctggacggtcagccagagctgggaagtaatgcggccctggtgcggggcgatcacaaggatctgttcctcgccctcgcgcccttggtagagatagcagctattgtcccctgtgaacatttccggggtgctttcgattttcacgccctgggccttgaagtattcgtagatgtccatatctgcctggacatagacggggtttctcagcagtttggagataaaggcccgctggagcgccttgtcatagaccttaatggagtgtttgacaaagtaccgggttatatcgccgtaggaattgcccggctccgcgtacatttgaaacatcagctcggcaaaatccatttccgcgttttccaccagcttctttgtcttgatcccgtccataacgatgggctcggtatcaaagccgtatggcgttcggccccgcatatagtagcctttggtacaccgggaataaaaagcgtcctgcacacgcatttggatgctttcccgttccagttgggcaaatacgatacagatattgagcatcgccctgcccatcggggtagaggtatcaaatttttccgtacaggacacaaactccacattgtactgcttgaacagctccatgagctttgcaaagtccacgatggagcggctgatccgatccagcttgtagacgatcacccgcttgatgagccccagcttgatgtcctgcaaaagcctctggaagtccgggcgctcaatgttcttgccggagtaacctttatccttgtactcccggccctcaccgcctttcaattcgtaacggcaaaattcaaactgactttcaatgctgatactgtcctttttgtcaatcgactgccgcccataaatcgcgtcaattctgttatccataattagctccctttctatcagtgggagccaacctacaactatattatacctctgatgcccccatacaacaaggatgactccggcctacccccgccgcccggcatactttacaaacacatcaaacagccgccgctcgatctcacggtcacgtttgtcccgctcctgcggcgggtaaatgggggtaacattcttgacggtgatcgtccgatcaccaagaacggcagttttgaactcgctttcgtatttgacctgtgcctgcataaaatacctccctctgaaaacagtatggataaaggaaacggccagcacccacatagggcgctggccgcttgacggtatggcctctggacactttgtccagaagtcaataggggctccgctcatagtaggcgcgggcctcctccagtgtggtatagtcgaaaatctcgtggagctccatcatcacttgctgaatgtcggcgggcttgaaaccgcaccgttccatcgcggagatcacatagccccggcaggccccctcgctccacggctgagagagcagggccgccaattctggatcgtagttcatagagcgttcccctttttcataaagatataggggagcgccgcgctcattttcttgccccgtcataagacagcatcctcggcggcggcgctcccccgcagagaggggcggcggctcggagagccggacattgatccggccccgcgctatggctgttggcccccgcgtcctctttgcggagagggagaaatcctcctctcatatacctccagaaaaaagggcgaaaaggagatagcagatcagaaattttttctcaaatattttttcatgtgcgtaatgccgcttttcacagagcggcggacagcgcacttgtccacgccctcctcgcgggcgatctggcggtaggtcttgccgaggatcagataagcgtccacccggcggccctggacttccggcagggagttaagggcgttccacaacagatagaacatctccttgcgatccaggagctcctgggggctgggctcgtgaacacaggcggagtattcgatcccgtcatcacagtccagggaataataagccctgttgtagcgcacccgctccgcatgggcggcctcggcccgcttgctggccatgagcgcctcggccacttcatcggtgacttcgatatactcattggttaagtaccaagggtaatagtctttcagattgatagtagtcattatattttcctccgttcagatttttgtgggtgggagatccaaacggaggctggcggagatcgacagccggggccgccagctttgggacagcttgtcccaaggtgaggatatataaaagcgcccgtacagcatgacgctatacggacgcacgaaaatatatttctttttacatacttaaatatttcatgttcgtagccaaactgccccggtgggggaactacgctttttttagctggtgaagatcatgggtagtgtgaaaaagcaaaatgaacacgacgatccccccatggaaaccgccgtgttcctcctaaagtcatcgtataaggcggtagctttgattgatacccgccaaaaaacaaaagagccgataactcgcacccaagggctacggattatcggctctgcgtctgtgcgtctggctctttgataatagatatatgaaattgtttgacacagataagcatttcacttttgcatttgggacaaaagagtgggaaattgtcaagtatcgtgtcctttcggattttaagtcgtgttttgctcttgcacacaggacacaagagccattcaaaagactgttcttgtatagcggacattgttctctctccttgtttttgatcgtcacggtaggcccccgccaactggccacaagcagcgttaatatcggagccaaattgcgttcggatattgacgctaattcctgcattatgaatgatacggcaaaaggcctttattcgtgtgtggcttgagggcaccatagtttccgtaactgtcgtttgattgtatgggattaaatctaaatggtatagtggcaaatactttttgtgtttgaataacaacttggtaagttgctctgcgtgtctgtcgctgtcattgacatcctttagcatgatgtatgccaaaaacaccttgcgatttgtttgccgaatgtgctgatctaatgtatccagtacctgaccaagggggtatgttttagttattggcatgagcgtttccctcagacggtcagtaggtgcgtggagggaataggccagattgacttgcggatattctcttgtcaatttttgaatacccggcacgataccgatagtcgaaatggtgatgcgtcgctgggacagcccgaacagttccggggcggtcagatcatgcagggcttcaaaaacttgtggattagcgaacggctctcccattcccataaaagagatactgttgatactgcatccttgttgcataaaatataggatttggtcggtaatttcatccacagtcaagtttctgcgtaatcccaaagtccctgttgcgcaaaacttacaaccgaagccgcaaccgctttgagatgaaatgcaaaaggagttccagccctctttataaaacagacccaccgtttccacacggtttccgtccgacagttcaaacagcaccttgtcagtttgcattgatttctcatgatggatcgccttgatctccacaacagtttcaccaaactgctccaccaacttttcgcgcagcgtttttggaagcaacttcatatcttcaaaacgcataattccttgtaggaacacagcatcaagcagttgcttataacgatactcaggtaagcgcatatccgctatgagctgtttcatttttttatacttggacataattatattttctcctgcttatttaatcgcaatctttcctgtcttggttcacctcgtccataatgcgataaagtttctcgatcaagcgacaattatatttttcattcaaacgaatataaagctctctttcttccggtgataattccgcaagagcgtcaagctctgccatgcgcaatatgccaaccgtcttttcggcaaaatctctaccaaactctgtgaacgctatatttttcttattccttgttccggggatgggcgaaagaaacgccacccctttcttttgcagggcagctacggcggtgttgatagtttgcttgggaatagaccactcgctgcacaggtcatactgagagcacggcgcctctgcgtccagcagcgtatacagtaccccaagtgagctatcagagataccaatagaaaaagcaactttgtgataaagagcttcacttttattggacattttattgagttgagatagctgttcttttatctctgtcatcttaatccctccaaacatccgtactcggacacttatattgtagtccgaatacggatgtttgtcaagaggaacgacttagtatagtctttcaatatttgttcgtagctgtctttcaaaatacataattttatcattttgatatggcgaaacaaaatactacataaacataaaattacacttcgttcaaataatatcacccgaaatgtaaaataatataggggtgagatgaaaatgtaccaagatgaacgaaaacttgattttcacgcgctgggccgggaaatcaagcgcaaaagagaagccaaaggctggacacaggaatacctcgcacagcttgtagaccgcaccccgcgctctatcatgtattttgaaaacagaggacaacaccccagcctcaatactttttatcagctcgtcaccctgttggatatttccgtagatgattttttctatccagacaagcagaacggccaaagtgattgccgaaagcatatagatcacttgcttaacgaaatggacgaaaaagagctaaccattattgaagccacagcggagggactgaaaagggcccggagaacggaggatgcgtaagaaaagcgtgtacctccgttttttcatgccatgttgcggggatgcacgtttcggcaagcagggcaggtgtgcccacacctgctatttttgcgtggccgggggcccgcaaaaatgcttgttggggagctccccaaacccgctgcacctctggacaaagtgtccagaggtgcttgttatctgcggccccggcgctaccgctcctgggccttgttccgctcgtccgtgtggccgagcagacagtcgatgttccccttgaccgccacagcctcccgcatatccgcctgggccttgcggtactccgcatagagggcttttttcttttccgccagctcccgccgctgctttttcagcgcgtccatctttgggagcttcgccccatccaacagctcattgatcgccgcctttgccgcccggtagtcagccagctccgccccatgctgggccagatattttttgctgtaccgggccgccttgtaaccgtcgaatatgggccgcgtctttgcgtactgcaccaccgcccccataagctgggaagtatgggagagagcggcctccgtgtcccgcagctccccggcaagggcgtgaaagcgatccaccgccgcctcggtgctggcggccagcgcgtcatagtcggtcagaccatgctcccggagatacaggagcgcggcggccatctgctttaggttgtagaccttggcccaccgctcgtaggccgggcctttcccctgggccagacggttctgaatatcaataatgagatcaacgcgcctgggcgggggcgggccctcctggggcagctccgggatcgggcgttccccggcgatcaccgcccggatgtcctccgggtcaaagccggggcccagggtggacgagcgcaggcgcgtgggcttttcctgcccaggggccaggaatgagatcaccccgccccggccatgctttaccgcaaagccagactcctccatgagccggaggaacgccgcaaagtcggcgggccgtttccccagggcctccacgatggcaagccgcacccgctgtttggccgagggcgggcgctccccgatccattggccatagtggagaaaacggcccttgctgtggagcttcgggttttggatcacggacaggtcatgctccaggcatacccggtcagagagccgccgcagggctgccgccgatctgaaaaaatcccggaattttccggtatagtccagggtggtggaattgtagtaaatgtgattatggatgtgctggcggtctgtatgggtggcaacgaaaaaggcgtgctttccctttgtccagcgcatagccgtttcatagcctactcggtttgcctcctccggggtgatctccccaggccggaaggactgccggatctgatagcagagcacatcggcgtcccgccgctgttcccggcccgtgacagccttgtactttgcctttgccagcaggaactcggcatcggctgtgcggtggtcgcactcataggcggaaatgagctccccgtcctgggttttctccgggttttggccgtagtcgaaacggtctttcagcgattgggcgacggtttcccccttgctgatatggtgggtgatcaagcgcgttgtggccgtaggctcacctcctccagataaacgaaaagcgggcggcgggagaatccccgccgcccggcacttctggacaaagtgtccagaggtcatcagctgcacataaaatcctgcaaggcgtattttaccccatacaggcgctccagcagccactccccgatggccgggagcccaaagggggaaacaaggaacgccagcaccagcatggcgatgcacccggttttcaatccggcaaacagcccgcagaccgccagcaggacaaaggcggtacacgccagccagcagaacgcgcccgcgatgcaggagaggaacgagagcaccgccacggcgaggatcagcgccaaaacaaagggggccgcgatgattttcaaaattgtacgcatggttcatacctcctacaaaagtttgatatttgcctctatatgtatattataactccgtaagagggggcaaacaaggatggctccggctgcccccacctctggacaaagcgtccagaagccggggcagccggggagcgcaacgctccccggcaagggtcaaagctctaccaccgccgacagctttttgagcaggtcggacaacggttcccacagggtttcatagtcccgctggagggccttgatctcctccgggtaaatgccgccgtaggtattggcctggatcgccacctggtttagattattggagcaccgacgctggagcgataccagttcccggacgggcgaaaggtcaacatggagcacatagccattgagggccattttccgcacataggcccccaagttgcggacgcccgcctcggccatgcgctcccggatcagcgccagctcctcctcggacaccatcacatgaagatggacaggacggcggcgctttttctggctcaccgctcctcacgctcccggctccgataggggcggggcggttcctttaccttgtccagcggcttttcctcctccgggggctggggagagccgaacacgccgcacagccgcttcacttccaggtcagcccgatcctgttccctctgtttttccatacgcgcacctcctaacgctcgcccctgtcgggggctttcttttttggggcctccggcccctggtgctcctgggcctcccgctgggcggccttgagctgttcggcaatcggttgtttgcccttttcctgcttgtgggccttagccgctgcttgacgctccaccccacgggcgcgaatagacaactgctccggggtgacatactcttttaccacatagctgccgaagtcgggataaaaccatgtcagccgtttttgctccggggcgtggtgggcatcctcccatttgcccacgacctgggcctgggcatccatctgccgccgaatatccagattttcacgggagggccgcagctcataatcccgcatttcctgctcagtcaacggctgggcataggtgatggccccccacgcctggaacgcctcaccctgcacctgctggcggttaaaatagatgtccatgtggacaggccggttgaaatagcttttgggataggtgcccatgtcgataggccgctgggtagagtagtatttgtatgtttccttgtccggggcctgttccacctcaaacacatgatagcgccgctgatagtcctcagcccggttgtgcaagtcgcgctccgccatgtccggctcgttatggtagtggccccaaaaatagtcgcggtgtccgtcctgctcgttaaattgccatgtcacataggggttcggggccttggggtcttcccccaatacaaagccgcatttattatcaaacaggatcgtgcggcggatcacatagccttgattttcttccagaataacacctcctcttaaatgtgccatcacctctggacaaagtgtccagaagcagcggggatagatgtggaaagcattttgacaaagcgggggcgggacatagaaacatacggcccgccccaaaaccggccccggaaagccttgtgatcagcgggttttccggggcctaattttccacacatcacctccgtcttttccgcatatactcccgcttttgccgccgcagggcgatccgggcgcaggactcggagcagtaggccatgcgcccatccacggggacggccccgccgcagatggggcagggcttaaactccggcctgggcccctcagtcagcagggcggcctctagcgccgggtcaaggggcaggacggcctcccggaagtagcggcaataggcccccgtccagcatttgccgaacatataacattcgcactccagcggcaggcacccatattccttgtcatagttggcgcaccacttcaccaccagggcgcggatagcggatttttccttgcgggtcagttcgcgggccaccccatcacctcccggcaggggctttcaaaagttcccggtagcaggacacacagccgatcccccgccagtaggggcacccggagcaccgggagcccctgggcgctttggggacggagggggccaggggccggggcctctgcttcatcattttttcgtagggactattggtaaaattcatctttcctcctcctcgctgttttcctcgtcctcgtcccagggcgggccgtcgtcctcatagtcctcgccgtagtcctcctccggctcggcggcctgctgctgtttgggccggatcaccttgaaatagaacgcggccccgccgccgatcccggccaccgccaggatgagcaggagcgtccccatgctgccgcctgtttccggctcttccgcaggttcctcggtttccgcaggctccggctccaccccggcgcagtcggccatactgatggagcaaaccgggcaggccgtgtcaatggcgcccacagcgcacttttccccgcaggtgcaggccggaagctccacccccgcagctttcacagcggccagcaggtcggcctcgtccaccaggttcaggaagtaggtttcatattgttcgccctcctcgtccacgggcttgtcgtagtcaatgacgagatagaaggtggccccgccgctggtctggacggtgataaactgcttattggtgttctcgtcatagagcaggtcgcgggtcacaaagccgccctcctccgaaaagccctggcccggctctatggtaggctccggggccggggtttccattgtgggatcgccgtgattggagcccgccccgccgtccgcgtaggcataggccgggacagcggtaaatccgcataaaagaacagcggcgcagagcgccgccgtcaaagacttccatcgtttcatattcagttttcctccttttccgcaggccccgacttctggacactttgtccagaggtgccctcccggagctgctgaagcaccaggggcagctcctccaaagaaatgctcaggccccgcacgatgtccacgatctcgctgttttcggcctccagcttatttttctccagctccttgagccgggcctgctgctcgttgattttggccttgaccttttcgatctcagcctggattttttggcttttgcttgccgccatagatacctccaatcatggtaaacgcccgtaggcgtagaaatgggactgccagtaatttgtgttcaaattcgcgtagctgatgggatcgccacaatggatcatcatcccgtcccccacatagatgccacaatgggaaacgccggttgtatcataggtgccctcgaaaaagaccagatcgccggggcggggtgcgccggtgggggtgcagatgttgtaaagcccctgggcccccaggcggcccacatcccagccggagtgattgatcacccaggacacgaagccggagcagtcaaaggaagtggccggggaactgccgccccacacatagggatagcccaggtatttttccgcctcgcccaaaatggccgcaaaggtttcatcgtccagatattcctccggcacatcgtagtcggcgggcggtttcgtgtatttgtccacatacccggactccgggaacaggtcgggccggttgcccaggcaggacatatagagggcataccgggccagctcctcctcgcccataagctccaggggaaggtgggaaagggttttgttttccagcgtcacatagcagatataccaggaatagggatcgccctcgctgtcgtaccgggtttcccgcaccacacgctccgtcagaatatactggcggtcaaaaagcatttgcaaagtgccctgcacctgggcaagcgtccattccccctcgtggagcacagagaggatggagatgagcacatagggatcgtgctcaatggtgtccaggtcaaagtggtactcgtcataatcgtgggtgctttcgtaggtgtccaggtagttttgcagctccgcctccatatctgcataggcggcctcggcccccaaaatatcctcgtcctttgaggggtaagtggtagcgcccacggcacccgcgccggagttacccagcatcaccagggaggacgaacaggactgcatgataaagagcaggagcagacaggccagggccaggagcacccccacgggatgccgcttgataaagcctaccgcctgggccccggccttttccgtggcggcggcggtctttttcgccgcctttgccgccccagccctggcggtctgccgcgcctgcttgcggtattgccgtttctgccaaaactgtttccaggcattttgcctcagctccgggttctcctgggcggccacgcggaaatgatgatccgccgtagccttgatatatttggactccgcccgctggacagcctttgccgggtgttcccggattttcttcttaacgaaccgggagccatgccgcagggcggtttcacccgccagctcggagcggtgggccccctcggtgcccacgttctcctgctccacctcaaagagctttccatgcacaaagccgtggacggcgccgccggcggcccggcccacccgcctcaccgggccgggctttttgggcggcttttgtttggacagcttatcctttgcctgttccagcttctccccgcgcttttccatgcggagctttgacgaggcggcctgttcctggttgcttttctgccggaactttgacttctggacattttgtccagaggtagcctccgtcctggccccgtcaggggagccctccggcgcgtcctgccggggagccgcctccgggctgggtttattcggttttcgcttcattcttcaaatcctccgggcgggtggtgagcaggttatatatctcccccttggggaaacggtcaacaaaggggatggtcacatccccatagaacagcaggccctcgccggaattagagtgggtgatgtaggaaagctggtgctcggaaatgccgagctgctttgccaaaatcgcccggtcactttgggcctgggccagcaggatcataaaatcggtgttgtccagaatggcctcgatctcccggctggccaataagtctttgacgttctgcgttaaagccgaggggacgcagccctttttgcgaagcatcttccacacggctacaaagtagctggcggtgagggcgtcccggagcaaaatatgaaactcgtcaaagtagcaccaggtagaaataccgctgtggaaattcacgttgaccgccgaagttacaaaatcattggtgatgtgcatggcgatcttccgcaggttttctcccagccctttcagcacgatacacaccacgcgggcggtcaagtccacgtttgtcaaatggttgaacaggttgagggagccggtgcagtagagctccagggcggtcgctacccgccgggcctccggctccggctgtttcagaagttcctcgtacaagtcctggagcaagggcggcttgccgtccccgatccccagggccatatcccggtagatgagccgtacacagcggtcgatcaccgtcttttcgataggctgcaaaccatccttaccgcccaccaccagctcgcacagggacaacaaaaaatccgctttcatggaaagcgggctctcgtcctcgtccatatccagccggatgtccatagggttgatatggctgggggagccgggggcgatctcaatgacctgcccgcccagccgccgcaccagcggggcatattcgcccatagggtctacgatcagaatcctgtcctgggggatggtgaggaacacgtttagaagctcccgttttgctgcaaaggatttccctgatccggtggagccgaggtacaggccgttggcggatttcagcttttttcggtcagccatgatgacattgtgggaaagggcgttcatcccgtaatagagggagggccccgccatccgcagctcccgcgtcataaagggaatgaagatggccgtggagctggttgtcatgccccgctggatttccacctcgttatagcccagggccagggaggacacgaagccctgctcctgctgccagtccagccgcttcaaggcgcagttatatttctgtgcgatgccgcccactgtaaaaatatcgttttccaaccgttggcgggtgggggcgatattgatcaccgtgaacgtcaagaggaacatccgctcgttgcgggattgcagatcggccagcagctccgctgcgtctttggaaaaggtaatgagatcgggtggcaggatgtcgggatcatatccggcccgcaccgccttgcgctgttcctccactttcatttttccaatgtcggacagcttgccttttaccgttttaatagccttgagctgatccaccgtctgaatgtgcatagtcacagtcagctctgcgtccagttccaggatctccgccaggagcttgtcagagagctccgaagccatgatctgcaaataggaggccgcgccccaatactggcccacccggaacaggcgggactgcctaaagtcgaagctgtccggggcgatatagtcctttgtccccatccctgttttgggaatatcctgccaggagaagcggaacggctcccggttcccagggtgcatctggctgtgaagcagggccagccgcgcccgcccgtccaggggctccgagggcacccccagccgtttgaggttgcctgtcacatcggcctccacgcgctccagccggggccgggcctccccgatcccctcggcggggagcccaaaggtgatatatttggaacgctcgatcccgttgttcgaccgggcgatctgatttttcagcatccccgtgaactcgccccggacactgttgaagctgtcctccgcctgggggatattcacccggtatttgttccgggagcgggagcggcggttgataaaggagagctggaacggcaaagaggtatcaaagtaattgaggaatgagctccagccgccaaagatggccgtctgatcctcggtgcttgccacggaataattgatgtcctcatactccaccgtttttgtgtaaagcccgccggggagctgacataccccgtccgggtgcatcaccagataagggatcgtctgctgggcggacaaaacagctttccggtcagcggcctttccggagccgcgcttttgattttctgctttttgcaatcgcatcctcctttcccacagcgccccgatgggtgaacggggcatagatgttttctgttcggtagggcctcaccccaggccgcaggaaacgggcccggatgatgtttcgcaccaccttttcaagcgggagcccgtctttctcatacatcgccagcaaaaaggccgggagcgccaccgccatcataagaaacatggccccggtgttgccgatagagctccgggccagcaggtaggacgggacgcccaccgccgccgcgatgccgaagcacacaagctggcgtttcgtcagattaaaggcaagtttggttttgacctttgatagatcgttgggaacattcacatagggaattttgatcactcctttccggcccggctacctctggacaaagtgtccagaagtacgggtaattttaacgcagggcctccgcgatcccagccatgatatactccgcgcagggcagggcgatggcgttgcccagggccctgtaccgctgggacgcgctgatctccccgccgtcggccccgtacttcgtccacccctccggcaagcccatgagccgctcacattccagctccgtgggaaaacgaatacagccgcccgccggatcgtcctcgtaccaaaaggcaaacggtgtcacagtaccggctaacagagtgggaaaagggtctgctggaaatccgaagctgttttggaacgctgtttgttccccctccttggcagccccccgcatacggaacccttgaaagggtcttgtgatgggtacgcgcccccctgtttcaagaacagggcctcgatctccgccgggggcgggcagcccgcccgctgtgcaaggcgcaggaagtgggagcattgggcggggcttaaacaatatttcgggagcacgccgccctccaaagtctgccacaagaaagacgcgctggcgtcgggccagccggggccttgcccagtgctgggcatccaagagccgccatgcgagatcggggcatccccctcgcaccattccggcgcttgcccatcttcccgaagcaggcattggaatttcggtgtctgtgaaagcggataggacggctctaaagtccatccggtcatttgaagaaaacgctcccatgacgttttcccaaatagagataactggatatagatcattggtggcctttctcatttcttgaatgatacggatcgcgtgaaagaacaggccggatttagccccggcaaggccggtgcgattaccgatctgcgagaggttttgacagggggagccaaaggtcagcacatggacgggcgggatggccccgccgtccagtttggtgatgtcccccaggtgggccatatccgggaaatgccgctgggtgatggagatcggggcggcctcgatctcacttgcccacaggggacggatgccgcaccgcgacgccgccagagggaaaacgccgatgccgtcaaacaggctccccaaagtgagcccattcacaagacctccttttggcccgctgcttctggacactttgtccagaagtccgggatcgtgggctccacctcgttgccccatacatcccagccgggcggggactgcctggcgaacagctccaccctgggcaggtcgcccatgagagccacgatcttttcacgggcctcctccggtttgcggctgtgttcccggataggggaaatgataaactgatggacattcgccgcttgccgtttggggtgtccccgtgtcgccagcaggcagacctccgcgttgccccgcgtccaaaagcccaggccgtaaaaccagccgggggacttgcggttttgtttgagccagacaaaagccacagatttataggtgaagccccacgcctggatcagccgcagggcctccgggagctgcgggaacgtggcccacagaaaaagcgcgctgtccttggccgcaaggtcggccacaggcaacgcgcatagttccgatatgctcatggtggggtaatggttttccgccgccccctgtatcttttttgctgtgtagcgccagggtggatcggcataaatgatagaatagcgtccgatagtcaaactcctttctccccggactctaccgccgaacgcgccacacggatgcgctcactggcggcagcgtagtaggccgggacggtttcaaaacaaataaagcggcggcccgtgttgagggcggccaccgccgttgtgccggagcccgcgcagatgtccgccaccacctcgccgggccgggtgtaggttttaataaaatactcgcacagttccacgggcttttgggtggggtggatggtgcgctgcaccgtggggaatgtgagcacattccccggaaaacgaagcccgtcctccgagcccccggatgagcggacaaactttccatagttcgggctgtccccgttgtttttcacattccgcttgtaaggcttgccctgttcaaactgcggattgtaaaggggaagtttctgatagaacaccaggatattctccgtctttttcagcggggcccgccttgcgttgagaaaacctgtgcagcggctcttgtaccacacccactcatagcggagcatagggaggttggaggcccccagcaccttatcataggggcactgagcgaagaacagcaccgccccctccggcttgacagcccatttcaccgcctcccacagctccgggagggacagcggcacatcccaaaagttccgggtagtgccgtagggcggatcggtcagcagcatatccaccgaatgacggggcagcgcccgcagccccgcgatgccgtcttgcaggaacaggccctcctgggacttctggacactttgtccagaggtatcgaatatcgttttttccattgaagcacctcccgtcaatgcgccccgaagatgcgctgggcgatgccgcccgtcttaaacagcataaagcagagtaaaaccgtgtagcccacaatgccccaaatggccccaatggggtcgccgctggtggcgatcccctggacaagcaccgcgtaaatggcaacgcacaccagaatgagcatcccttgaaagccgacagcgaacagggagcgcagataattctggcccgtttgccccacctcccgatgggccagggtagccatagggataggggccaagctggtcagcaaatagatttccagcatcctgccatagaccaacacaaaaatgacaatgcccagcgcccacatggtcacaccgataatggaggactggagccacaggccgagaagcggccccaagtccatgccctccagggtggtttccagctccgccagcatatccggcgtgatgtccgtggagccctggatgagcccgcccgcctgggcgatcacggactgcgacacatcgaacaccgccatcacgatatgaaaggtgttggacagaatgagaatggcacaagccgtcttgaacatccatttatagatattcgccacatcaaactcgtgcatattgtttttttccaaaagcatctgaatcagctcataggtggcaacaaaggtcagcaccatcccggcgatgggtaagatcaccgtttcggaaagctggcgtataagggagaaaaccccggcgttccacgccgccggggtagtccccacttgtaccgcgatctccccgacctgggcgttgacgtaatcggtgagcccctccaggtttcccatgatcccgccaatcagcagctctttgagccagtccgtgagccagtcggtgagaaaatccataatccctccttagaacaaaccagacagcagggggatcagcgtggtgcccaaaaggataatgccgcctccggccatgagctgcttcatgccctggcttttggagccaggattatccgatccgtagccctccagcaaattcaccacgccccacacgccaagaccagcgccgagggcaacaacgagggtctgcaaagtatcgatcgcggaagaaaaaaactgcatagagcctccatttctccggggatattcccggcctcgtcaccgcaaacttcatatcattcctttccgcgcaagcgcgaaaagtcattcattccgttgcggttcctcttcccacaaaatctttgattttgcgggaaccctaataaataagccgccatctctggcggcaggttacgacctctggacactttgtccagaagtaggatttatacataggcatccgggtcatccacatcgtcatagttgaggatgtcctcgtcctcgcctatgggccctgtgtctgtcccgtctgcctcgtacacctcacaagcctcgttcagcccaggccgcctgcggcggttgatgagcttatcaagggaaaaggcgtttttcacttgatcggcctcagccgtatatttgtagttcgggtgctgcttcaaatcgtactttggggaatagaacgggggcaggccccggagctgcaaaatgcacctgtcgccgggcatggtagcaagctcggcgggggtcatcagctcccggccaagtcgctgggtgttgaggttgtagctttccgactggcctttggagcgcccgtccgtctgcatatagatcgtggacttccccagccagttttccgaaatctccttaatggtggaactttccctgccgcccaggaaaacaacgctgtccatatttcccatgatcgtttccgcgtgtttgtcataaatggccttgcactgtgccatctgttggtaaaagagcgtcagcgatatttcacgggagcggataacggccaccagcttttccagattgggcacctgccctgtattggccgcctcgtcccacagcacccgcacatgatggggcaggcggcccccgtgaacattgtccgccctctcgcacagcagattgaacatctgcgaaaaggccagagctacaagaaagttgtaggttggcgtggtatcggaaatggtgaagaaaaccgccgttttccgatccccgatgcggtcaagggccagctcgtcatagctcatgatctcccggagctgggggatgtcaaagggggccagccgggagccgcaggagatcaaaatgcttttggccgtcttgccgctggctaatttgtattttttgtactgcttcaccgcaaagcaatccggtttgcgcttttccagccccttgaacatataatccaccgcgttcataaagttttcgttgtcctctttgacctccatgccggagatcatatccaccagggtattcatattccgatcctcggcggggccctcgaaaatgatataggcgatgagggcgcaatacaaaagcgtttccgccttcgtccaaaatgggtcgccctctttgccctcgcctttggtattggctatgagggtatcgacaaactttaggatgtcggcctcgctgcggatatacgacagagggttatagtgcatactttgggaaaaatcaatggaattgaacaccttgatccgatagccccgccgttgcaggaaagcccccacctgggagagcaccccgccttttggatcgaccaccacaaagctgcacccgccctttttctttgcgctggcctggagaagctgcggggtgagccaaaaccgtgttttgccggagccggacgaaccgatcacacaggcgttaagattgcgggcgttggccgggttttgggggcgagtgttcatggtgagaagctccgtcccggtgagaatgacattgttttcaaagacaggatcgacgaaaggggctatatctttcggacagccccagcgggctgatccgtactcctcatcccgccgaaattttttggcgttcttgctttttacatagatcagcagccggaagcccaccgcgcccacaatgccgatgagccagtcaaagggatcaagccccggcgcgagatcggcaaaggccgggcctaccgtctgccccaggcccatgagcttatggggtaaatccgcgccggcggccagccggtaggccgtccccagcttcaagcaggcccacagcacaaacaaataggggatgtttggtatcacatatttttttacgctatctgtcctcatgcaccgcctcctttgtgcgttccagcttttgggcgggctggcgggccgcttctgcggcggcctccttgatctgctcccggatgggggcctttgcggatttggtgcgctttagcagccgtttggaatattcggagaaacaggctgtgatcgcgtcggcctgccccgccttgaagaacagtaagtgtttatccggcgcgacttgataaaaggcatagtccacattccatttccgggccacccggtcaaagagggccggggcctccacctcgatactgttggtggcggccccgtggcccatgagctgccccaccgtctgcctgccgtggggcgtctgttttgcccggtggtgtttggcgatcttccgggcaatcgctcccagcacacaggcaagcccccgcgccgtgagcttgcttgccttgatagataccgctatggttcgcctggaaatatcttcatctaccagccaaatccctccttcccatgaaaaaagcacctctggacaaagtgtccaggagtgccgctatcggtctgaatggccttgctccgggttggggcgctccgccgcctgggggaaacggccaatgacttctttgtaagccgccatctgctcccggatggagagccgcgggtaagcaaaaaccttgtgttcggcgggaatgtcctcccgcccgtggtagtattcaataaactggctgccattggggaggaaaaaaccacctttgacaaagctgccatcctcattgatccgcatatcccggccatacgcctcataatcgaaataatcccgcaggttttcgggaatgtcgatcatctccatgtcctccgcgtaaatacggcccagggtttcatcatcggacacgccgatatagaaatcgtagcaatccaggttttccgcaaggttgataaggtcgcccgcgccggaggtgtgctcgccgctggcgacagccgcctcaaacttctccaaatcgcttttgtccagctcggagagcaggcaggccagatggttgagctcgtcaatgctttcgtattccccaggcaggcattgagttccggcaggtcgccgccatagtcggcaataaaaatctcctcatagcggatattgtcaatgccgatttgttttaggacttcctgtacctcctccctggtggtggggaatttcagaagtgagcttgccagttcgccctcgttgtatttcccaagattggtgacatacgcctcgatcaccgccatatcagcgtcgcctctggcccttgacagtgaggatgccgtccagggtggtggcggtgatcccaagccgctgggccaccgcgatgtcatttttcaccgcttcatcgacatggctcccgcatactaccagcacacgggagcgccggagcaggtcgcgccccatgtcaataccgcttttatgctcctccggcaccgcgtcattgaggaacagcggcagatagagcatcgggcagatgggggaataccccgcatcgtagacaatacggcaatatttagccgcctgctccataacctcgcactcgccgccgcgccatgcggcggtcacatacgcaaggggtcgtttcataatccaaacctccgtttcttttccttatatataggtagggtcaaccctatcccccgccctttccctatccagggaaagggggcggctctggaggatatacccccgccgctcgccgggaatagcacagccggggcagaccgtaaagggcaagccgccgcaaaagcggcgggcgttccgccccttgacggcccactcccggctgtgcggcgtcaaacccggcgacgggggatatatcaccgcagagcccatcccaagcgcggagcgcatacctctggacaaagtgtccagaagcagggggccggtcacttgtcgagctcgttcttcttctccggctttgccagttcgggcggctgcttctctttccactcgtccagcagggccatgatctgttctttcattttggcaggagtgatttccttgccgaaatacttgttgagttcgtcggtactgatgatcacgttgtcaacctcccttttttcttcgcttaaaatgccgtcgatcacatctccgttgagcaggccctcctggtcgagctcccggagccgctttgcctgtttgaccgagggggaggactgctccccatcaatagacacggcgatgagccgctggttttccggcttgatatacgacagctccacggcgggcataaagcccatattttttgtgtctaccttttccagaagctccggcacaagatggttgagccggacataacggagcacctttttatagttcatatcatgctccttgcccacgatctccaccgagagcttacccagggcctccgcctcctggtcatttttgggccgggccccctggcgcttgatggcctccagctccaaatccaggagttttgccaattcgctggggagagggtcgccccgctgcttgttgctgttcttcatttcccggacagcctcaaggtcggtcatctcacggacaatacaggggatctcgtccaggccagcccgctcaccgccatgacagcggcgatgtcccgcgatgatctcatagcccttgccgtccttttccgggcggacggtggccggggtcataatgccgtgttccctgatcgtccccaccagatcgtccatcgccttatcgtcctgcaccttgaatgggtgatcccgtaaagtatggaatgggtgaagctccgacagcttcaaatagacgattttgccctgttccaccgggcggggaggcacctccggcgtgggcggcagcttgatctccggggtaggggcctctgcctccttgaccggggcgggcttgccctttgggactttcacaccgggcccaacacccccggaacctgtttccttgtccttttttccacctctggacactttgtccagaacaccgggggccggggacttgccaagggccgccttgtcagccttggccgggcggcccttgcggggctccggccccttttccgctttgccgccctgggggtgatcctgttcctttgggggacggccccggcgctttgccgttttttcctccggctccacttttttatcctggttgagggatttccccgtcttttcagcctcgacctgcggcgcaggctgggctggagcgtccttgcccataccggggatcacagactgctccggctggggtgccgggccggtgccagcagcgggcccctctacctcttccgggacagggggctttgttacagcctgggcgtccccagcagggcccccgccagggtgatccaggacaggggactccgggcctgttttcagtttgtcatctgccattcgctaacctccttattttgaaatgaaaaaagccagacctcccggcctggctaactaaaaaactttccctcctttctctgtccggcccataaaaaaacgtcgcttttcacaaagaaatagcgacgttttagtgtaggttggctcggttttgttgtgttttatgattatacccttgtataaaaacctaatctatcatgaggagcatcaaacaaaagctcttggtccgcattttggcaatgaccgcagcagcggccctgatttgcggcggcgtaggaattgcagccaactacatcagctcccattcgatgctggagcaaagcctggagtccaccgcctccctcgccgccacccgtgtttcctatgagctgttgtcctatcaaaacgcggttcgcggcctgggtatggttccagagctcagcgacggcgccgttcccgtcactgaaaaggagcggattgtagaccactgggctcagtcttatggtatgaagcgcggcaatttgctggatttgtcgggcaggagcctgtttgacggaaacagctactccgaacgcgcgtatttccagcaggcggctcagggggaggtctgtatctccgtgccaaccctgagcaaagttacaggggaattgtccatcatggtggccgcgcctgtctggttgaacggcatagagggcggcactgtcgccggtgtagtctactttgtgccccatgaaaccttcctcaatgacatcatggagtccattcatatcagcgaaaacagcggcgcgtacatgattgactccactggtacgacgattgcggacaccacgctggacacagtatcggttcagaacattgagcaggaggcccaacaggattcctccctctccgccctggcggcgctacacgcggacatgcgggcggggaacagcggctatggcagctatgagataagcggcgcccagaaatatctggcctacgccccggttccccagaccgacggctggaccgtcgctgtcaccgcgcccgttaaggattttctgggcaccacctatacaagcacacttctgaccgccattcttttaattgtcatcctggtcattgccatcctcctggcggttcgaatggcgggcgagatcggcaatccgatccgggcctgcgccgagcgccttcagcttctggagcagggagacctgtcctcccctgtccccacttacgagcgcagagatgagatcggtgtcctttcgctcactacccggcagatcaccacgcggcttcaggagctgatcggtgatattggctacctgttgggggagatggccgacgggaactttgatgtccgttcgagggattatgacctctaccagggcgactatacgaatatcctggcctccgtgcgcaacatcaaccgcaacctcagtcacacgcttcagcaaatcaatctggccgcggaccaggtttccgccggcgccgagcaggtatcctccggcgcgcaggcgctcgcacagggcgccacggagcaggccagcgcggtggaggagctctccgctaccatatccgagatcgacagcacagcccgggaaaatgccgaggcctccacccaggtcaaggaaaagtccggcctggctggcgaaaaggtgactgtgagccatgaaaagatgtctgcgctgacggatgccatgtccgatattctgaaggggcaccaggagatcagccaaatcattgaaacaattgaaaacattgcgtttcagacgaatatcctggctctgaatgccgcggtggaggccgcccgggccggctccagcggaaagggcttcgcagtcgtggccgacgaagtgcgcaatctggccgccaaatcggaccacgccgccaagcagaccaaggagatgatcgagcgctccaccaaaaatgtggagcggggcggccagttgactggggaggtcagcgcggttctggaagagaccacccgtctggttcaggataccgtcgctttcattgaccgggtggccggcaacattgtctcggaggcccactccattgaccaggtatccgagggcgttgaccagatctccagtgtggtacagacgaattccgccacagcagaggagagcgctgcggccagcgaggagctctcggggcaggctcagctgctaaaggagctgaccgggggattcaccttccgcaaggacgataccggtactgctcagcctccgcagtaaccatatgggaccttccgccgtaaagcagacttcccaaagcccaggcgtccccgcaacaaaaaagctgcatggaattgaattccatgcagcttttttgttgcctattttcttatccgtgcagtgaacagccgttcagcgctccgttttcccttgctgttcccccaccatgtgccggtatgccttcatccgcgcttcgctgatccgtccggcacagaccggacagccgcactttcgttttccagccctggagtagacgaccgccttccacacatgtccctccgggcactgccaccagacctttctccggctcccagccgtcaccattctgggcgtcaactggccgttcagcgtcgggtgccactgggcggcgaccttcggctccacggtctccaggtcgttaaagccgggccagaccttccgcccggcgcagaagggacaccccgccccctccctgctcctggaggtcaccgtggctttccacgcgtggcccaggggacagagccaccagacctttcgattgctgttgggtgagacattctccggcctcagggcgccgtttttgtccggatgccattgagcggccagttggggaaactggctggccaaatcgttttctcccggaatgatctgcttgccggcacagaccgggcagccgtttcccagactggttcgtgacagcacactggcctgccattcatggcctttgtcgcagcgccaccataccttgcgtctggtaccagccgtaaggtctccgggggtcaggcttccgttccgggttggatgccactgggcggccagctcagggcgcagggttgccaggtcgttttccccttccgccagcttacggttggcgcagaccggacagccgcagccgtttacccttgtctttacctccgcctgccactcatggcccttctcgcagcgccaccacaccttccggtggctgccggggagcacctcgctcggggtgagcgctccgtttctggtcgggtgccactgggcggccagctccggccatagcgtggcaaaatccgtctctcccggccacgccatgacgcccctgcaaaaggggcagcctgtgtggttgctggtcctgctcgtcacttctgcctgccactcatggcctttcccacagcgccaccacaccttctttttacttccatagctcaccgtctcaggggtaagcgctccgtttcgctcagaattccactgccggagcagctccagctccccggttcgtttacagtagtcgaacagtgtttcgcgcatggtgtactcctccgttagcgcggcagcgggcaaagggagtgaaaacggtttccgcagaagccgccccgccgccgcgggcgtccccggccgttgcccaggcgcccaccgcctcagccgcccttaacgtggcgggcaacccgcttgtcctcggtgcggatatgtgtaatcagtgtgcccaccagagtgttgagggtatgcagggatttcacactgggcccctccgcgccgatctggttggccgccgcagccaattcgcgcttatacccctcgtggaaggtgtggtgggcgttgtagccggggtatttgctttgaagctggagctgctcctcatcgcggaaatgcttgctgacatagctgttcagaaactgcacggtttcactgatcttggtgcgtccggccccctgggcacaggcgtccatcagggcgttgatggcgtcaaaaagctgtctgtgctcactgtcaatcaactggttgccggtcagcaggtcctgagtcaattcataacgcataggtacaatcttcctttccagtaaatcaaatccatataggactagaggatattctctatatttttaaatcgtccatccgtttcaaaaattaaccccttccagacaaattccgctgttccaaaaattttttcaaaaaggacttaataattccagcgttgcaccgatcaaacagatagtgcaacgcactggagggcggcgtcctcagtccaaaccgccgccctccctcctccaaatttcaaacaggctgtcccgggcggggctgccctgtctgaaatagattccgggtctgcgcggcctgcccggccggctacgggctgcgccacccaccacccctgcggcccgggaggaaggaacctcccggagaacaatgttaaggagagtaagacatcatgcgtattcagcacaatattatggcgatgaacgcctaccgcaactacaccaacaacacctccgccctgtccaagaacctggagaagctgtcctccggctacaagatcaaccgcgccggtgac

SEQ ID NO: 4247 - DNA, 30580 bp, Unknown
  gut microbiota DNA sequence
cattggcggaaaaggccaaagccgccatcaaagcggcgctggcggacgagagcagcccctaccacgacctcgtgacctttttcatgcagttccaccgggacgatgtaggctctgatatcgcggctgatctttttccgggaaccgatccggccaagctgtcctttatcgagatggtggactttttgcggctcaagcgttttggcagcttggtggatggcgaaaccggccagcaagcctttattctggacctgtctttcaacccggaaatcaccgacgagctgatggtggtctactttgacttgaacaaggagattttctgcattacccatgagagctgatgaaagaaaaagggcggaacacttgcccacgcttttgatccagcagatccgcctgcaatggtataaagactgtcgggggggaaacgacgctgtgcaaaggaaccagtatcccagagcaatgcgtctgccgaaggcagggaagcattttttgccaccgatggcagcggccaaagcatgattgtcctgtttgcgcccgaaggctgcgtcatcaacggtgtggactccgagctctacgactgggaggaaaaactcccccgaatcgaagacctgaccgacgggatgccgaccgctttgcaaaagctcatgaccagccatgaggtcaagaagatgaaaagcaccttctgcgtctggacggaagatggcatcgcctggcactgcaatccgatggacggcgaggatgcgtccagggatctgctctccagaatcgacggcgaggcacagacctatgtggagtacgggaagtggcttcccgttgacctgcctttggaagctgtgcgccggcttgcggacggggcgccggtgacaaaggaactggtcgccgcgctgaaccccaggcgcagcgagtgggaggaaatcaaggcgggactggataagatcggctatccaaatgaactttgatctgtagtagacaggagatggttcgaatgatcaaagaaggcaccctaatctccggcgacctcaaaagcaaggtcaagcagctgatggagtacgccgggtggtacgaagggcgaaaagttgacatctccattgcggagcagtattacgccgatcatggcgtcccgatgatgaagaccgtccagcggttttaccgcaagtatttcggcctgtgctgtgagtggtacctggagcagaaaaagatgaactgagcggctgactttgaatttgctttgtttccttacctggttaacgggatcaaagaccatttggaggacgcctattttcgggacatgtccggctgtgagctggcggagatcgaacaggccgccggtgagcggtgtcagcctatcggtcatatcggctactactacccggcagaggtttggatctccgagtacgggaaactgtatgcgaaatatgagtatcaggatgagattgaatgctttcccgatgtgttcgccctgattgagcacgatttgcggcagtgtaaatttaattccgctgccatgaaaaccgtggaggcgctggatgggaagcaatgagaaatcaatcgcaagcaaaactagaggaaatagctatggattatttgaaaatactgcgtgaaaatcctaatttggcagaggaatttgattcgctttttgacttcttcctgctggatgagttgtccccgagggatgaggcggacggtcgagcaaccttcacactgcccggcatggcatttgccagagatggctccggcggagaataccacttgttggaagatggctccatcggctattacagcagcgaaggtgagacaggccgtctggctgagagcatggacgatctcttttccctgcttgtgagctgtatctgctggcatgactgctgtgatacaaagcagtatgtggattccaaaacactggaggaatatgggcagaggcagcgtaactgtaacttggaagatatggataggggcagcttgcggcgggtgtctgatgtgctcggtatccctaccggtgaggcgctggctcctgttctggagaggttccgcaaagcaacacagcgccagcccctgtatcagtgtattttccatgaggacgacggaagcctgaccaaatcatacggtttgatgtttgaatgagaaaggagcaatcacgatgaaagcatttgacccggattataagctgttggacgagatgtatcaggatgattactatcctgcttttctggtagacagggtaaaggacgagctccagaaggtcatcgacttgctggaaagcggcgaaaccgacaccgaagtgatacaggaaacgctggatgaggcagtctgcggcatcaatgatcttcaggaggagtttgacgagaacgacagcgagatcgaaacggtggcccgtgattgcatcggcgttaccgtggcctacattctggagtggttcaatatccccattgacaccgaggaggccatccgggaaagggactggtgatacccgtggcaaaaaaagaactggccgtttgtgatgagtgcggcagcctgtttttcaaaggctcttcacagatgatgggactgtgcccggaatgtgcccatattctctatggctatccgaattgtccccatcattttcagaatggccagtgtgtgaactgctactgggacggctcaaagagcgggtacataaaggaactgaatcaacaggaggaagctgatatgcctacgaccgaatggctgaacaaatacgaatccaccaaggacaaactggcctgcaaagctgacctggaggcccattttacagaaaaaatgattgggaacatggcggtggatgtgctggacatcggccccgtccatttccccaccgggcagatcttcgcctgcgatccgctggtggagctggaggacacgccgccctttatacagacaatccccgccgggacttacccagtaaaaatctgcgtggtacccagtgaacaatacggcgaccgctacgcctgtgtcaaggtggaggtcagccaggagaagcctgtccgctatgagttgggcatgacaggcaaagaggatctggaggaggaactgggcgaggacgattattttggctttggcgtagacgccgggatggggtgcattgcggacatccaaacccaggcagcctttaagaggtactgggccaagcggctggaggaagacccggacatcgacccctacaacgacctgttctgcgacttgatggaggaaaacgccaaagcccatcccaagtatcaggagagccacggcgactggctcaactggacgataccgggcacggactgcaacctgcctgtcttctcctccggctggggtgatggctactatcccgtctacttcggctatggcgcaaagggcgaaatttgcgccgtgtatgtgcggttcatcgacatcgaagcctgctacaaggagcaggcgtaaggaggcaagcgatggaatggccaaaacgggcgcggacagcagcatgggaaagcggtgtcctgaccctggatggagaaaaacagtttgagatcccggagctgaccatgaatctaatagagcgactggctggctacaccctggtggggttccatgtgaaggactaccctgtatcggatgaactgcttgcagcctttgccggacataaaagcatggtcaactttggtgtggaaaacgccgccctcaccgacgcctgttttcccattttttctgccatgcccaagctgcgctatctgctgctggacggcaacgccgccatccacggcagcggcctgtccgccctgcaaaactgcaagctggatcttttgaccctcaaccgcaccgggctggacgacggcgggctgctccaggcagccgccatccccaagctctcccacatccagatcgaccataccgcaattacctatgatggtctgctggccgtcgccgggaacagccggatcgagccggtggcccatgagcaattcactaaggagcagatggaacacttcttccatatccagcgggagaaggccaaaaagcccactgtgctggacgagcaggcggcggaggaatgccgcagggtgttgtccgctttctttgccgagatgacagaatgggagcaatatatggagcaggccggatttgaggactccgaagctgcgccccgccttctggcgatctgggagaggtatgtgagcgaaaagccccgtccgggctaccggccgttggcactctcttacagcgcccagggaacctacaagggggaagggttcctggacgcggagcagatcaccaagaacaagctctacatctacaccagagaggaaaacaccggctttgaccgtcgcttcctcatgaagcgtgtggacgggagctggaagatcgacgcggtgcaggagcggctggacggctggcagcgcgtgggattgtgagggatacgaaatgacatggaaatttgaaacatccggtttcgatgggcagtgtacgttgtttggcgtaaatatctttcaataccgctggcgcgactgccgggaaacagcggcggtcatcgatccccattacggcacggaaaaagtgtttcatgtctatgaggtggagatcaacgggcagatccaccgctttgccgccggggagttctccaactgcgtgtggggattctacctggaaaagaacggatgagaggattgctgccccatgaaagctagcgccggatcggtctatacggtctacaaccaatacctgaaacgctacaccgcctgtcaggtggcctatattgcaccgccggacacggtgagcaaggagtcctgggcggtgatcctctctctggattgggtgggcgacgcccctctgaccgcggaggaactgccccatctccgcccgctctacaaggacttcatgtactggccccgtgaacttcacctgctgcgggtgccggtggaaatcccgccacagtacacgctggtgggtatcctgccatccttcgccgatgagccctgccactcctacggtcgctgggatgacggctatgaggtgtaccgtcagatcaagtggcaggagatcccggaggagcggcggcgggccttcaaggaggccatagagagcgacggggaaacggagattggcggtatcccggtgaaggtcagcagccatcggctgatggacaaatatctaccctttggctcagcgcgggaactggaggcgctgccctgcctctccgacctcatctgcgagcggtggcacccggatctgctggagtttctgcgggaaaaccccttccttgatgaactgactttactgagccacggtcagagggaacttgatctgcggggcaccagcgtcagaaagctgatgctggacatgactggcctggaggaactgtggcttggcgaggagacggagcagctcctgttccagaacaaggggccggacgcctgcaccatccatgccgccggaaatggcagcggtttaaccctccaatttatcggggaataccgcccccacccggatctgccgaacctgtggggactgcatggtatccggctggaagagtttgacctgaccggcttgcccgttgttcatcccagcctgaaggagctgcggctctggggcgcaccgggaaacctgagaaatttctccgctgtggcacagttccgagaactgacggacctctccaccttcgacctgttcggcttcgacgcggccgacatcccaaccccggagcagatgccaaagcttcactggttctggatgaccagcctgccggagtacgctgcaaaagcggcaaaacagctctggaaaggcaagccagacatggatctgcgaatcgccaagccccggaaaccggagtggctggcgcaaaatctggacaaccccttccggggctgggatggcgcggggcatatccccgccagtgccgcgaaaaaggcagccgatcaataccgcaagactcgttctcagatgatgaagctggccgctgagccggacggggacgcccagacccaggcgctggaggcggtggcaacctacacccagaccttcaataagatgcgctttatcgaaaccgaggagcgggatgaaatttatatggccctgcggggtatcctggatgccctgccgggagatacgctccagaaagatgccctgatcaaacagtttgagcagctacgagatttttgaggatatgaattgatgagccgaatggttgatgaaccctattttacatatagtacctacagcgccctgacctccggcatccaggtgaaatgcccaaaatgcaacggtgcaggtattgtgacagcggacgatgaaaatgcttatttccgatgcctgagctgcggccatcaagaaacccgcgaccggacggtctaccgctacgatgtacataaccaatgtaggaactgtggcaggtgctatcgggtagacattgaagatgaggcaaagcagcacttttccgttctccatgtggcctgtccctattgcgggacgaccatgtcgggcgaggtacacaagacggcggaggctttctcctatgccgctgagatcaaggacggaaaggagccctggtttggtctggaactgtggttcctgacctcctttcaaggcaagccggtctggtctctcaaccgggaacatcttgcctatctgatcgactatctcagcgccgacctgcgggaaaagccgctgggcatcccacgaaagacccgggctgaccatctacccaccttcatgaaaaccgcaaagaaccgggagcggatcgtgaagctgctgaagaaaatgcaggaggaatgaggatggagcagaaagttatttacaacggccaagttcttactctgacccagttttgggctacgggggagccttgcctgtggatcaccgacccacagcagatcgggataccaaaaatggagtttgtaggcggatacccaaacgaatactgcattttcctgaaaagtctgactgaaacggagttggcacaaatcacatccctggacggtactccactggatatgacagaagaactgcggcagcatctaacaggaaaggacaaaccctatggcgctacaggataagaaaatcatgcctcccccttggctggctcaccgggagatcgagcgatactccatcggctggcgcatgggctctggggaggattacatagaccgatttggcgattggctggatgccctctcatcggaggagcggacggaataccgcaccctctttcccgaaccggtgacctggatgggctggtgggatgacgaggacaaggttgaggtgctggagcatggtgacttctgggtggatgcatggcagccggagggccagcccaagtacacccaccagtggctccagcaggaattttccatggggagaaagcgagaactgtacctattctggggccatcagcctgccgagggcggccagctaacgaaaagctgcctcagccagtggtggatggaggacttctggtccatcgctgacacctatctctgcatggagcagtatatgatggccgcaaaagctgagctgttcggtgacgggaagatccgggaccagattttgaaatgcagcgaccccaggcagatcaaggccctgggccgcaaggtgcggggctttgaccagagggtatgggacaggttcaaatacgccattgtgctgggtggcaactggtacaaattcagccagaaccgtgacctgcgggagtttctcctctctaccggggacagcgtgctggtggaggccagtccctatgacagcatctggggcatccggctctcgtccagctccccgggggcccaggacccgatgaagtggcgggggcagaacctgctgggctttgcgctaatggaggtgcgggacgagctgcgccgggtgacgcagaatgaaatgctttgcgattggagtacggtatggcagaaatgaaactctatgaactggtcaaccactatcacatcggcaccgaactgacctgcgccgaggcgatgttcatggcctgcaatgaatattaccatctgaatttgtccgaggagacacggaagatgttctccgtcatgggccttgggatgcagaccgagcagtcctgctgcggcgctttcactgtggcggtggggatcatcggtctgatgaccgccaaagagggccagaccgatgtgaacaacatggagggctatcggatgattgctgaattaacagactttatgcttggattctatggaacactccattgtgtcgagctgcaaaggctggagatcgtaggatacgaaaacccctgccatgctattgtggaggcgctggccaaaaaactggaggagctgctggcgggccgcagcatcttacgcccggcagatgcaggacagattggctcctgacctttggcaaaagaaacaggaggtcatgaacatgagtattgaactttcccacgacgaattgctggtgctgtacgacctgctccaccggctggaggatgtagaggagatatttgaagatccgtcggaacaagaggtcctctggcacattcaaacacagcttgaaaaggaattggttgagccgttccaggcggactaccaggccatcatcgaggaagcccgccgtgctgtgacggagcagtattgagatggagtacatcaaactcttttgggagggcgcaccggagggagaaccaccggtcatcctctatgaggtggacacagagcatgagcggctggccttccgttccattgacattttcgccggcggccgcacccacaacatccccgacctttacgacggagccattgaaatcacacccattcccaccgtggaggaattcaacgcccatgtctggggtgaggagttccatgcctgtttgatagagaaaacggaatttgaggccgtctgggagagccacacccacaatggagcgttaaagcaatcaggaggaatctgatgaaacagacagatatttatactgaggccttggtctgtctgcggctaatcctacagacagaccacccggaattcaaaaactggctcgactggctggggcgggatattgaggattggacccagcggcgggaggtcgcccaccatcttttagcatacggcggaatgggttctttcaacgatctgcccaatatgcggggaaaccatgattatatcttcgattttctcaaatcggtgtgctacacctttggccaccgcaatggcaagcggcaaggaatttcaccagaggcattgatggaggagtgtgtccacgatgcagagcaggcatcctatcatccccataagggactaaaccgagctatcgcccaacatctgatgcaaggcaatttacaggataatctggatcgactgtaggaggacttgctatgaacgaaaaacgatttcgcccccaattcaatcaaatggataccaccgagaaacaggtgctgatggagaacctggctgctcgttatgctatgaccttcctcggtctacatacctttgaccgctggggccaaagctgcaccaccggcatattcgaaaaagatggccgggagttcgtctttgtccctggcgataccgtcaccttgggctgggaacggttctctgtgggactgaatcagaacagtcgagaggaactggactatctgttccaggaatgggatatggagtgtgattcggaggagatgatccgtgaaagcatggctcccgttcggcaggcagccattggccctatgctggtgggccgggagctggaggagctgtgttgggagccggtcaagatggacgatcccagactgaccgcccgccccgactggctgaagaagttccgggattttgcctggagcgaccttgacagccttaccttgcaccagtcagcccgtattgagcggacggaaaagggctttcagatctggatctataaccgcacagactacggtgcgcttcttgaccaactggagaagcagggcctttcgctgcctacggcggacgagtgggcctatctgtgcggcggcgggtgccgcaccctgttcccctggggggatggaatggactactccatgcatctgcaccattttgaacgtccggaggatgaggacaagcccttcgatatggaggaacccaacttcttcggcctgtccgtcgcctatgacccctatatgcgggaggtggtgaaagccaaagggtttaccacctgcggcggcgatggcgggcgcagcatctgcggcggactgggaatctttctcggcttcctgccctgttcgccgcactgtaagccggaagtgcaggaggagaaggaactgaacggcgactatgacttctaccggcccatcatccggatagagtcagcttgagagatcatttggaggacactgcacgagagagacaacacctgatcttacaaagatcagcaaatatgagtttaatccttcggcacaagccggaggtcatcagaacctaattggacgcccatggctgggcggatgtcaatgcgctgccggcgggcatcggtaagaagtaccccatcaatcgggacattctggaggagattgtgaggagcgacagcaaacagcggtatgccttcaatgaagaccggacgctgatccgagccaaccaggggcactccatccaagtggatgtaggactcaccgtaaccgagccgccggaggcgctgtaccacggaacggcccagcggttttccgctggcggagtcctcctatcgggcgctatccctatctgggcgaccgggagaaggcgctccagaccgcgaagcggttggcgacggagcggctgtggccgggccgacacaggttccgccccatgtccttctttgaggacccgaacctgcgggagcttttgctggaaccggaatccctccggcgcatccggtaggctgccctcattgacaacgggagtttaatacggaaataaattgcttgggaatggaggatctgccatgagcaaggagctgaaactgtataaagcatttattgacggtcttgtggatcggaaagacagcatgaccgcccggtgggtcaagggtgatggtttcccccaaacggatgacaacaaggcaaaaaacgatcttttcgccgcactgacaccagcgcagagagaagtgctggctgaaatacttcaggacgaacacattgcgggtatccatgatgcccttgcatatatcaatgagatgatggatctggatgggctggagctttatcaggatggtgaatcctatcccaacgactattttgagagcctgcactatgacttcatcagccgttgtgacggcgatgagtggccggaataaaaggaggcatgacggatgtatatcggcaaatactggggcaactttattggaggttccgatgacagtctgaaccttgtggcgtttttggaggaccagaagaaagaggagatccccctcagcgaaatctttgccaagatcgggctggacaagcagaactgggacttccaccaaacggtggagtatcttgagttcacccactccaatggcgtggagatcgactttcacttcgccattgatgtcgtcactgatctggccgctatcctgctggagtgtagtgtcagcggcggggtaaacctccatgatctggacgagtataacaccccctcccgccgcatccgtgtcacagccacggcagaggagcacgacgctatggacaaggctctggcagatttcgcccaagctcccctgtcctatgacctccacgatctgatgagcgatgaggagatcgaggagatggcccatcaggtggcggcgctgcgaaaggagctgtacgagtccgctggccgcaaccgcagctaccatgtgaaggcggaggacatgaagaatctgctccccgactgggctggggccgatggctgcatcgccaccaactgcatcacggtggagggctgcaaggttggctactgctaccgggaggagccggatggcgactgggacagcggctggcgcttcaccgccggtgacgagagcgatgattacatggacgaccccaacaacgccgggctttacaagctgaacacgatctgcaacgacgattccgacattatcccgcttttgaatacgcccgccccctgcgcctttgagcgggatgagcatggcgtgttccagccgattaaagattggaaaccagaaaatgaggaggagccggatatggacattttacagcggtgccagaagtggcatgaaaccgacgaataccagaagatcattgacgcgctggaggccatccccgccgaggaacgcactcctgagatggacagtgagctggcccgggcttataacaatctggcagacccaaataagccaggcggcaaagatatgctcaaaaaggcgattgctttgctgaagccccatgaggaatacttcgagggcgaccactactggaacttccgcatgggctattcctattattatctggaccaggaggggcgcgcccttcggtactttgaaaaggcgctggaggcccgcccggatgacgcggataccaaagaattgattgattcgtgcaagaaaggcattgccctgccgcagttctcggagtgcttccgggagcggacagaggactggtgggaaacctttgccgaaatggaaggggcactgcgccagatgatggacgaggacaaggatcacacccgtggcgcggagattgtggcccaaatggaagatactttgaacctggtctttgacgagatctccttcgaaatgggcttcaacggagagaagtacgagctgatcctcaccccggagggggacagggtcaagctgtttgaactggtctacttccagaagcacgtccccaaggaggtgctggaacactggaacatcctggtgggccgccagcccatccgggatatcggcctgcgcactgacgacggctgggatatctccggggatgacgtgcagatctggttggaggagcagggtgaaaacagttttactatctccgcctactgtgaaaagctgctgcccatgctgcggaaagaggaaggccgggcctggtggatgctaaccaccctcaccgaccaggtgctgggtgagatctcccacatgtggtatatcgacggcttcgatgtgctggaggggcccagggcggagccttcccttctcctctcccaactgccggacaagctgaaagagcggggggtggacctctccaccgccccggaagcgtacttagacagctgcctcgcctacaaaatggagcccaataaagacccggacgccgattggcggctggatgtgatcgccggttccaccaactgtgtgcctctgatcaacggctatctgaacgaagacaacgacttcatggacgctctccatgccgacggcgcggtggcgggcttcttctgctatcccctggataccctgcgggaggaagaaggaagccagaagctcttcgacttccgggacaagctggaggaggtgttcacctccggggaaggcccggaagtgctcaccctcacaggcggggccatcggtctcttctgcggctatgtggactttatcgcctgggacattcgcaccgcactcaggatggccaaggcgttctttgaggacagcggcattccctgggccagcttccacacattccgccgtgaagcgggcacggtgaacctgaaagcgccacctgaggaggagccggctgacggggggcaggccgccgagttggccgagccgctgacgggcatggactatatcccttacaccccggaaaacgcggaggagtttttcgcacagatcgagcagtggaacgacgcggacgagtacacccgctgtatccaggcgctgaacgccatcccggaggactggcggaactaccgcacgacctacgctctggcccgagcgctggaaaactacgccatcattggggaccatgacgagggcacgccccgttacaagggagacaaggccctgctccgcgccatcgatgtcttggagtccgtttgggaggaaggccaggacaaggcggagtggaacatgcggatggcctatgcctatcagtatctctttgagcaggaggagaaagccattccctacgcccagcggtgggcggagctggaccctgaggatgagaacgccccggcggtgatccgggagtgccaggaggagatcgcaaagcggggcgaggcggaaacagacggcgagacagaccacacgggcgtcttcaccggctttgtcctgctgtccaggggagaatgggacaaggcgcagttcatccgggacatgaaggaaaaatgggacatccccgtggaggaatacgacgcaagcgaggacaagagcgacgacgctctggtattcgaggtgggcggcatggtcgctgccgtcagtctggcggcctgtcccattcccggcggcgaagccgaggccaacgcggaaaacaactatatgtgggaggatgccgtaaaagctgctagggagcaccgcgcccacatcatggtggcggtgcttggcaaagaggaagatgttctggagaagggcaaactctataccaaattggtggctgcctgctgccgccagaaatacgccaccggcatctacaccagcggcgtggtgtttgaaccgcgcttttacgaggactttgcagacatgatgctggaggacgagctgcccatcttcaactggatctggtttggtctttggcgggatgagaacggcatgaacggctatacctacggcatggatgtgttcggcaaagacgagatggaggtgctgggcaccgatgccgagccaggcgacctgcgggactttttggccagccttgcctcctatgtgctggagaatgatatggaactccacgctggggaaaccatcggttttgcggaggatgataagcacgccatcacccgcagccccggcgtcggcctgccggaagatcagatgaccctaaagatctcctgggagtcatcggctggcggtccggatgatgaccgtgaggacggcccggacggtgaagccccccaggatgaggaatccagtgttcccgaggtctatacggaggaggaactggcggccgtcgaggggcacatccagcagtatttcggcaagtttgggcatgtgttccatgagctgtcttccccggacatccatgtggacatctgcgtggtgccgccctcccaggagcgggactactacaccctggtcaccatgggcatgggcgcccaccggatgaatgtgccggaggcgctggcggaatacaagctggagcgggcggagctggccatcgcgctgccgaggaactggaagctgaagcatgaggatctgaagaatgagcggtggtactggcccatccgcctgttgaaaaccctggcccgactgcccattgccagcgatacttggctgggtttcggccataccatggacaatgaggaggactttgcagagaacacgaagctgtgcgccgccattctcacgcccccccaggggacggaggacggcagcgaggtctgcaccctaccgggcggcgaggaggtcaacttctaccaggtgctccccctctaccgggacgagctggagtacaaactggcccacgacgcggacgccctgctggataaaatgaacggcatcagctttgtggcggagcctgaccgtcagaatgccgctaccagcggcaccctttcgcacgggaacctcataggcgatatggacgatgctgcctggcatctggagaccatccgggagaagcatctgccggtggacgagatcaacgcctataaccacatggccatctacctgcgctggtgcatggagcatgacctgatgagtgtggaatttatcgagcggtacagcgagcagtatcaggcgtttctggcagatatcaagcaagcggacttgcgttctttcatccgcgatgtactgaagggacagctctttggcgctctattcaacgagaagggcgcggcctttgccgggtactactacggagagagcgacagcccttactatcccagcgatatcgacagctacgccgtcagcgtcatcgggccggagcgcaattactccgaggagatccaggacgaggcgtacctgttcatcccctttgacgaggactactaccaggctatggcagaggtgatcgaagaacgctttgccaactggcaggggcagaactttgacgaggatacgctggagccctccgaggtggctcaggccatcatggagtatctggactgtgaatgcacctatttcccttccatggcagatgacgaccccatcatgtcggcatacagctacgccaggcgggacgccgcccatgagggcttcgtgccggtgctgatcagagcggacgacgagacgctgctggagtgcctggtgatgaacgccgacccggagcacgacgcggactgctatgaatttgacctcaaaaccgtgacggagtaccggaagaagatgctctccgcccccatcaaggacggcaaggcagtccttgaggcattgaccggccagcgcaaggaagaagccgaggacgatgacatggactgggaggaggaagttcttggagagatggagggcggctatgacaatgaccgattctcctgctattgggattcggatagccacatgacctatcccctcattttggccaagatcccggtaaagaacccctgggagatcttcgcctacctgcccttcggcaactggaatgagtgccccgacaccccagacctgatggcagtagcgagatactggttcgagcagtatggcgccatccctgccgccatgagccacgacgagttggagtttgacctcccggcccctgtttcccaggagaaggccatggaggtagccacagagcagtacggcttctgcccggacattgtggatcaggagcaggataaacccacagtgggcaatctggcggatgttctgcggcagtccactgtctggtatctctggtgggattgatgggaggtgccccggcaagcgatgaaaactcaaacactgaccattcagaggagcagattggaaatcgagaaaaagtgctgggctttacgcttccgtcccaggttcggaagtttttcctgctgaccgcaggcatctatgtatccacaggcgtgatcattgatcttttcggaatgtttgatctgaccctccatggagagcggtattgcgtatcgggcgagttctggaaagacacaggtgacgaccagcttctgctctatcctgatgacgaaaccatatggtactatgcccatggagatgatgactatatcctggttgtggggatctattgtgattgagaggtggtaacatggcaagtgtatccacttggagcggaatccggaacaaactggagcaggactacctctgcccggctctccgcgggcacatccaataatcgcatccttttctcccatgcggctatgtggaccacgcctgggccgcgagccgcacggtggaggaattggatgcagttgcgggaagccatatccaggcaaaaaacagtatgacacatgggatgatgaggataaggccggctatcaactctacctttaggagcaggacatggaaaagcgggcctaccgggactggtatctgagccaatccccggaaactgccccaagaaatcgtccagcaggaactggagtttcgattcaagttattccctaacaaaaaggaggaaacgaaatgagcaatgaagtattccagcaaaatctggatgatgaaaaaggctcccgtcccggcgggccctatctcattcagatgctgttcaaagagccggtgtctatgcctggaaaagcagaaatgaccgccgtgatggaaaaacacatcgggacggcggagtgtttctgtcacgataaaaagacagcaggctttgccgccctggagcatatggcggaattcaaggatgtcaaggctccggtacagctcatggtgatgggctgcagcaaatttaagggcaaaggcttcgacgcgttcctcatgagtcagatgtgggactgtcaggagggccgggaacggatcttccgggagtgccggtatcaggtcgtggccacggatatgctggcagcggcgcttccagttctggagcgggccaacctggatgctgactttgtggaggccctggcggagctgtatcccacctgtgaggcgttctactttcagaactgcggcaagctgcttctggctgaggatgtgtgttctcaccagatcgagggggcggaccgcttcatccgcttcggggtcaatgtccgtttctttaacattcagggaaccgaggatatgctcatcgacacggtgggtatgagtaccctgttcctgccggacctacagtaccatttccacggaatggatcccaactgggtggtgaaccacgcctacaatgcggcgtcgtatattctggcaaatgacaaccccatcaaggatggggaaacgatagatggcatagcggacggccagatgagccgggagcttcaatggaaatgccgatatgaggatgctctgatccagccgcccaggggagtggtagacatccatatgggcgagtatgcttccggaaaacgctgaactgataaaacgacttcctgcgcagtcagaggaaatgtttgtcgtccccttaggtggatttttcgttcagtcggtgtattctttgtctattacataataaaatctgatatgcctgatatgaaaaacttgcttctcagacattctgagggtacaatacccaaaacccgaacatgaaaagagcccttccgaacaggcggcagccgttttgctgcacctggtcaagaagggctctctgaccaaatgtaagaccacaggcagattggaagtaaacggaaacagcaaaaacaaggttgtcaaaaagtgattatttcacaaaaacatcacaacaccccaaattaaaatgaaccgctcagctttgaccgtaaaacaggtcatctgatttgatcgagccgtcccgactggatcgcatctaaattggccttgagccgttcctccggccaatcccaccaccgtagttccagcaaagccgcgatgagatcctcagaaaaccgctttcggattggctttgcagggacaccacctacgatggtatagggtggtacatcttttgtcacaacggccctggcgccgatgacagccccgtctccaacggtcacccccgccaggatgaccgcctcgtagccaatccacacatcgtttccaatcacaatatcccccctgttgtcccaggctttggccacctgttgccgctccaatccccacttctcaaaaaagattgggaagggatatgtggcgagagattgcagcgtgtggttggcgctgttgaacaggaacctggccccacaggcgatggagcagaacttgccgatcaccagccggtcctggttgacgggatagtggtacagcacattgtttttttcaaagtcaacagggttataaacaaagtcgttgtatatggtatagtccccgacaataatactgggatctttcacggcatgcttgagataaactgtctgacggtctcccgtccggggatagatgtttgattcattcatattctttttctccttttactcgtttcggctgccctgtgctggcggtttatgcaccggcgttctcccttcccaaaccctgcttttaaagtagaccagccccacaagagcaggcaggatgggcgaaagggcctggcccagatagatcccggaaaagcccagagagaggggaaatgccagcagccatcccactggcaggcgcacaacgacggcgtccaacagggcattgaccatggccacgtgggctgctcccacgccgatggcaaaggaatccagtgtgtacatcgcggcgtagatcaggctgtttatactacagcaggtacgcaggtactgcaccccgcagcggatcacctccgggctggtgccgtcaaacatgcagatgagaggttcggccagaagctggaccaccaccactaccgccgcagtgaccacaaggttcagcaacaggccggaccacaccaccttgcgggcccgctcaatttggccagcccccaaacactggcccaccatggcggttattgcctgaccgatggcccagcagtgcatcccggcaaaggtgttgatcttcagtcccacaccggacgcagcggccaccggagttccaaactggttgagcatccctgtcaccagcagataggccgtgttcaccacaaccatctgtatggcggtgggcaggccaaccttcaagatggccagcagcttttcccgatgaaactcgatttttctaagagaaaagcccggttgataccgccgtagatataccagggaagccataaaggaaacaccctgagccgtgatagtggcccaggctgcgcctgccgtgcccatggaaagcggcccgaccagaagcacatccagcaccacattgaggaccgtggcgacacctacgaaaaagagaggcgtttgggaatcgcccaaccccttcaggatagaacagaccgcattatagccaaaaacgaacaccgttccacagcaaatgatcttcatgtagccgcaggcatcctgataagcattcgccggtacatttaacgcctgaaagagggcctcataaatggcgaggccgaggatggtaacaacagcggaacccaccagcgatagaaagaacagcattccgatcgtgtcccgctgacccgtttggtcgtttgcgcccttgcactgggccaccagaacgctccctcccatagtcaggccaatgcaaatggaattgatgataaagcacagcatggaggcgttgctgatggcggccaatccagtctttcccacgattttgcccaccaccagcatatccaccacattgtagagggcctgcagcaggttggccaggaacagcggaaaggcgaaccgaatcagttttttcggcacgctcccggtcaataaatcttgtccttgggtcatataatatcctcctttcaaaaaacagagggcagcacaatactgtgcgccctctgctccatccccctaaaatgggtatcacaaaaggccgcggacaaaacatcgtccgcggcctgaaatggtctatcttttccagtcagcctgcaaaaaggggcacaacaaacccaaggcagtgacttcctgccctgtcctcccggttttacaggttgaaattccagtaaggctccgcacaatgttttgtggtataaacttgtgtggagccaaaatcaatgcagaattttccgaacaacatcgtgcccacctcgctttactgcaataaatactataccaggtgtgcttccgcctgtcaatgtccttctgatggacggtcattgacaggtcagagcacagttccctcaaccagagtgtggaggatcacatcggctacgcggaaaacactgtggagattgagggcggcagccacacccagttcggcaactatgggcccacgtgagcggtcttccggccaccatttctgcggaggagccgcagagacagatggtaccgtccatcggagcctctcttgcacatcggatatcaaggcaacccctattagccagaaagcggagtggccggcaggcactccgcttttcatagttctctttgcagatacaccatatctaccagcttgactccgcactcatagatggggtggtcgtagtggtcagtgaaaaagttcttgaccagatgatgcctgcaaaagccgcagctctcgtaaaacgggatggtggaggggctgtccccagtacccacctgtagcagcatatactgtcccgcgtaggttcgaatgaggaagtccaccagggctttcccatagcctttgccctgaaagtccggctccacggcgatgtttttcaactccagaacgcctccgccctcgtcggttacgacacactccgccttaactccgtcatcttccagcacatacatgctcccacgctccaggtaacggtcgatcatgtcctcctgctcatccgccagcaatagcagcgcaagatattgcttcttattggtttcaacccttctgatttccacgcttgtcaccgcttttcgtagaccagatccacgattccgttgtaatgttctgttgccacgagcttcagcggcagttcccgatgaagccccggaaacagccgcacgcctttgcccagcactgtaggaatcactgacagccacaatttatcaatgcggttctctttcaatagctgcctggccacggacgcaccgccgcagatccagacgtttcccttcgactccgtttttagctgatcggccaaggcgatcagttccccataccagaagcagacattctcctgattttctccctgccggtgggtcaccacataacaggggcggccctcgtagggccagatgtccggagagagcgccgtgacgatctgatggtacgtagtccaccccatgacgatggcttctaccgtctcataaaacgccggataactgccggaggtatccggtttgctgccgtctccctccagccaactcacgccgccctgctcgtccgcaatatatccgtccacactcataacacgatctttcccacaatcatccccccgctgcccctattgtacccaatggacaaaaaaagtgcaaggtaaaaaaacatgacagacagttgtggtgttcctgtggtataatacagaaaaatcaggaaaggcggagctgccggagcgggaagagccggagagcagcttggggatttgactgaaacattggccgatcgttacaggaggaattgacatggcgtcccatccggattttgtgaactatatggccgagcagttgtgggaggccggagccatccgcagccggaagatgttcggcgaatatggcctttattgcgacgatgtattcttcgccgtcgtctgtgacgaccagcttttcgtcaaggtcaccccacagggcgaagcggcgtttcccgacctgcccaaggccccgccctatgagggggccagggattcctttctggtggaggatgtggagaaccgggaacagatgacggagctggtgcgtatcacctgtgaggcactgagaagcgggcctcagagaaagcggaggaaatgaccatggtctttgacaacaagaaagagcacaaggaattctatctcccgcccaagacgccgggcatcgtcaacgcacccgctatgagctttctggcggcgcggggccatggcgagcctgagaagcaggccatgtggttttaagggaggggcgaacagaatgaaaggctttacccgcatggaaacccgtttctccctgtgcggtctcaactgcgatttgtgcagtatgcatctgggcggctattgtcccggctgcggaggcggagcaggcaaccagagctgcactatggctaagtgctccctggagcacgggggcatccagttttgttgggagtgccgggagtatccctgcccccgctacgatggcatcgacgattgggattcctttgtccctcaccggagccgacagcaggacatcgccaaggtccgggaactgggattggaggcctatctggcccagttgggggaaaaacgggcgatcctggatgcacttttggcccgtttcaacgatggccgccgcaaaactcttttcaacacggcgatctatctcctgcccctggaggatttgcagtccgtgatggctgatctgaacagccggacggagctggctgggcaatctgtcaaggagcgggccctcgccgctgtggagctggtccagcaggcggcggaccgccggggcgtcagtctgaagttaaacaagaaaccgaaaacggggtgatcctatggcggcttccagggtgaccgtccacttcccctgcccggtggagcgagtgtggcagaccgtgaccgacctaatgaataccgcttggcgcggcgacctggcccgggtggaaattttgaatgaaacccattttgtggaacacaccaaaagcggctatgccacgaattttaccgttacggcctgcgagccgctttgccgctgggcattcaccatggaaaacggcagcatgtccgggacctgggtggggatctttgagacggcggagggcggcgcccggctaacctgcatcgaaaccgttaacgccaaacactggtggatgcgcccccttgtccccggatacctgaagcggcagcagaaacggtatctggacgatttgcggcgggaactgcaaaaataggaccgtgttactctgcgttgcttgcggcaacgggccgctttccctacaatggggggtgaaaggagtgagcccatatgttgaacgaaactatcaaagcccttcggaaatccaagggtctttcccagcaggagctggcggtcaaggtaaacgtggtgcggcagaccatctcaaaatgggagcaaggcctgtccgtcccggactccgatctgctgatcgccctgtcggaggccctggagacgcctgtgagcacgctgctgggcgagacagtggcggagtcggaggcggacgaggtcaaagccctttcggaaaagctggagatcatcaatttgcagtttgcccggagaaaggccgtgcggcgggcggccctccactggctgctcatcgcggtgtgcgggggcatcctggccgtcgccgcggttctggccgcggtaaacagtccttatctgggctgggattacagcgccccggaaaccgccgttatgggggtggccatccacgcctttgaatggggctttgtccgtctggcgccctttgctctgatcgcggcaacggtcggcgttttcctgacgcgaaaaaaacataaggtatgaattgggagagtgcaccactgaacatggagataactaccaccggacaaatataggcacggaaagtcgggcagagtcacttacattctgctatgctgaatccagaaggacggtgtgaccaatggattgggtagcaagtattcatcaggcgatccagtatatcgaagaacatctccgggaggagctgaccatccgggagatcgcgcagcaggtggccctatcccctttttactttcagaagggttttgccatgctgtgcggtatgacggtgggcgactacatccgccagcgccggctctccgccgccgggctggaggttctcacgacagaccggaagatcatcgatatcgcgctggagttcggctacgattcgccggacagctttaccaaggcttttgtccgattccacggcctcacacctgccgcactgcgaaaaagcggaggcgcggtccgttcctttgctccgcttcggattaaagtgacattggaaggtggtcaaaacatggattgcaagattatgaaaaaagaggcgtttacggtgctctgccgggcaaagacgttcaagtatgaggacgccgctgctcaggttccccagttctgggcagagcatttcggcacaggcggcggcaaggtggtttgcggcatgtacggtatcaacctggacgagagcatgggcggcaacgagtttgaatatcttatcgccgacaactacgatccggccaaggagatccccgatggcttcaccacccgcaccatcccggcccatacctgggcggtgttcccctgtactggccggatgccccaagccctccagggactgaaccagcagatcttctcccaatggctgcccacgaaccccgactacaagatcgccgcaggcatcaatgtggagctgtatagcgacgccagcaggtttgaggacggcacccaggaccaggactactactgcgaggtctgggtcccggtggaaaagaagtaaggcacattccccggcaaaattaacggtcctaccatattgtttcaaacagaatccaccaaacaaactagtatcgtatgctgacagcgtgcgctgtatgttatgtgttgcatcaggtgggatgccgaagatattggaggaaaatgtaaacaaatccgtcgaagacagtttcgtttatagataaaaatcgattccgcctgtgaaggaaactacatccggcaatcgatgcggctctttctttgcggcctttatacgccctgcgtcagcctgtccaacggacagcgtatcgcagggcgtttttctatcgtttgaaaggtgccaaggcgcatgagcttgaaatacacttgccccatttgcggcacgcccctgggttataagggcctgtgctggaaatgcaggtctgagcaggagcgaaggactgattgtcctggacaccggaacaaatctcagagaaacagaaaagccttattcagaacatccagcggctgggtgatgtggaggccctggaactcaccgacttccggcagcgggacggcctgatctatcctctgctgttcacatagattccagcgaagcatcaaacctgatgtgcggcctggctatacagggggatgaccgggccacggaaacgttatcggaactggatttgtgatcccactggaacccccatgcggaccgatacagcagaggcggacggcgtctgatctttttcctgatggggactgtgccggtccgggagtgccaggaggcgttcgcgagtcggagccaaatggtggggggtggatatcggatacggcggggaacctctgctcatccccatcaacatgcgggacgggagccttctctgcgtgggcaggggcaatgaggagtgagaaattccgccgaaaaccgtaggcggactgcggcaggaactggagaagctgaaccaactggcatggcaggccggcaaggacacaatcccccgctggacagaaacagagggttatccagttgacggtagcctccaccgctgtattcaatacacgaatattggtttggaatgcaatattatcaatcgtcctgataatgttctcaatttcatcggaaccctgtttgaactcttccctagaaccggcctgttcggccgctccccgaaccaacgctgcgctccgctgaaaacctgatcgccggttttatcatttgggttgctttgaatgtcagcatccagatttccctgggcaaattcctgtgcaatcaaaataggtatccatactgccaatttgtcaaatccggttctgtaccccctagggcttgtttgaaaattggcgatgtgcccggtggcgaggaattttgggccgctggcaagcaattttttcgcaggaatcctgacggatttcaaggaaaaattgcgccgtccagcggtcaaaaggcccgtcgattgggcatgttgacatttttcaaacaagccctaggatataaaaatccaagcatagccacagtcagcctgcaatgaaacaagtccaaatatcttataggaagccgtgggagttcgcccacggctttttagctggaacaggtacttgcaactccgccttttcttatggtgcactattccaagatcatttctatcagcaaggaggtgctgccttgaacgggcaggtttacggctatatccgggtcagcagcagggaacagaacgaggagcggcagctcatttccctgcgggaagtacaggtgccggaggagaacacatttatagataagcagtccggcaaggattttgagcggccgcagtacaagaggcttctgcggaaattaaaaaaagacgatctgctctacattaagagcattgaccgcctgggccgcaattatggcgagattttagagcaatggagaatattgaccaaagaaaaaagcgttgacattgtggtactggacatgcctctgctggatacccgacaggggaaggatctgatgggcacgtttttgagcgatattgtgctgcaagtactctcctttgtcgccgaaaatgaacgtgccaatatccgtcagcgtcaggcggagggaattgcggccgccaaggccagaggggtacggttcggccggccgccaaagccgctgcccgataactacctgagcacctatctgcaatggaaaagcggggcactcacagggaccgccgccgcgaaggagtgcggaatgccgttggctaccttccgttaccgggcggaacggtacgaaaacacgaaacgttgaacagcaggcagcttcacaaaaaggtgtacctttctgtgaagctgcctgctgtctctatacattatccttatcgtccaaatcctcgtcatgttaagagttttttgaaaaagattttgaaaattgggggcttacagaaaggtacacatttctgtaagcagccaaaagcaaagcatggatttggaggcgggcggccacgatgtcatccagagaaaaacaatataatgtcctcaagctgcgcctgtatccaacctcagagcaagcagaactttttgaaaagacctttggctgctgccgctatctctggaaccagatgctggctgaccagcagcggttttatttggagactggcgtccacttcatccctaccccggcaaaatacaaaaagggagccccttttctaaaagaagtggataatcaggcactcattcaggagcacaaccagttgtcccgggcgttccgtttattttttcaaaacccggaggcttttgggcatcccaattttaagcgaaaaaaagatgaccgggactccttcaccgcctgcaatcatgtgtttacttccggcccgaccatttataccacgcgggacggcatccgcatgaccaaggccggaatgattcgggctgtctttccacgccgcccgcaaaacgggtggaaactcaagcgcgtcacagtggaaaaggcccggacgggccgctattacgcttatgtcctgtatgaaagcctggtacagccgccggagccggtccttcccgctccggagcgcaccctagggctgaaatattccctgcgccacttttatgtggacgaccagggcaacagggccgatccaccccgctggctgaaacagtcccaggaaaagctggtgcatcttcagcggcggctgaaccgaatacagcctggctcgaaaaattatgaggaagccgtactgaaataccgcctgctccatgagcacatcgccaatcagcgcagagacttcctccacaaggaatcccggcggatagccaacgcctgggatgccgtatgtgtgaggggcgacgatctgggtgcgatgacggacacgctgattcaggccgggagcgccgtaaaggaggcggggttcgggatgttccgggagatgctgtgctacaagctggcccgccagggaaaagcatttattcaggtagaccggtatctccctaccacccggagctgttcggcctgtgggttgacgcgggacgcgctccatgcgcgggattacaggcgaagtggttgggtctgtccagagtgcggcgcggttcatgaccgtgaggtcaacgcggcaaaaaatatcaaagcccgtgggctggaacagttttttgatttacaggggcaggacaggagcgcctgaccctttccaggcgtcctgtgctccgccttgacaatatgccggccgggacaccggtgaacgcccatgattccggctggagagcgtggatggaacgccggtggggagcctccgcccttccatccacattctccggaccgccgagtgggaaacgagaggccgcatccgtgcggctgaagcctgtaagcaggcgtccacaatattatgacgatgtttctgcacgcggcgcatggatgcgcgccgctggccacaggaaggagatcccccatgcttcagctctctctgcgccccggtgagtatctcaccatccatggcgacattgtggtacagctcgctcagctctccggcagccgcgccttccttcgggtagaggccgaccgcagcatccccattgtgcggggaaaggtactggagcggtcgggggctccccggccggagtgcctggcatctcttccccgcagccgcgccaggaaaggccgggatgccgtctaccactggagtgcggagcgggagcgggccgtccgcacaatggaacagctcctggagcggatggaggccggggacagccgggaggaagcccaggcgctgcgggcacagttggagcacctgcttccaactgtatgggaggaggagctgtccggccaaatacaggccctgttccgcagcaaaacagcccaggacgtataaagaaccaccttagtttggtttcacccggtctcgcgaaccggttgaaataaatcgaagtgcagggacacagcccgccaaaggccacggcgtctgtgttggtctgccaaaccactaaacgcacatgagggatcggtgcgttggaccagcaaacccaatatcatttcagaaagaaaggaaacgatcgaaatgaggatccagcataacatcatggcgatgaacgcctaccgcaactacgccaacaacacctccgccctgtccaagaacctggagaagctgtcctccggctacaagatcaaccgcgccggtgacgacgccgcgggcctcgccatctccgagaagatgcgcgcccagatcaccggcctggagaccgctcagaagaacgccaaggacggcatctccctggtgcagaccgccgagggcgccctgactgaggtccacgacatgctcaaccgtatggtggagctggccgaccagtccgccaacggcacctacgacgtggagaccgaccgcgccaacctgcagaaggaggttgagcagctcaagagcgagatcgaccgcatcgccgactccgccaacttcaacggcatcaagctgctggacggctccatggacgccgcctcttctatcaaggcatttgacgccagttccatcaccggtattctgggggg

SEQ ID NO: 4248 - DNA, 36196 bp, Unknown
  gut microbiota DNA sequence
ccctacatttggagggagcggtaccattgcagaactgtaggggcggggcttgtccccgcccgcgtctcccttgcccccgccgcagaagagaaagaggacgcgcacgccggaggtgtgcgcgtcctcttggtttagtcatggctcaggtagtagggcttcatcaggctgggctgctctgtggagtccttctgcccattggtgcgcagggtgacctccgggggacggccccggccgccgtggcgtccgccgcccttgcgcttccgcgccgcctggggctccggcttcgcagggggttccgggggcctagcggccttcttccgctttttagcgggctgttcaactggtttgtcctttttcggtgcggcctgggcctggccgcgaggggccagcaggcgggcggtggcgtccatgatcacgtcgctggccagggggtcgggcttgtggaagtcggcaaactccgcctggaccggccgggcgggggcagtggccgtcagggcctcctccagggtggcgctgttgcgctggccccgcttgcggcgctttttggcggaggtctccccggctggctccggctggggaggctgctccagtaccttctggttggccttggcctttcgggcctcggcggcggccttgttggccgcatcccgctggcggcggcgctccttggcggcggcccgggcctcggcgtcctctggattcaccacccggcccttcttgtcgcggggcaggggctccagcacctccataggccaggggtggccctccaccacagggatggcgcggccgatgagcttctcaatggccttgagctcgtccttctcgttgatgtcgcagaaggagatggcggtgccgccccgcccggcccggccggtgcggccgatgcggtggacgtaggtctccggtacgtcgggcaggttgtagttgaacacgtgggagagctcctcaatgtccaggccccgggcggcgatgtcggtagccaccaggacctgcaccgcgccgcctttgaagtcggccagggcctgctgccgggcggtctggctcttgttgccgtggatggcggcggcggagatgcccgccttgaccagatccccggccaccttgttggccccgtgcttggtgcgggtaaacaccagggcgtttttcacgtccagctcccggatgagggcggcgagcagcctggtcttgttgccgcggtccacgtagtagagcttctggtcgatcacctccaccggggaggagatggggttgaccgccaccctggcggggttgtacagcagggagtccaccagcccctgcacctcggggggcatagtggcggagaaaaagagggtctgcttttgggcgggcagccagcccaggatgcggcgcacgtcgtggatgaagcccatgtccagcatccggtcggcctcgtccagcacgaagatctccagccgggacaggtcgatgagcttctggccgtagaggtcgcccaggcggccgggggtggccaccaggatgtccacgccctttttcagccgctccacctggggggcctggcccacgccgccgaagatgacggtggagcgcaggggcaggtacttgccataggcctcgaagctctcctggatctggagggccagctcccgggtgggggtgaggatcagggcccggatggggcggccctgggccttgcggccgctgagctgctggagaatgggggcggcgaaggcgcaggtcttgccggtgccggtctgggcgcagcccagcacgtcccggccggtcagcgcggggggaatggcttttgcctggatgggagagggctgctcatagccctggtcggccagggcccgcaggatgggctcgttaaggccgagttcttgaaaggtcatgttgttcgtcctttacagcgttttggcccctcctgcgccggggggcggttgcgggtcataccccaccgcgcagaggtgggggaaaacgcggcaaagcccgccggaaaaccagcgggcatttcgcacgcgatattcgtactcctaaagtataccacaaatttggaaaaatacaagtgggcgcggctcagccctgggcctgggcggtgttgagccccagcaggccctggagcacggcggctaccgtctcctccagccctctcccctcccccacgtccacggtgaggtcggcgtaccgccggtagaggggttcccgggcggcgtacacgtcggccagggtctggcccggggccatggcgatgccccgggtggtgatgttgtgtatccgccgctccagctccggcagagggacgtggaggtagaccacccggcccagggccctcaggtggccgatggcccccgcccggcagacggcgctgcctccgggggcaatgacggcgcccgtgcaggccagggagcagatggccgcctcctccgcgtccaaaaagggctccacgccccggttgtccagcagctcctgtaggagggccccctcccgctgctgaatgaggaggtccacgtccacaaactgaaagcccagggccttggccagcaggacgcccacggtgctcttgcccgagccgggcatgccgatgagagtgatgttattcaatctgatttgctcctttttacatggttccgaccgcgccccagggcagctccaggggaatctgatggacggcagagggggtgctgctgtccggctccccctcgtacaaagccagcacggccccgccggaggcatcctcgggtacaaagaagatcatctggccgtacagggggtcctcccactgggcgtcggagagggtgaccagatatacccccgcgtccttgagctgccgggccagggaggcgtcgtcctccgccagaaaggcggtgccgtcctccagccgcagctcggcgggaaaaaaggtcaggtcgtcccggcgctcgcccccctccacccagagatccacggccaggcagcggaagccctcccgccgggccaggggtacgtaggtcagatccacctcccaggggtcctccacggtcacctgctgggtaccgtggatggaaaagggctcccaaagggcgtgagtcccgccggcgggctccgcctgggcaaccgcccccggctctgggcggcggcccgcaaaggcttcggacaggttaagcataagacccaacacgaagggcaggacaatgcagaggaggaacagcgacacgagcacgatcaccagaagcttgagcggggagcgctgcctccgtgcggggggctcctcccagggcgtccctccctgggggccgccgtaggacaccgtccgggggcccaccggtggggtcttgggctgggccgccgggcgcggccggtccttggaagcggctgaaacgcgggcgggcggagcctgcgccgggcgggcccctgcgcggtccggcgggggattgtagctgccgcacttgggacagaagtcgtcgctgtcgtagtcgtagggccggccgcaactcgcacaggtcaccttccgcatgaaaatgcccccttctcggattttcctcagagttaattccattataacagaaagcaggcccggcggcaaccgtcctccggccatgaccaaggcttcataccgcacttgacggccgacagtggtttcttataccataaagcggtacggaatggtataatggagccagaccttgcaccatctgtaccggtcgcaggccggagaaacagccatgagaaagagaggacatccacccatgaccaaccgcttggaccgcgacttccacctgccggggctgctgcgctttgccctgcccaccattatcatgatgctggtggtcagcctctataccatcgtggacggggtgctgatcgcccgcctggtgggggaaaatgccctggccgccgcaaatgtggcctatcctgccatcagctttaccctggccatggggatcatgctgggcaccggcggctccgccgtggtggcccacaagatgggggccggatatctggaggaggcccggagggacttcggctttctggccctggtggcggtgtgcatcggcctggcggtctgcctggcgggggccctgttcgccgggccgctggcccggctgctgggggccagcgatctgctgctggacgatacggtcacctacctgcgggtgcagctctgctttgcacccatggccatgctccagctcctctttgagagcttctttgtcactgccgggcggcccggcctaggcctggggctggcgaccgcggcgggcgtcaccaatgcggtgctggactatctctatatggggcctatgcagatgggcatactgggcgctgccctgggcactgttacgggttactcgattcccgccgtggcgggggtgctctttttcctgctccgccggcaggggctccgctttggccgcccccacggggatctgcgcatgctgggccgggcctgcttcaacggcgcgtccgagatggtgacgaacctgtccatggcggtgacgacctttctctttaacgctattatgatggcctacctgggggaggcgggcgtgtccgccatcaccatcgtgctctatgcccagttcctcctggtggccctgtatatgggcttctccatgggggtggccccggtattcagcttcaaccggggggcggggcggtatgaccggatgcggcgtattttcggctactgcctgcggtttatcctggtttcgtctgtggctattctggcggtggccctggccctgtccggggtagtggtggggatcttctccacgcccggctcccaggtgtacgccatcgccctggacggcttccgccggtttgcccctgctttcctcttcgccggggtaaatatcttctcctccgccctctttaccgccctgtccgatgggcgcacctccgccattatctcgtttgcccgcaccttcggcttcctgctgctggggctgcttctgctgccccgcctgctggaggtggacggcgtgtggctggccgtgccgctggcggagctgctctcctgcctgctgtcggtctggttcctccgccgcaagcgggccgacttcggcttcggcggtggggatctcccccgacacggtggacgcggcggcggacggacctgacggaagcgaagccattataaaagcccccggcgcaacgcgccgggggcctctcattgtactttttagaaggtaataatgccctttttcagaatcttgcggtccagcagcttctggtaggcctccacggcctggtcaaaggtgaagtagtcggaaataaagtccttaatgttcagctcaccggagcgcatccactctaccacctgggcgtgggcctcgccttcctcgcgcttgcggggcatctgctggtaaatgacgcgccagttgtagtcggcagggctgaagtcgatggtgacctcctccttttcgggcacgccgtagcacagcactgagccacggtccttgataagccccatgccctggtttacaatggcgggggaaccggccgcgtccagcacgtagtccacaccgccggggaagagcttgcgcacctcggcgcgcacatcgcactccttgctgttaatgaggtgagtagcgccgtaattcctggcctgctccagtttttcgggcaggatgtcgcaggccaccagatcctttacacccagcaggctcataaacttcaggtatgtaagacccacagggccgcagccaaacactaccacggagtcctggggctggataccgaaatagcggatgttggagagcacctcacggaaggtgacgatcatagtggcgtccacggggtccagatcgtcgtccagcaccgtctgagcaaaggcgcagtcgggagcgccgccgggccagggggctttgggatcgcacaccacagcgtactcactcaacgcgccccagccggagcccagcccaggcaggttttccgggtcaggatccacaaagggtagcagcaccttgtcgcccactttaaggcctttgaccttggagcccacctccacgacttcgcccacgccctcatggcccagcataatggggtagaccgattcggggaagcccttaaaggtgcggtggatgagcttgatgtcggtaccgcacatgccgcaggcaatggtcttaaccagcgcctgatactcgttgtaccggggcttgttgacctcgtgaacggtaatcctgccatctctctcgacgaccagcgttttcataaaaaaggccctcctttaatgaatatcgtaatattggaatgtcactacataacaagataaaaaacaaagcagcatgtatttacaagagagatcataacacaaagcatttaaaaatgcaactaaattggatgcaaaaataaaatgagttttatacatatttccatggaaaaggaaggaaataagcggtatgatactgcatatattatgatacaaaaacggttcctattacgcttgtgtgcagaatcaataatttggacagtgaaaaaacgtaaattatgcaccaatttataaaagctatattgacaagtttaaaatttgagctatactaagggcaacgatatgttactacatagtatcaatgcaacgcagtccggcgcaaaccggataccataaacacaaagtcggccgcggacaacggccgttttgtaagcaaggcaacccaatacaagaaggaggaacacccgaatgaagaagaagaaactcattgcaacggtcctctccgcatccatgctggtcggactgctggccggctgcggcagcagcacagatccggctgaaagccccactggcggcggtgaaaccaccccggctcagggcgagaccactcccgcccagaacgacgtagactatgccaattttgtgatcgatcccgcccagatcccacaggaaaagctggacaccaccctgtacctggccgtctctgtccgcggtctggagaacccgtacatcgccacgatcaacgagggcatgaagctctttgccgaatatctggattccatcggtcagaagtatgagatgcaggtgctggattcccagggcgacagcgccaaggaagtcgacaacatgcgccagtttgcggccaaggccaacggcaacgccattgcctacgccgatcccaacgaggacaccattgcctactccctggctgaagccatggcggagtccggcggctatctgggcacggcctggaacaagcccgccgatgtgggcccctccgatctggaccccaactgggtgatccacacctcccccgacaacgtggtgaacggctacaatatcgccaaggccctgttcgactccatgggcggcgagggccagatcttcgtggtgcagggcctgctgggcaacaccgcgtccaacgcccgttatgagggccttcagaaggctctggaggagtatcccaacattgaggtcgtggcggacgacacggccaactggaacaccgacgaggctctggctctggtcgaaacctggctgacccagtaccccgacgtgggcggcatctggtgcgccaacgacaatatggccactggagccctgcaggcgctggacgcggcgggcctgaagggtaaggttggcgtgtgcggcattgacgccaacaccgatattgtggaggccattgccaacggcgaggccaccgctaccgtctcctccaatggatacctccagggcggctataccctggccatctgctacgcggcctgggccggcctgctggaccccgccgcgctgcccgccgacttccgcgagtttgccacccccactgtgctgattgacagccccgaggccgcaaaggattggcagaactacaagccggagtttgacttcagccgtccctttgactgccgcgtggccgggtgaccggccggagcaccaatcctgaataacggatagtcagaacggccggggctgggatcgtggtcccagccccggcttcatattaagtctcgccgtcagagatcgctgccgtggtgtgagggagtggtccgtcctagagcgaaattggagcgacgattatgatgaaattaaatcctgcggcgaccatcacggaagagttcgccgaacgcatcaagagtgaaaaccgcagcgcaaaaatgatgaagctggcaccgttgatcgtgctggcctgtcttgtggttgtctttctcattgtctgtggggccagcttcctctcccccaagaatattatgaatattctcaaccagatggccctgcccttggtagtggccctgggactgacctttgtcattatgctgggcagcattgatctgtccattgacggaagcgtgggcatggcgggctccctgtttgcctgctttgtcctcaacagtgaatttgcgtacgatctgggtttcctcagcgtggttattgcggtaggtgtgagcatgctctgcggtctgctcatcggcctgtgccacgtctacctcaaaatcccctccttcatggcctcctttgcctttatgtacatctgcaagggcatcggtatggtctcttaccaggggcatcctcccacgatcaaggaccccgttattacggctctgcccaccaccaccttcctgggcatcccctttatcacctgggttgccattgtgatgttcctgctgtgcttttttattcaggagtataccgccttcggccggcatatttacgccgtgggcaccaatgagaacattccgcgctccgtgggcgtcagcgtggaaaaagtcaaaatcggcgtgtttaccctggccggtttcctgttcggcgtggcgggcgtcatcggcgctatccgcctgggccagggccagatcgccatcggcgacgacaagatgtttcccgcccaggcggccgtggtggtcggcggcacttcgctggccggcggcaagggcggcgtggtcaacaccattgttggcgtgctgattatgacggtgctggataacggcttggtcatgctgaacgtcaacccaaacattcgcaccggcgtccagggtgtcatcatcctggtggccgtcattctgactgcggcccgcggcgccaaggtcatcagcaaataagggggcgggcagaatgagtgaactggaacgcaagaacggcccctccgcagtggcggagaccgtgaccaaggacggccgccggattggaacggaggtcctcttcagcgccaaggacatcaccaagacctttggcggcacccaggccctgaagggagtggagcttgagatccaccccggcgagatcgtgggcctggtgggcgagaacggcgcgggcaagtccaccctgctgaagatcattatcggcgcccaaccccagacctctggtaccatgagcttccacggcgccccctatgaacccaagacccccatggacgccaacaaggcgggcgtgggcatggtctttcaggagcagtccctgattgttaccctgaacgtggcccagaacattttctttggccatgaaaaggacttcaggaaggccggcgtcatcaactgggccaagatgaaccgggcggccgccgaggttctggccgcggtggacatcaccaacatcagccccaccaaaaaggtcagcgatctgaactttgccacccgccagatggtggagatcgccaaggttatgaacgtcaccaagcagtccggcagcgaacactgtctgatcctgctggacgagcccacttccgtgctcaacgaggctgaggtggaaaacctctacaagcagatgcgcaagatcgcggcccagggccatgcggtcatctttgtctcccaccacctcaacgagattctggaggtcaccgaccgcatctatgtctataaggacggcaccagcgtgggcagcctggacaccagggacgccgacgaggccaagctgtacgaaatgatggtgggccagtccaccaccacggagtactaccatctggaccgccagaccgcaccccaggatgatgtacttctggaggccaaagacctgggcctgcacggaatcttcaagcatgtcaacttccagcttcaccggggagaggtgctgggcctgtgcggcgtggtgggctccggcgcggaagaggtgtgcgaggtgctctgcggcgacgagaagccctccttcggggaaatctcggtccgcggcagggccgtccgcttccgctcgcccaagcaggcgctgagggagggcatccttatgatcccaaaggagcgcctgtttgagggcatcgtctctaccctgtcggtggaggataacattgccctgtccaacgccaagcagatggccaagggcccctttgtttcgggcgcggcggtgcgcaggcaggccaagcactggattggcgagctgcggatcaagacccccgggccccaggcgctgctgcgccagctctccggcggcaaccagcagaaggtggtattctcccgggccctggccagcggtgcggacatcctgctgctcaaccaccccacccgcggcgtcgatgtgggcgccaaggaggagatctacgccctgatccgcgacatgacggatgagggcaaggctgtaatcgtactgggcgatacaacagacgaatgtatcggcttgtgttcccgcctgctcgtcatgaaggacggcctggtcaccggcgaatttgacgcccccgccgaccacaagccctcccaggttgacgtggtcagcctgatgatgtaaggaggaatcgagctatgaagacaaaaactcccaatgtgtccggcaggagtgcatggctgcgggacaacatcacaaaatactttagcttttcggccatcattattctgctggtagccctctccctgacccaggacaacttcctgggcaccagcaacctcaaaaacctgctgcgcgacacggcgcctctgatgattatgtccgcaggcatgacaatggtgcttctgttcggctccattgacctgtccatgggcgcggtgtgctccgtatccaacgtgacctacatccacctgatgctggctttccaggacagcttcagcaatcctttcctcaccagcctggcggccatggcggtctctctggcgtttggcctggcctccggtctggcgctgggcatcattcacgtcaagctgaaggtaccctccttcatcgcctccctgggctttatgtccctatggcagtcggtggccctcctcatcacgcagaaccccgagtcggtgcccaaagccctgtggggcaccgtggagtggtacaagatcgccttcggtgtggtgggcctgcccctgattgtggcaatcgccattatcctgttcatccactgtgttacccgttacacccccagcggacggaccatttttgccatcggcggcaacgagcgcactgcccgggtggccggtatgggcgtggataggacaaagattctggtatttgccatcaacggcgtgctggccgctctggccggtatcttcctggcggccaacctccgctccagcgcccccaccatcggcgacccctttaccctaaagattgtggcggcctgcgccctgggcggcacctcgctggccggcggcaagggcagcgagctgggcaccatcctgggcgtgtttaccgtggccatcattgaaaacggcatgaactttatcggtgtcaacgcctactatcagaacattgtctttggtatctttgtgttggcggccatcgcccttacggtggaccgcagcatccgcggccagatcgtcaagtaagaaagaaggagtgcctcttatgtccgatgtaaaaccgtttgtgctggactttgaccttgtaagcggcttctgcacgagcggcaaggtcaagcctacccagcgcagagtgtccgacatggtcgcccagtttgccaatgaggcggcggcccgggccatggtggaggggggcgaccccctgctgtatgagttctacggcctggatctgcccgaagacgactccggcgtgctccagttcggcaccaccatcctctaccccggaaaggtgggggaggagtatttcatgaccaagggccactttcacaccatcctggacacctccgagatctactacggcctcagcggccacggcatgatgctgatggagacccccgagggccaggtggactggaaggagatcggccccggcgaggccctctacgtccccggacgctgggcccaccgcagcatcaacaccggcaccgagcctctggtgatgttcttcgtctaccggggggacgccggccacgactacggcaccatcgaggagaagggctaccggaagctggtggtggagcgggacggaaggcccgccgtcatcgacaaccccaaatggaaggtgtagccccaccctttgcggccgtcctgtttgatctggacggcgtcctgcgcaacaccgagccataccaccgcatggcctatgcacagctggcccgcagcctgtccgggggcgcgcccccggacgccggagagatcgcgggtaagtccaaccttcagctctatgaggctctggtggcccgcttcggcgggccggccacggcggaggagctgtcccagcggcacttccggctggtctgccagctgctggaggagtaccgggtggggccgatgcccggcctggaggaggctctgtcggccctgcgccgccggggcattccctttggggtggtgtcctcctcctggcgctggtacgtggagcattgcctgcgggagttggggatgtatgaggacgccgcggtgatcgtcaccggcagcgacggcctgcccctcaagcccgcccccgccccttatcaggcggcggcccgggtctttcgccctgccccgcccggcgcggtgctggccgtggaggacagcggcagcggcgtccgctccgccgtggcggcgggtctggcctgcgcggcggtatacaaccccgactcgggggcgcaggatctgtccccggcccggtggcggctgaacagcctgtacgagctgcccgccctgctggacggcaactaaaccaatccgatttttgtttacataataaggaggtcatttccatgtccatgctgcagcattccacccgcgcctggggctcccccagccgctacatccagggccgctatgagctggagaacatgaaaacccacaccgaggtctacggccgcagggtgttcttcctcattgacgtgttcttcttcgccgactacaagaagcgcttcgaggccctgtacgccggcagcgacagccagatccagtgcgagcagttcggcggccagtgcaccgaggaggagatcctccgctgcaccggcctggccaaggccctgaaccccgacgtggtggtgggcatcggcggcggcaagaccatggacaccgccaaggctgtggccgacaactacaacgcggcggtgatcatcgtccccaccaccgcctccaccgacgctcccgccatgggcctgtccgtcatctacaccgccgcgggcgagcacgtgggcgcccgccactacaagaagaaccccgatctggtgctgctggacaccgacattctggccaaggcgcccatccgcttcctggtggccggcatgggcgacgccctgtccacctacccggagtgccgggccaacgtgcagtccgcctcccccaactacgtcaacagcggctatcaccagaccatcgcctgcatcgccgtgtccaaggcgtgccacgagaccatcctgaccaagggcgtcagcgccaagctggccgccgagcagggcctgtgcaccaaggacgtggaggacgtcatcgaggccaacaccctgctgtccggcctgggcgtgcagaacggctcctgcgcgggcgctcactccatcgccgagggcatcaccgtcctggagccctgcgccaagctgctgcacggcgaagtggtggccttcggcatcctggtgcagctcatcgtggagggcgcccccgccgaggagcttgacgagctgtacaccttcttcgaggaagtgggcctgcccaccacctttgacgatctgggcattcccgacgccaccgaggccgacatcaggaaggtggccgagacctccatgcactcctactgggacgtggagcccttcgccgtcaacccgcagatggtctttgacggcatcatgatggccaacaccctgggcaagcgccgcaagggcctgtaagcgggccgcggccggacggaaaggaagcgcacgcatgaaagccattcaatacaccgccccccggcagtttgccgtggtagatctgcccaagccggagcccggcccccaccaggtggtcatccgggtcaaggcctgcggcatctgcaagaccgacctgaccatccacgacggaagctttctggccaagttccccctggtgaacggccacgagttcgccggcgtgatcgactcggtgggcagcgccgtcaccaagtggaaggtgggcgaccgggtcaccgccgacaacactgagctgtgcggctactgcgagccgtgccgcagcgacaagcccctgtactgcgagaacttcaactcccacggctgcaacatgcccggcggctttgccgagtatgtgctcatcaaccacgacaaggtgttcgctctcagcgacaagctgtcctttgaggaggccacctttaccgagcccaccgcctgcgcggtccacggcgtggaccgcatcgccccccgcttcggcgactccatcctcatgttcggcgcaggccccaccggcatcatcctggcccagctgctccgccgggcgggggcgggccgcatggtcatcgccgatccccacgccgacaagctggacattctgcgcaagtatggctttaccgacctggtggtcatggacaaggccgacccgtccaagcacaccgccgagatcaaggccatcatgcccaagggcttcgacattgtcatcgacgccaccggggccgcctcggtgttcgagtcctgcttccactttgtccacatgggcagcaagattgtggcctacggcgtctgcgccgccgacgccaaggtacccgtcagcccctacgacattttcagccaggagtacaccatcctcggctccttcgcccagacccactgctttggccgggcgctggagtatctggagagcggcgcggtgcaggtcaaggagttgatctcccacgagctgccgctggaggactacggcaagggcctggactacatcgtccagaagcaggcccgcaaggttatcattcacccctgagagcgcctcctctccgtgtgccgaaaaaagcccgcccgccccggcttggggtgggcgggcttttatgtttctcgctagggctccacgtccagcatcgccatggtggcgggcatttcgtgggcggtattgaccttctcctcgtcggtgaccagatcgaagcaggagacgatgatcttgtccccccagacgcacggctcgcccggctcgtccagctcgccgtggaagccgtcggtgtcgggggagcaggccatccgcgtcacccggccgtcgggggtgatgcgggcgatggcgttggccgagaagtcggccacgtagatgttgccgtagggatcgatggtcatgccgtcggtggacttcaggttggccggatcacaggcccacttgcggttctccttcaccgagccgtcggggttgaaggtgattttgtgcaccaccccgtcgccgaagttgccgacgtagaggttgccgtcgtggtcgaacacgatgccgtccacgccgtactggcacttggggttctcggtgataaaggtgaggaagatgtggggatcggccagggtgttggtgcagtggatgccctcggcgtccagggggaagcggtagacacagctcatgagcttgccgctgtccgtcttctggcgggtcatgcagctctgggtgacgtacatgtagtccccccagatgcggatgccgttggggtgctccatgttgtcagccaccacggtgcacttcaccacccccgcgtcgttgagccgcaggcggaggatgcgcccggtgaacaccatgtggggctctccggtccagcccgcgttgtccaccagatagaggtcgccgtcggggccgaactcgatgcccatggcccgggcctcaccggtgtactcgttgcgcggcacgtcaaaccacttcttgatgttgcggtccttgtcgattttcagcacgcagctgggcatggacagatccgcaaagttgggacaggacagaatcaggttgccgtccctgtcgatggccatgccgtcgggggtgcacaccagctcctccggcagcagggtgaacagcttggatgtttgcataaagcgcattgcctccttttacgcggtcagctccttgaggaaccggcaggcccggcccgccatctcgtccagcccggcctccccggccccgccgctgagatcccgccagaccttgatatcatagggaatggtaccccccatgagcacgaagggctccatcacaatggccccctggtagttcacctgcttgagggcggcggccatgtccttccagggcaggcggttggtggagccggcggggcggcggttgttctcccccacgtggaaatgccccagccaggggcccgcctccagaatggcgtccaccatgctgtcctcctcgatgttcatgtggaaggtatccagcagcacccgggcgttgggactgcccaggcgcttgacaaactccacgccctctttggcggtgttgagcaggtactgctcgaagcggttgaccacctcgcagcagtagagcacgccgcagtcctccgccaccttcatgagccgggacatggactccagggcaagctcctccttgcggcgcttctcgtccagggtgattccgtggtcgggcagggcctgccacccggcgtaggacacgccgttgaggatggccgcccccaccttgggcatgctctccaggatgcgggtgacatggcggatgccgttctcccgcaccgccggatcgtcgctggccaggtcgtatttggcctccaggccgatggaataggtgatgcccaggccgttgtgatcggcgcaggccttcagctcccgcagcctggcgtcgtcgtaatagccccactcggcggaggccacctcgcagatgtcaaagcccagccaggccagcttctccatcaggggtatgtatgcaatctcgtcccagttgtggctccagaagccgtagtgcattccaatcgggttcatggcgcgcctcactggccccgggcagcgcgaatcttctccacaaactggcgggcggtctcggtaatcttgccgtagtcgccggtcttggccccggcggtcaggctgccgcccgcgcccacggccaccgcgccagccgcaatccactcggccacgttgtccagagacacgccgccggtgggcatcagctcggcctgggggatggggccgtggatggacttgagaatcttcggcccgaacagctcgccggggaacaccttgatgatgtccgcacccgcctccatgccggccaccacctcggcgatgctcatggcgccgggcatgcaggccacgcggtagcggttgcacaggcggacggtgtcgccgttgaagtaggggctgaccacatactgggcgccggagaggatggccatgcgggcggtctcggggtccatgacagtgcccgcgccgatgacaaagtcggtgccgtcatactctctggccatcttctcaatgatggcgttgacgccgggggtggtgtaggtcagctcaatgccggcgcagccgccctcgatgcaggccttggcgatgcgcatggcgtcgccggcgtccttggcgcggaccacggccaccaggccgcaggagcgaagcctggcaagtacctgttcctttttcatgggaaaaacctccttacgcattcttgtgggacgccatgtactcgtagacgggcagcatggccttgtagcacacctcaaaggcctccttcaccgggccgtaggcggccacggcctcggggtcgggctccaccgtgcggttgagctcgagcatctggtcgatgacctcaaagcccttgaacacccccacgcccacgccgccggtgaccgcggcgcccatggaggtggcctcctccagcaggacgggcaccttgatgcgggcgttgtagacgtcggccatcatctggcaccagagggcgccctttgcgccgccgcccaccaccagcagctcgtcgatggggatgctcttacggaaggactccagaataatgttcaggttgagggtgaccccctccagtacggcccggaagaggtcgcagcgctggttctccattttcagccccagccaggcggcggtggcgtccgggttccagcggggggcccgctcccccagcagatagggcaggaagaggacgccgttggcgccagcggggctctttgccgcctccgcgttgatgagatcgtaggggctgatgccctgcactttggccacggcggtctcatatttggccacctggcccttgagccagttgtaggaactgccgccggcctgcatggtgccggtgggcgagtacagcccggggacgatgtgggcccaggtgaaggtgcgcatctcctcgtcaaagaggggcttctcgctggtggtggccacccaggcggaggtgccgatgcagctgaaggtgcggcccgggctgatggagccggcgcccacgttggagcacaggccgtcgccgccgcccatgaccaccggcgtacccgccttcaggccggtctgcccggcggcccagggggtgacctccccggccacggtggtggaggggacgatctcaggcagcttgtcgccgtcgatgcccgaggcgttgacgatcttctccgaccactggagggtgttcagatcaatgcaggcgttggaggtggcgtcggagggctcggtataaaacttccccgtcaggcgcaggacgatgaagtccttggcgttgagggccttgtaggtcttggcatacacctccggctcgttgtcccgcacccacatgagcttttgcaggccgtaggaggcgctgttgcggtgcccggcgatgtggtagaagtcccgcagggagatctgctcccccagggcggcggcctgggcctgggcccgctggtcggcccagatgatggagggccgcaggggggtgccctgcttatccacgcacaggcaccccatcatctggccggagaaggagactgcggcgatgtcgccggggtcgatgcgggccttgtcaatcaggttgcggctggtgacgcagatggccttccagaaatcctcgggatcctgctcggcccagttggtgttgaagtagtggcagtcgtagcggaacacctcgctggtgatcattttcccctcgtcgctgaacagggttgccttgttgccggaggtgcccagatcgtgggccagtatgtatttcattgctgtcctcccgccctacaggcccagatcgtggatgaggttggcagtagccatgcgccccatgttgcgggacgcgcccgccgtggaggcagcgcagtgggagccgagcaccacgttgtccagggtaaaccagcgggcgtccttgggcggctcggaggagaaggcgtcgatgcccgcgccgcagaggcggcccgcctccagcgcgtccagcagggcgttttcatcaatgaggccgccccgggcggtgttgatcaggatggcgtccggcttcattttggccagctccgccgcgccgatgaagttctccgtctccggcgtcaggggcaggtggagggagatgacgtcgcactcggcgaaaatctcgtcgggggcggcgcgggtgatgccgtgggtcttggcgtacgcctcgtcccagaaggggtcgtgggccagcaccttcatgccgaagccctgggcccgctgggccacgttgcggccgatggcccccaggcccaggatgccgatggtgccgccggtcacgtcccgggtggtgatcttcttccagtcgccctggcggcacttgcggtcaatgagcaccgtcttgcgggccaccgccaggagcagggccatggcgtagtccgccaccgcctcggcgttggcgcccaccgtgcgggagaccttgatatcccgggccttggcggcgtccagatcaatgttgtccacccccacgccgtatttggcgatggccttgagcttaggggcggcggcgatcacctcggcgtctatgggatccactcccacgatcacgccgtcgcagtcggacagcagggccttcatgccctccctgtccaggatcccgcccgtctcattgcgcaccacctccaggccggcggcccggagcatggcaaagacctcgggatcggttttcccgtaagaacggggtgtggtaagtaccttcatgacagagccctccccttggcgtcactttctcatttcccgggccagccggtcgcaggcggccagccgctctccggtgatgtcgatgtggaagacctcggcgatcacctgggtccagccatggataaagtatgtccagccgtcctcgatcagaagcccccggcgctcccgctgggcctccgcctggtgcatgaactccagggtgccccggtagttgagctcccacaccaggccgttctcggggaatttgcagtggtcggtgaggggggagccgggccggtccttgcccagcccggtggcgttgatgaccagggagccggcgggcagggcctccacaatcctgtcgttgagctcgggggtcttgcacagatggtagctcatggggacgttcaggtactccaggatgcgcacgccctcggccaggcggggggcggagcggttgttcaggtggatgcggctgggcagatccttgccgtgccgctcctcattgcccaggtaggcggagatggacagggcggagccgccggcgccgatgatgcacacctccgcgccggtcttaagccagtggccctcgggcacgaaggcgtccagggccaggccggaggagatggggtccttggcgtgggcgcggagctggccgtccagcttggagatggaggacagctccccgaagcgctgggcataggggtccaggtagtcgaacatatcctttgcggcgttatacatgtcaattttgtgtgtggtcaccagcgcgcccagggacagggggtcatcccggaagaactgcaccaccgcccggtagtcctcggcgggggcgtggatgggcaggtcgatgcccttgatctccgcgtccagccccagctccttggcccagatggggaacattttcatgatggaggactgtccggtggtgacgcccacaaagtacatggtgggccgtttggcgggttcggggagtttgatcatggtcaggcgcatcctttcttgactgatttggtattgaaataccggtcagccggcgaagagccgccggcaattgagcacggtgaaatccgcaagggttccgggggggaagccggccgcctccagccggggcagaaagcgctccagcaggtagcacaggctgatctcgccgccgtaggcggccatgcgctggtcggtggtgtccagagacaggagcagcctctgggtgtacccccgctcacacatgtgccacagcagcgccacctcctcctcgtcggagtggtacttgaagcggccgatggtgtcgtagtccaggtacacgccggtggcggcgatggcgtcatgggggccgaagtcggcggcctgccggtccacgtggcagacgatgagccgttccggcgtcaggcccgcccgaaagcagagctccagggcgggcagggtattctccccccgctccgtgtggagcatcagcggcaccccgcagcgcaccgccgcccgggcggccgcccgcagcaaaacggcgtaccggccctcggcgccttcggccggaatggcggcctttaccaggcccgcccgaaaggccgtcggctgcgccgggcggcggtccggctcgggccgccaggggagcatgccctccagcagctcaccgcagtagaggtcgtacaggccctcctcatccaggctgtggacccagcagtccgccgggtaaaagcccagcagatggtagccggtagaggccgccaccgccacgccgctctcccgcgacagcgcgccgaggcgctctgcatcccgtcctgcggccacgggctgggcgtccgccaggaagcctccccccgccgcccggtaggcgcgcagctcctccagtgaacgagccgggtcgtccagccggagggcgggatttttctccgccatgggcgtccggtggacaaagatgtgttcatggatctggctgtgccccagcgcgtccggtgcgatggggccgctgacggtttgcacatggaacatgacctgacctcctgataaagtatcgtaggattgtaactatgttactacataaaaggggaagcaaattccgcgcgtgcactcactcgcggaacagctcgacacggaaccggctctggtcgccccggtagtgggcaaaggagagctcaatcagcttgccgctctggttatagccgatggtctggaaatagtgaaccgggcggccccgcttcaagcccagaaccgcggcgtcctccgggtcggcggcccgggcctcgcagatacgggtgacgtgggttacccgggtgtcgtcccgcttggacagcacctgatagagggactcccggttaaagtcgtgtcccaggataaagctgcacgcttcatagggcaggtaggtctccacccggacgatgggctcgtcgtcggcaaaccgcttgcggtagagatagatggccttggtgcccgcgggcagctccataagctgcgccacctcgggctccagctccaccagcttgagatccagtacctcggtgctgggggtacggccggtgctgcgtacgtcgtcgtcaaaggactggatgctctgaatgaagccctgtaccagcttggggtgggccacaaaggtgcccttgctcttgatgcggtacaggtgctcctcccgcaccaggtcggagatggcctggcgcacggtggtacggctgatgccgaacatctggctgagctccatttcggtgggaatcatgctccccaccgggtaatttccgttgtcgatctcctccaggatcagcttttcaagctggaaatacaggggaataggcacatccttatccagtctcttgtcttccagcatggcacgatcccttcctctctttttacaatcattgctttaactagattggattgttgtaacatatatacattatagtctataaaggggccccttggcaagggggtcaggcaaattctctaattttgcacaaagaaatgagtcagatatcgccgaactgaccagtcgcagccagacgctgcgcggcctacagcctctggctgaactccaccgtctctccgttggggcccagtaggttgaaaaagcgcacgccgttctcccagaaggggaggaactgaatggcatcttccaacggagccaggccggccgtccgcacttcctcccaggcggactcaatgtcgtccacgtccagggccaggtggtcgatggctccgggccggcgggcgggcgcggcgcactcgtaggtttcgatgcacaggccgccgcaggtgagaaagcacacccgctcccccgtgccgggattgacagtgctgtgggcccggacaaagccaagggactcataaaaagcggcggtctcgtccagcgcggcggtgggaagccccaggtgctgtaggccggttacatgctctgcaatgctcacggcgctcccctcctcagtcgtcgctggggtccacgtcgatgaggaccttcatggtggtttcctggtgcgtatcgatgtactcgtaagcggccagatagtcggtaaaggcaaaatgcctgctcatcaggggttggagctgtaccatgccctcgcgtacaaagcggatggcatccacatagtcctcgtggcgatacatcatggtggtgttcagatccagttcggagtcgttgagcttggccagatcacagtgggccaggccagcgtacaccgcaaccaagatgatgacgcttcccttccgggcgttctggatggcctgatccatggtggtgtcattgcccgcgcagtcgtagatgatgtccgccttgtcggggccgaagcactccgtcagagccgcgccaaaggggcgggttttggtgttgacagcgtaatccgctccgcaggtgcgggccagctccagccgatagtcggagatatcggtggccatgacctcggccgcgccaaaggccttcagggattgaaccagcagaatgccgatagggccgcagcccagcacgcataccttcttgcccgctacgtcccccgcccgcctggcggcgtgcaccgtgacggccagaggctccagcatggcgccctcgtcatagctcattcccgcaggcagcgccgtcacctttgaggcgtccaccgcgaagtattcactggcagttccggtggtctgaaagcccataacctttaggttctcgcagaggttatacttgccgtgggtgcaggggtagcattcgccgcagtacacctggggttcaatggtcacccgctgacccacctggaattgggtgactccctcccccagcgccgcgacctggccggatacctcgtggccctgggtgaccgggtacttggtgtaggggtgcttgccgtggtatacgtggatgtcggagccgcagatgccgatgcgcttgattttcaccagcacctgcccgggcccggccgtgggaacgggcaccctgtcaaaccggatctccctgggggccgtcatcacttcctgcagcatggtttcttgcatcatactcacactcctttgtttggtcccgtccggtgtgcagggaggccggacgggtaaaatccatctatatcatgcgagtatgggaggggaaagtcaagaggattttcgtgaaaaatgcacagaacatcaggtaaaatcagcaccccgccggggagagagcaggggcactccggcttacccggagagcccctgctctggaatcagccctctgtgacgccgataaagccgccgccggtggtgtaaatcttatcaatgaccacctcggctggatccccagaggtgggaaccgggtcggcgggggcctcgggggcggtcagatccaccactacggcccccttgggaggcttggtttcaggggcggtcttgccctcggtgtaccggccggacatggagaattccaagtccatcagaccggcggcatcacactgcatggaggcctccatcctgccgtcggcgtccatggactcctggaggaagatggacatgggagcggaaccgtcgacatcggcggagagctctacggacaggtcataggcggatacgtcatctccccgcatggtgagggtgaaggtgaagtcggcggccacgccgtcctgctccagggcgtagtgaaggatgcggtcgttcccgctgaccgcccaggcgtcgtcccgcaggagctgggcggccaaatctacggcctgggtcagctcggaataggcggtgtccttgtcattgggctccacggtggagagaagcagggacagcagggcggtatagtccacgtcgccggtggtcatctccatgagggcaccgtagtccaaccccatgtcctcatatatggcactcatatccatagagtaccaggtgtcggcgggcaggccggcggcctgctccaaaaatgctccgcccaggctgatatagagctgtccggcctccagatcgccccggagctccatatggataccttcctcggcaagggcatccaacaactgggtatcgctggcgctcatacctccgttctggccatccgtcagagccttcaggaaggggcgcagatccatagtcaggcccatagcggcgtccatcttcgcgccgccggccatgacgccctccagagtgccatccagggtaatgggcgcagattccgccgtacttcccagaagaaggcctgtcatgtccagagaggcgtcaaagtcggcgttcatgtcccagattcccgtgcggtacttctggccgtatgccaggtatttttccagataggtaaagtcatacttggatagggtctcctccaccagcttttccatgtcaatgaggatcacggtgcggtcgccgacgtcccagcccacggcgcagccaaaggcctgagcggcgaagcgtacgggcacataggtgcggttgtcgtgggcgtagggggccgcgtccatggggatgtgggtggtgacgccgctgcgctccacggtggctgttgtgccgcccagggccatggtgacggtggtgccgtcccgaacggcggtaatggtctgagcggcgggggaatagcttacctcggcccccatggcctcaaacacggtgcgcacaggcaggaaggtgcggccgtccctcgcctcaggtgcggcgtcagggaaggacagattccggccgtccagttggacggagatgccggtggatggggcggaggcggggacggactccgcggccagggcggaggtgccggtacccaacagggctgccgcacaggcgacagccagggcgcgcttgggaagtgtgtgcatgattccattcctccttttatcggtagagccactatagcacgctttttttgcggtgacaagagggcgggagctcttcttatgaggaaaaatcaaattttttactttgcttagtcatgtttggaataatcatcgcagagcccccgtgatactgtcaactgaggttacctatctttgggataaacggggtgcggagcttgaagatctacagaccgggcggggctgagccaggagcagctcgcagtccggctccaactggacgggctggggctgacccaaaaggccatcagccggatggagaccggggagcgggtggtggcggactatgagctggtctacctggcccgggcgctggaggttggcgttctggagctgctgggcctggagccataaaaaggggggcgttcccgtagggaacgcccccctttttggggttagatgggcctgtgctccagctccaggcgccgcttttcgagaatgcgggggaggcgccagaagaagatagcgccggtggtggtggtggccaggatatcggccaccggctcggccagaaacacggcgaaaacctggtcgctgaggaagcggggcaggagcaggatcaggggaatcagcaggatcaccttacgcagcagggccagaaagagggagacgcgggtctggcccagcgccacgaaggtctgctggcaggagaactgcacccccagcatgaacataccggcggcatagatgtgcagcgcccagacggcgatctccaccagctccggcttgtcgttaaacagcgagacaaacaggcccggaaagagctccagcgccgcgcaggcggcgcagctaaagcacagggaggagaaaaagagcaggcgaaaggtccgcttgacccggtccaactgcccggcgccgtaattatagcccacaatgggctgggccccctgggacaggccctgaaacagaagggaaaagacctgcatgatactggagcagatggtcatggcgcccaccgccgggtcgcctccgtaggtcttgagggaggaattgaaggcgatgttgaccagactctcggtggactgcataatgaagggtgagagccccagggccagcaccggagccagcaccttggcatccagacggagaagccgccgctgaatccgcagcttggtgcgcctgccgcacaaaaagcgcaccacccacacggcggagacggcctgggcggtgatggtggccagagccgcgccctttacgcccatattcaggccgaagataaggatggggtcgaggacgatattgaccaccgcgccgataatcaccgaggccataccgacggtggagaagccctgggaggtgatgaagaagttcaggcccagggccagctccacaaaaatggagccgtagaggtagatattcaaatagtccatggagtaaccgatggtgttctccgtagcgccgaagaggtagagcatgggctccttgcagagctggaataccacggtggcggccaggcccaggatcatcagcaacagggtgcagttgcccagaattttgttggcctcgtccagcttcccctcccccatgcgcaccaccgcccgggagccgccccccatgcccaccagggcggagatggcggagacaaacagaatcacggggaagcagatgcccaggccggtgagggcgagatcgccctcaccggggatgtgcccgatgtagatgcggtccacgatgttgtagagggcgttgaccaactgggcggtgacggtgggcaccgccagccgcaggaggagcttgccgatgggatcgcggcccaggtcgttttcgcgctttgccatgaatcagctctcctccttttccaggaaataggtggcctccatgtcggccacgctgagggcaaaggccaggggatactgctggagggcctggcccaccagccgcttgtcctcgtcgccggagaagcccatatgccagcggatggccatggcctcctcccgggtgaggcgcaggaagccggagaggatgtagacgctcttctccccgtggccgtagggcagggggtcctcgtagaaaaaggtgggcaccgcctgccacttgccgtcggggcccttcacgttgcgggagccctgcctgtagcagcccgtcttgcacacgtcgtggagcagtgaaaccagtgcgacgctctccgccgggtactccaggccgtacagctccttcacccgctcccgctccaggtaggcggtcaggcagtggtagacattgacgctgtgctcacacaggccgcccgcgtaggccccgtggaaccgggccgaggccggggcggtgaaaaaatcgcttttgtgctccaggtagtccagcagggcgtccgccccgtcccgccggatgttctcccggtagatctcgataaattcttccttggcgctcatggagcagtctccttttctgtttgacagatagataagatccagtatagcataaactccagcgaaaagccaccctcggcacccctgtttcacacctggcataggatgggcggaataggaggagtgctatggaatggctttcgctgcttctggccgcggtcctgtttgccgcggcctgtaatctggatactgtaattctctccatgggctacgcggtgaagggcgtgcgggtctccctgtcccacagcctgattatcgccgccctcaccaccctgatcacctgggcctccctgctcctgggggccggggccgcccgggtgctcagcgggccgctgcccaacctgctgggcgggctggtgctggtgggcatcggggcgtggttcgtgctggactggctgcgccgcctgggacccgccggggaggcggaaggggaaaaccgggccgccaccctctgggggtgcgtctccctggccgccgccctggcggtgaacaacgcgggcatcggcgtggccgccggggtgtccggtatcgcccccggctgggcggccctggcgaatttcctggtcaccctggccgccctccccctgggccgcgccctgggggataagctggccgggcggctgctgggcaaatacgccctccccctctccggcgcgctgctggtgctgctgggcatctgggaggcggtgggctaggccttgtttgaaaatagtcaacacgcccaatcgccgggccgtttgccctctggacggcccaatttttccttgaaatccgccaggattcctgcgaaaaaattgcttgccagcgggtaaaattcctcgccgctggccatattgctatttttcaaacaaggcctagtcctggcgcggcgggcggagatgtggtagaatacccccgaaagaagggattgcatatgacgcttttggagcgcctggggggccgggaggccatcacccggggcatcgtacacaccttccgcatcctctcccgccgcccccgcccctcccggcacgaggaggccgccggggaggagctggacgcatacctgcgggggctgggcctctcccccgtccgggacggggcgggcaaccggatggccgacgtgccccccgcgccgggccggggacgcgccccccgcctgatcctccagggccacctggacatggtgtgcgccgtccggccgggcagcggctggaaccccctcaccgacccggtgacggtggtggaggaggggggcttcctccgctcggacggccgctcctccctgggggcggacaaccacctgggcaacgcggcggcgctgtggctcctgtccaccggggcggtgaaccacgggcccctgcgcctgctcttcaccaccgccgaggaggtggggctggagggggccaaggaggtggcgcccgactggctggccggggcggaatacctgctcaacaccgacggctttcacctgggccgggcggtggtgggctcggccagcggaaggcgggagacctgggccgccccgctggacgccgggccggccccggcgctccccgcctggaggctcaccctctccggcggccggggcggccactccggcgacgacatcaaccggggccgggccaacccgatcaagctgctggccgcctatctggccgggctgcccggcgggcggatcgcctccctctccgggggcctgacccacaacgccatccccgcccaggccgaggcagtggtattctgccccgcggagcccgacctctcccccctgcggggcgccctggccgactaccgggcggccgatcccggcctgaccgtggcctgcgccccggcggagaggccggagcgggcgtggacgccggccttccaggcccacgtcctggcctttttgatggggctgtaccacggggtgtacgccatggagccggccttccccggtacggtgggggcctccgccaacctgggccgggccgggaccgagggggatgtttatgaggtgtgcgccttcctgcgctccgcccggccggagtgggaggcggagctggctggccggcacatggccctgggggcggcccacgggttctccctgtccgtcaccggctaccccggctggcccggcgaccgggccaaccccctggcggcggtgctgggccgggtgtggcgggagcagaccggccggacgctggagctctccgccgtccacgtggggctggagccgtcggtgttccgggccaaggccccggggctggtcatggcctccgccgggccggacattctggacgcccactcggtggatgagcgggcacccctggacgggctgcccgattacgccctgctgctggccggggcgatggaggccctttagacgggcggccgtccacgcaatacaacagggtacaagcaagaaagtacgcgccgcccgccggagttccggcgggcggcgcacatgtttacgcgtaaatatgatccaggatatccacaatctgcgccacgcagctctcctcgcaggcgcccaggatacgggcgccccactgcttgacctcgggggcgcagttggcgggggcgaaggggatggcggagacggccagcatggggatgtcgttctggttgtcccccacgcagtagatgtgctgggcgtcgatgcccaggcggcgggccaggtactgcaccatgccgcccttgctgctccccttccgggtcagctccagcagcacccggttggagaagatcacctcgtaatgctctccccaccgctccagcaggtagcgctgggtgtgcaggagggtttcatagtcctgctggagaatgaccttgctccagggcagggggatatccgcaatgggcacctcccgggcggtaatgcctgcccgctccaggtggcgttgggtgacggcgttgggctggtagacgtagatggcgtcgtggtggtaggcctcaaagccgatggtgggaatggcccgggccatttgctggagatcctcccgcacccggtcgggcagaaaggtctcgtaaatcatctcccctgtccggaagtcgtacagggcggagccgttggacagaatcaccggcgcgttgatgggtatgtggctggcgtggggggcgaagttggggcgggcgcggccggtggccacagtgaaggtgcccccctcccgggtaaagtaggtcagggcctccacattttcccgggtgatgcgcatgtcctccccgtagagagtgtcgtcaaaatcgctgaccagcagcacgccgttgaatttgcccaactgattcacaccttaccttctcagatcggcccccgtcatatacgttttcagcggtgcatagagaatgccaaaaatcaccagacacaggacaaggtcaatcccgacatagctgccgttgtagataagggagtagagggcgggattgtcgaatactgtgccgaagatctccgtgggggccagaattttgtaaatggtgataccgctgatatagtggacaacaaagcgggcggctccgcccagcacgctgccccagaagatgccgtggggcttgccacggcccaggccggcgatgcccataacaccgaaggccagcacataatccagcaggatggactgccagccccagcttaccgcgccctggatgaatacctggagtacgccgaaggcaaagcaggcgatgaagccgcctcccatgccccagcgcacgcagaagaacagcagggggagcatctccagcgagatggagccgccctggggcagctcaaataccttgagaagccccagcaccagggcaagggcgatcatgagtccgccttcgcaaagcatccgcaccagcagatacatacggcggcggccaggggcttttgtggtgacaggttcagacatagagctcattcctcctaaaaaatgtaccgcagcgcaaaccggaaacagcgcaatgcggtacgggagaaacgacctctatcgtcgaatactcttcctacgccggcattacccggatcaggtttaagggacacgggcggccatacgccctgatctcagccggacttgcgtccagcacccctgcgattcgatttgttctacggttattttagagtttataccaaatggcgcagctttgtcaacacttgggtaaaataggcaggcagggggcactccacggtgacccgctccccggtgcgggggtggacaaaggagagccttctggcgtgaaggcactggcccgccaggccggggacgggcttcttggccccgtataccacgtcccccagcagggggtggccgatggaggccagatgcacccggatctggtgggtgcggccggtctccagacggcactgaatatgggtatagccggggaagcgctccaacaccgtccagtgggtcaccgccggacggccgtttttccaatccacgcacatcttcttccggtcggtggggtggcggccgatgggcgcgtccacagtgccgccgtcctcccgcaggccgcccacgcacaccgcctcgtactcccggtaaagggagtgatcctggagctgggtggccagggcctggtgggcatagtcgttcttggcggcaatgagcagccccgatgtgtcccggtcgatgcggtggacgatgccggggcggagggctccgttgattccggagagtgattcaccacagtgatataacagagcgttgacaagtgtgccgtccggatggcccgccgccgggtgaaccaccaggcccaccggcttgttgaccacaatcacgtcggcgtcctcatacgccacgtccagggggatggcctgggggagcacgtccaccggctccggctccgggaggcgcacctccagcacgtcgcccgcggcggccttgtcgttcttctttaccgggcggccgccgagggtgaccgcccccgcctccagcaggcgctgggccgccgagcgggtcagctccggcaccagccgggccaggagctggtcggcccgctcccccgcccggtcagcccgcagcagaatcggctccatggccctcctccttgccgtggaagaagaggtagtacacgcagaacgcgatgccacccaccaccacgcagatatccgccacgttgaagacggcaaagcgcatgaacagggtctcaaacatgtcggtgacgtagcccagcagggcccggtcgatcaggttgcccaccgccccagccagcaccatggacagggcggccatggcgaaggggcggggaaagacctttttcaccagcagcaccgtcagcaggacggacaccaccagggacacaatggtcagaatccaggtgtgctcctccagcagggagaaggccgcgccggtgttctgcacataggtgagctggagaatatgggggagaaaggggacgtctccccccagggggatgttggcccgcaccaggaacttgaccacctggtccagtaccaccagggccaccacgagaacggcatatagcatggacaaagggctccttttcttcggttttgctctattttatcacggcctgccgccgggggcaacccggaagatcaaatgtagattccaattgaaagaacaagaaaaatctggtatactggggcaaaaagccgaaaggcggtgagtgcgttggatgaaaggcggaccctttcgttaaatgtgttcctgaatacccttgaggagggctgtaaaaacgagcggcgctactgcttcatcctgggcgccggggcctccaagacctctggtatccccaccggggaggaactggccaaacagtggcacggggagattttggagcaatgctccaaggaggagatcaaggagctgaaaaagcggctgggggtgcgctcgaccaagccgtccagccgggcctattttgacctctatgccatgcgcttttttccggactatcagaacggctccgctttcctggagcggacgctggagcgcgcccagcccagcctgggctactatcccctggccgccctgctggccaacacgcgcaacaacctggtgatcaccaccaatttcgacagcctggtggaggacgccctgtttatctacacggataaaaggcccatcgtcatcagccacgagctgctggcccagtacatcaacttcaacaccagccggcccatcatcgccaagctccaccggggcctgttctttgaccccctcaaccgggccgagcaggtcaacggcctgtcgaagcagtggaaggatatcctgcgggaggccttcaagcgttatacccccgtggtgatcggctatgccgggggcgaccacagcctgatggactttctgaaggagaccgagtgcctgagcggcctctactggtgctaccgccacgacgagccgccggaggagattcagaaggtggtggagcgccacggcggatactttatccccattgagggctttgacgagatgatgtacctgatggggcagcggttcggctatactgacccctgcgagcatatcgaaagcgcggccgagcagcgggtgagggactatcaggagcaggtcaaggcatttcaggagaagctgcgggccgcggagacccccagcgagacccagagcgccatcctccgggccatggacgccaaacagcgggaggagcttcagcggctggaccgccgcatcgagctggacgaggaggacggggaggcctactgggagcggggaaagctctactattttgccaacgactatgcccaggcgctggaggacttcaccaaagccaaagagttgggaatggaggacagcaagctctactggtataaggggttttgctacagaaggttgggagaaacagagctggcaatccgggaatacagccgatcgctggaactaaaggagacttcggaggtgtaccgcaatcggggcctgtgctttaccactgtgaagctgtatgacaaagctgtccttgacttcaccagggcaatcaaactgccaccgggggacaagaggctttacagggagcggggcagcgcttaccaagctctggaggagtataaaaaggcccaggccgattatgagaaggcgctggagctggaaccggccgatgcggagctctatacgaccttgggcgatgtgcaggaaaggcttggagaggtgcaggaggccctgcagagctaccaaaaggccatccagatcgaccctaattatgcaagagcctataacaaccggggggttgtatacttgtcccagatggagacagaaaaggcgctggccgatcaccgaaaggcggtcaaactcgcgggagatagggcgctttatcatgtgaacgtgggaattgttctcaacaggctggagcgatacagcgaggcggtcacaagctgtaacaaggccatcaagctggatccagggtacgccaaggcatacgacatccgtgccgatgcctatgagggtctggagcagacagagaaggccgaacgggattgggagacctaccgcagcctgacgaaaaaaacggaagaagagga

SEQ ID NO: 4249 - DNA, 7030 bp, Unknown
  gut microbiota DNA sequence
tttttcatagtcagcgcgtcctctgcctgggtgcctgcgctttcgcagatgaaggtgggactccagccccggcgggccacctccgccatgaggggggcggggtcgggcccgaagtcgtcctgggcgaaggtcagatgcatcttctcgcccccgttgggggtaaactgaatcttggagaagtggctgtggaagacaccggcccgcacctcccccagtacctcccggatgcggtccagcatggacgcgcaggccgcagtcccctccagctcccccagggagcgggcgtaaaggtggccgaagtccacgcagggtaccagccgctcgtccagggtgcacagctccagcacctcgtccagatcccccagttggttgatcttgcccatggtctcggggcacagggcgatgtgtccatagccggcgtcgtcgcaggcagctatcaccgctttcagggagcgcagggcgatgtccagggcctcccgccgcgtacgcttcatcagcgcgccggaatggataaccacccggcccgcccccatccagtccgccgcctgacaggccgcggtgatgtaaccgatggtcttttgcaggctctcggggtcggggtttgccaggttgatgaagtagggggcgtggagggacaggcggatgcccgccgccaccgccgccgcgccgatgttcctggcggtctcctcccggacattgacccccttgccgcactggtactcatagcagtccagtcccagctccgccagccagcggggggcgtctaccgaggatttataaggaaaggactcggcgttgcccgccgggccgaagattgcgctcataacggttttgtcctccttttgctccacatgcggaagggccactccgctccgtagcgcaggtagcgccccggattgcccgccaggcggataggctccaccagcagagtaagcaccccggcgttccgcccgcccagaatgtcggtaaagagctgatcccccacgatggcagtctgctccggcgtgcagctcatctgctccatggcccgccggaagccccccggcttcggcttgcccgcgtggcccaggaagggcacgcccagcgcctgggaaaaccggcggggccgctccgggtgccggttgttggagagcacaaagagggtgatcccctgctctcccagcgccgccgcccagtccctcaccgcctgtgtgggctccggttccccatagggcgccagggtattgtccagatcggccagcaggaggcggatgccccgccgggccagggcggcgggctcgatgtcgaaaatgctccggcccgcccagtgggccaggatgggaagcgccatggtttcacctcttctattctccgtcttgtccgcatataagtgattataccacgtttttcagaacttggacaagggggtacctaagatatgcaaaccagcataaagcttcttctcaccgcgccgcccgaccagtgccgggccgccctgcgcttcggcctcccagtggcccacgtggcctaccgggtggggggcgggccccacctgttccgggccagcatcccggtatcggtgcggggcggcctgatggtcattgacaacaccggcttcgacggccgcggcgaggccgggcccttctgccaggaggtgctgcgggagtgcatggcccgagggtatgacggtattctctgcgattttgagggccatcccctccaggtgctggcccaggcggtgcgcacgctgggcgagctgaccaaaaagcggggctggcccctctacgtgaccgaggcctacgcccccttttccgactccgccatcgccctcatcccctccgccctgtccggcggctccctccaacagcgccttcaggaggcggtggagcgcttcggcgcggcccgggtggccctggcggtggagcgggtggcggaggacttctttctcccctcccccaccggccaggggatgcccctcacccgggaggagctgcgccagcggctggaggaacgggctccgtcggtgttcttctccagcgagctgtgcgcccactactttacctacatgtcccggcagaacggggcccacttcgtcctgttcgacgacgcaggctccatccgcaagaagctccaggtggcccgcaatctgggcatctccagcgccgtgctggcctatccccaggtggatgatctcctccccgagctgttgaagtaacccttgtccgtcggggcgttttctgctatactgtccttccaaaataaaaaaggaggacagagcaatggattggagaccgtggatggacgcctttctcccgccgctgttggaggccctgcccggccgggtggcctttgttggcatccagggcagcttcggccggggggaggccgggccggagagcgacgtggatctggtggtggtgctggacgcgctgggggcggcggagctggccgtctgccggggtgtgctggagaagatgcccttcgctgaccgggcctgcggcttcttctgcgaccgggcggccctggctgcctggcccgccttcgacgccctccagctcaggctggacaccctcccggtctacggctctctggaggaactgctgccccccatggggaaggagacgctggacgaggccgttcgggcggcggcctccgccctctaccatgccgcctgccacaccgccctctttgacgcccagccggaggcggccctccccgccctccaaaaggcggccttctttgccctgcggctggcccactgccggaggagcggccaatatacggccgcccgccaggccctgctccccaagctggagccggaggagcgggccctgctggggaaggattgcaccctgcccgccctcatggcgtgggccaggggagagatggaatcctgacacaagcccttcccgggatgcaacaaacccccgcgccgaatcggcgcgggggtttgtgattcttagtaatacttcttgcggttcttgcgggcggcctcagacttcttgcggcgcttgacgctcgggctctcgtagtgctcacgcttgcgaacctcggccagaacgcccgacttggcgcaactgcgcttgaagcgcttgagtgcgttctccaaggactcgccgtccttcacatggacttccgacattgacttcccctccctccgaagcggcgggattccaccgccaaagggccacatagatatggctttaacagaaccattgtattcgatccttttgcagttgtcaagagcggattttgatttccagcattctgtttttactgttcctggaaaaacggcggctcctcaccagctcacttcgcaatcaggttgaccagcttattgggtaccagaatggtcttgaccagcttcttgccctcggtgaacttctgcaccttgggatcggccagggcggcggccaccacggcctcctccccgctgtccacggggacggtgatggtgccgcggagcttgccgcacacctggacagccatgttcacctcggcgtccatggtcttgctggcgtcgtaggcgggccagggctgggcgcaggccatgccgcccttctcggcggcaaagcccagggtctcccacagctcctccaccatgtggggggcaaagggggagagcatgagcagcagggcggcgtagtcgcccttggagcagccgttctggtagaagtcgttcaccagggccatcagggcggcgatggcggtgttgaacttcatggcctcgatgtcgtcggacaccttcttgatggtcttgtgcaccgcgctctcgttggccttggaacagccggcctcctccgtgaggttctccgccaggttccagacccggtcaaggaagcgcttgcagcccttgacggcgttgtcgctccaggcggcggccttttcaaagtcgccgatgaacatgatatacagccgcatggtgtccgcgccgtactgggccaccacgtcgttggggttgatgacgttgccgcggctcttggacatcttctcgccgccctcgcccaggatcatgccgtgggaggtacgctttttgtagggctccttggtgggcaccacgccgatgtcgtacaggaacttgtgccagaagcgggagtaaagcaggtgcagggtggtgtgctccatgccgccgttgtaccagtccacggggctccagtagtccagggcctctctggaggccagggctttctcgttgtgggggtccatatagcgcaggaagtaccaggaggagcccgcccactggggcatggtgtcggtctcccgcttggcggggccgccgcagcaggggcaggtggtgttcacccagtcggtcatcttgctcaggggggactcgccgtcgtcggtgggctcgtaggagtccacctcgggcagcagcagggggagctgctcctcgggcatgggctgccagccgcacttctcgcagtacaccatggggatgggctcgccccagtaccgctggcgggagaagacccagtcgcgcagcttgtagttgaccttggccgcgccgatgcccttctcctccagccactggatcatggcggggatggcatccttcacggtcttgccgttgaggaagtcggagttgaccaggatgccggtgtcgtccttggcggtgaaggcggcctgctgcacgtcctcaccaccggagaccacctcgatgatctcgcagccgaacttcttggcgaactcccagtcccggtcgtcgtgggcgggtacggccatgatggcgccggtgccgtaggtggagagcacgtagtcggagatgaagatggggatctccctgccgttgactgggttgacgccccgcacgccgtccaggcgcacgccggtcttctccttgttcagctccgtgcgctccaggtcggacttggaggcggcggccttctggtaggcggtgacctcggcggcgttcttcagcgcgccggactccagccacttgcgcaccagctcgtgctcgggggagagcaccatataggtggcgccgaagagggtgtccggccgggtggtgtagaccacgatggcgtcgccggtggtggcctggaaggtgacctccgcgccggtggagcggccgatccagttcttctgctgggtcttgacccgctcgatgaagtccagcccgtccagatcgtcgatgaggcgctgggcgtactcggtgatcttgagcatccactggctcttctccttgcggatgacgggggagccgcagcgctcgcacacgccctccactacctcctcgttggccagcacgcacttgcaggaggtgcaccagttcaccggcatggtggtcttgtaggccaggccgtgcttatagagctggaggaagatccactgggtccacttgtagtagctgggatcggtggtgttgacctcccggctccagtcgaaggagtagcccagcatctgtagctgcctgcggaaattctcgatgttgtcgtgggtcaccttggccggatggatgtggttcttgatggcgtagttctccgtgggcaggccgaaggcgtcataccccatggggaagagcacattgtagccgtccatgcggcgcttgcgggccaccacgtccatggcggtgtagggccgggcgtggcccacatgcaggccctgtccggagggataggggaactccaccagggcgtagaacttgggcttgtcgctgtgattcccggtctgatagactccggtttcctgccatttcttctgccacttcggctcaatggcggcaaaatcgtatttcaaatctctcacgctttctttcgatctgtctcgtccgcgacgggcatataatctgtgatattataatcgaaaagcggccggtttgcaaggggtgtgcttgacttttcccgcttatccagataagatggaggcgacaaagaagggagcgtgtatggacatgggaagcaggcgcatgcagatcgtcggaatcgtcctggccgtgctgatggccgccatgctggcggtcaccctgtgggcgtaccgcccggtctcgctggcggaggcggcggacgcccgcaccggactggagcccaaggtggtggttgtggtgcgcctggatgagatggacgggaatggcacctcccatgaatatcaggcgtacgaccccgccctgctggagcagatggagctgctggtggataccgcccggctccgtctggtccggcggagctccatcgcccccctggacggcatgtgtaagatcgtcatcatcggggaggatgaaatcatctgctcctttgactacaaccttacaaccaacgccatctacatcggggaccggatttacgcgctccgctccacccagtcggagcccctctccgagctgactgccgccatctgcggggaggtgtaggacgtgggcgtgcaatggaagtatctctggccggtgctggtgctggccgccgcactgacgctcgggctgggggccgccctccggtttctccgcccagcctccctgggggagcggatcagcgtggcggagggcgcgtccctccggcaggtagtggtggaacacagcgacggcggcgggcatggctcccacgagagcagcgagcctgctctgctggcggagctttcctccctgctggcggacacccggctgcgctatgacgggctcaccgacggcggcgtacccgtctcccccgccgcctataccgtcacggtctattccgccccggcagaggaggggcgcaccttcggcgtggacagccaggggcgcgtctaccaggacaaccggcgctattccgcctccccggaacaggtggaagagctgacggccctcctgaagcgcatctgctcttaaaaccgtccagaggccgcctctttccgttctacagcagcacggccatctctctttacgaaatataaactacacacatttccatcgaagtaagcggcaaaaagcggcatgcgggggaattcccccgcacgccgccggcctgtttccccgtgttcagttcagcgggatggttaccgcctcgtcctccagaacgcggatggtatcgtttggctgccagaaccagagctgctccgcccgggccagctccgccggatcggc

SEQ ID NO: 4250 - DNA, 157970 bp, Unknown
  gut microbiota DNA sequence
tcaatattattgttaagggaccctctaaagtcacgaacttctccagcaccaacgacgccagagtagcgtttgcattgaaaagcaacattaaaactaaaaagtccgttcattcgaagctttccagtaccatcaattccaccatcaccggattttttggtgacttctacttgtgagaatccacattcacgcagaatccgctgcgtaagccgctcaaaaccataaggatccattgtttggagaatttcttgcaatctttgacgccacggttttacttcatcaggtattccaattccatcgtcctcgggtgtatcctcagcagcgttgtcagacaatgctgatcggttttgtcgctgttctgcatctttctgaactactgtctggacaattttctttgcatctaaagttgtttcctgtgtaaactccggaagaatggaccacacacaacgggcactgttttcaataacaccatacttttttagataagttcttgcccacgccaactgatatgacagctctgacatgcttgtgctatctttatgggggaaatcaacaatttcatctgataaattaaggtcctgaataacactggttagtatttcatcattttttccagagccaccaagttcttttaaggccaagaaagtgggcaaaatcaaatctgtataacgaggaatccgctcgtcaaattttttgcgcatttcccatacctccgttattactgtttattgcattatatcgcaatcaaataaagattacaataaagctatattattctggttgcgcatccagacaataccagtatctgcacaatccgccgcttgattgtagtgattgcctgggttcaaatgaaccagcgtgttaattcccgtggcctgataaatgacatgtatctcttccgtgttctctggacattttgcagaatcggattccgtgtcttatcctccttagtgcccagggaaaagtgtatgcaatctggtcgacacttcgggtcatgggagaagaggtatttctttatcacggattatcacggaaaaatgcagagaagcggacatactgcccacgccagaaaacaagttagtccaataaatgccgtacagcgcaaacacccctcaagagaatacccggcaacccctcaccaatgtagaacacagggaattccttcctctgtcgttgggatgatcttctttaccagaagctgcggataataatctgcccatcctggtgggtttagcgtttttgaaggtaggaggactgtcccaaggtaccatgtcgtgattccggtctaaatcgctaatagccatcagagtaaacggcgggcaaccagaagactgcacagtcttaaatatcttctggcctttaccggagaaagtgtgaagatagataatcagggactctgctttggcgtttggaaaatagctacggttttgctatctgttgtaaaggtccgcgattgtacagcaaagagactgtggatagaacagaagctcaaatgatgttgtaaagaaactacaaatcgtgcgaatacatgattttcttgcgtactcctgctgaatatgctatcattatatacaacgctgtcaggtgttggaatagaccttggcggtatggctgcatccagaaaaatgctctgccgcatggcagagcatttttgctatcagtatggaggaatctttttatggctgtcagttataaaaagctctggaagctacttattgacaaagatatgaagaaaaaagatttgtgtgcaaaggcaggaatcagcccagcttcagtcactaaaatgggacggaatggccatgtcacgactgagattctcctaaagatctgtacggctttggattgtcggattgaggatattatggaaattgtcccagatgatacggcaactttacaataagaaagtgcaagccagtatagcatagaaatcttatatctacatcaatatgtagtgggttgggggatagcatgttcacacaggacattaaagataaaaagtcaaatgggaatggttataattttatagatttgtttgcgggagccggtggactttcagagggtttttttcaggcgggctttaatccagtcgcacatgttgaaatgaacccctatgctgctcaaacacttgagactcgcagctgctactattatctgaaaaaaataaataatcttgaatcgtactacaattatctgagagggaatatttcaagaacagagtttattcggcacatcccagaagaagtattgaaaaccgtgttatgtgaaaccatgtcgaaacaatctctgcctggtatctttagaagaattgacaccatcctgagagaagatgctgttaaccaagtggatgtaattattggtggccctccttgccaagcctactctcttgttggccgtgcgcaaagtcaccacatggaaattcccatggagcaagatccaagaaatagcctttatttgctttacgcagatttcctcaagaaatacaatcccaaaatgtttgtttttgagaatgttatgggaatcaaatcagccaatggaggcgctacatggcgcaacattaaaagttattttaaacgtatcggttacgaaattgattgccgggaactcaatgccagtgattttggtgtattgcagacccggagaaggatgattatagtcggatggagaaaaggaagccgatgtctttgctaccctgaattcgatgttatcgatccacatgcaaccgtcaatgagctactgcaggatctgcctatgctgacacctgggaaagaaaaaacgcattatggtagaaaaccgtgttgtacttatgtaattgataatgaaattcgtacgtcgaaagatgttctgacattacaccaatgtaggcccaatatacctcgtgatataaagatatataagcgcgcaattcagttgtggaacaatggtcatcagcgtttaaactacaacgatctccctgataatctaaagactcataaaaaccgagactcatttacagatcgctttaaggttgtagaaggagaccaatcatgctgccataccatcttggcacatctcgccaaagacgggcactattttattcacccggatataaagcagcatcgttctataacagtgagagaagctgcaagaatacagtctttcccggacagctacttttttgagggttcacgcacagcacaatttgtacaggttggaaatgcagtaccacctatgatggcaagaggaattgcagttggcattgctgaaaagcttaagcaggaggcacagactgaaaatgagcaacttgcttctggaacagtacgcccaatacaaaaaaacagcacttgaaaaatccccatatagctgtttgctgaatgctgatattcagctaaatcctcatcagataaatgcgttttgtactgccatacaggcgttaaagaccggaggaattatccttgctgatgaagttggtcttggcaagacaattgaagccgggcttgtaatcaaatatgctatacagtccggcgccatgcgcatactgattgcacttcctgcaactttgcggaagcaatgggaattggaactggatgaaaaatttggaatgcgtgcaaccattctggatcgttttctggtagagagagattacccagctacaaaggcaaagctttgtaacagtgcagagccccaaataattttgacctcgtacgattattcctccaagttaatgcgtcgctttcccaatattaaatgggatctcattgtaattgacgaagctcacaatctcagaaatgtgtttcacggaaccaagcgtgcgaaaaatttatacgacctttccaaaggaattcccaaagttctacttacggcaactccattgcagaattcgctgacagatcttcatggccttgtttcttttattgacccccgtatttttggcaatgagaaagtgttttccaaacgctatattgaggggcaggattattctgacctcaaatccgaactggcaccgatactatatcgtactcttcgtcgggatgtcagcaaatatatgaacttcaagaaaagggaatgcagaactgtagattttcgcctttccaaagatgaaataaccctgtatatgcaggttaacgcatttctaaagagagaagttctgtattccattcctgctgcaaatcgaggtttggttacattggtcatccggaaacttcttgcatcgtccagcttcgctttgattgaaacatttgaggtgttgcggacgagactggagaaactgtatgaagggaccaagtcagctgatgcacaggatggttttgatctgttttgggaatatgtcgaagatgaaatcagcgaggatgattttgacgcttcaaatgatgaggatatagcctaccaaaaacaactgatacagaatgaaattgatgcggtaaatgagattattaataccgcaggcagaattgagcaaaatgcaaaaattactgcgttggaaacagctttgaatacggcatttgaataccagaaaagcaatggaattcctgaaaaagcggttgtgttcactgagtccaagcgtacacaaagatatattgcgcaagagctgagaaaagaaggttacgctgaagaagacattctcatcttcaatggcgattgtgatgatgtgctgacaaaggagatctatcgcacatggcaggtgaaaaacttcgggaaaaccaattatggccgaaatgtcgaatataagcatgccatagttgactattttaaatcccatgccaaaattctggttctaacagatgcaggttccgaagggttgaaccttcagttctgcaatacagttataaactacgatttgccctggaatccccaaaagattgagcaacgtatcgggcgttgtcaccggtatggccaagaacataatgtggttgccataaaccttttgaatactcaaaacgaagccgaccgacgcgtttatgacattttatccagaaagtttgagttatttgaaggtgtgttcggggcatcggataaagcgttgggaacgcttgaatcgggtattagttttgaaaaaatggttttggacatctaccaaaaatgtaatacttctgatgaattcaggaaggaatttgataaactggatcggacgattgatgcacgacgcaataaaaaggtatctcagttgcgcagtcttttgctcacagaaagcagcgaagtcaagagccacgcacttgaccaaacaaaacaggatattgaccgttatctccgtgaggttgaatattggtcaactatttcggatgaagacgaattgggcggcgcccccagttatcttcgtattgaaaactggggaaatgcacagtttggaggacatggtttgttgtttatcggtgccttttgtgatggacaaactccactgctcccggtattgttgttgtgcgacgaaaccggcaaatacatagattttgctgaagaagagcttctctccgcaatcgaacaagcggatgactatgatattcactattttcatccgacagctgatgagttgacggtgttcagcagcgtatacgagcggctgacagaggaaatgcgattaaagtatgcgcgagacacagaacctattagggactataatcgaagaaaagtcgaaaactggattgagattcaaacagaacaattgaatatccagattgccgagacaaatgatgaatttgttgcattgaatctccagagtgcccaagccaaagcattcctggaaaaactggatatcaggaagaaagctgaggagaagaaaaaacaactgttaaaattacaggaaagctttcaccaaaaggtatcacaagttcagaaagacggggaaaaaacaattcaggagtttaacaagcagtttgaaattcatcctttcctgattccaaaagttgttctgaaatattgagagggttatgtatgcaaaaaaatggaaagctcgagttaacatgggttggaaaatacgatacaaaggttgtggaaccacgacttctcttggagaacccggaaaaatcctatggagatttggatgctcaaaatatgctgatccatggcgataatttggttacacttcaggccattctccaagacttttctggaaaaattaaatgtatttatatcgacccgccatttaatacgggtgaagcatttgaaaattatgatgacaatttggaagaatccttgtggctaactcttatgaggcaaaggctggagttgctccatgagctccttgcagaagatggcacattatttgttcatattgacgatgcaaacctgggatatcttatggtacttcttgacgaaatatttttaaaaacaaacagactctataccattacttttaaacaagggtcggcaaccgggcataaagcgatcaacccaggatgtgtaactactacaaactttatattgatgtatgccaaagataaaaagaaatggacacccaataaagtatatactgctcgcagtagagatactcgatacaaccagtatattattaatgtggaagcaccataccagaattggaaattctccactttaatcgaagcgtttgcaaacgaatcaggaattagtgtccgtgaagcaagaaaagtgatgaaggactcgccagaactaattgatgattttgtccttaaacatgcagctgctgttattcgtacggcaaggccagatatgaaaaatgttggaaaagatattcaggtgttggttgaagagtctaaattaaaaaaagacgagatactatttttggcgcgagaagggcattctgacatatatttgcgcaatggagagagaatcttgttttataaagataaacttaagcttattgacggagaatacatctctggtgaaccattaaccacactttgggatgatatactttcaaataatctccataatgagggaggtatatcatttccaaagggtaaaaagccggaacacttaataaaaagagttttagaacttagcacaagtcctggtgattgggttttggatagttttctcggttccggtacaacagcggctgtcgcacataaaatggggagacagtggattggcatagaactcggggaacaagcgtatacacattgcaaagttcgcttggatcaggtagttgatggtgaacaaggtggtatttcaaaagcagttggttggcatggcggtggcggatatcacttttatgaacttgcagagtctttgctggtgcaacatccagttcttccgattatgcaggtcaacccacactacacatttgaaatgttgtgcgaagccatttgcaaaattgaaggatttaaatatgctccagaaggaacatttcatggatactcctcagaaaaacggtttattcacataaccaaggaattcattaatgcagagtatatcaagtctgtatctgcaactttgagcgatgaccagtctttgctgatttatggaaccaaaatacaatcagatctccaacttcccgaaaatattgaagtaaaaaagattcctaaagatcttctgcaaaaatgcacttttgaaagcgaggtgcggtaaatgtccaatattgcaagaaagattggatatgcaatgagtctccgtacaccccagcaggaagcactatcgtatcttgccgcaatttctgagagttgcaattattgcaagcaagaaaaagctgccattgaggcaattgcaagcgagcattgtgagaataaaaatcagattaaggttgcggatgagttcgattttccttcattttgttatcatatggcaaccggtattggaaaaacaaggttgatgggcgcctgcatctattacctgtacaaaacaaaaggctataagcatttttttatactggcaccaggcaataccatttacgaaaagttgcgtaaagaatccaatccaaaccatcctaaatacattttcaaagggcttgaagcagaaatgggacgccccaaggtatttgatggagaaaactatacttcctatccaacccgatacattcagggtgaaatcgaactcgaaaagacctctgagattcagctgttcattttcaatatcggaaagatttttaacagcaaaacagacacgcagttcaagtttcataagttccacgaagatctgggtatgtcctttgcagatgtactggcacagtttgatgatcttgtcatttgcatggatgaggcacacagatactatgcaccggcatccatgaaagctattaactatctaaaaccaattttgggattagaatttactgcaacgcccaagacaacgggtaatgtaatctattcctatgatcttgcccgtggtgcagttgaagggtatctgaagactcctgttgtgatgggacgatccaacatggcaggctacagcgtagacgacattgaagagatgaaaatccgtgatggactgactcttcatgaacaccgcaaggcaattctcaaggaatattgtgatgagaataatttggattatgtcaaaccaattgttctcgtagcatgcaaagatacgaatcatgcaaaaaagattcgtcaaatgattgacagcgacacttttgaaaacggacgatataaaggaaaggttattgagattcactccaatatgaagggtgaagaaacagaggaaaatgtccgtcgtcttctctctattgaaaaaaacgacaatcccaccgaaattgttcttcatgtctataaactgaaagaggggtgggatgttaataatctttttacgattatccctctgaatgcggccaagagtgatatcctcgccatgcagacaattggacgtggacttcgcttgccttttggccaagctacaggtaatgaagacattgatactctcgatattgttgctcacgatcattaccgtgaattggtcgatgaaattaaaaacagcaatattttccgctatcgtgatcttgataaatcgacagttgaacctaccaacgctgttgatgtaagtggtgtagtagatgacgggcaaatcagcttttttgaccaggcggttgcagataccggtgttaagtctttctctgctcttaacaatccggaaacgcaggaaagcctttatgctgcatatttgaaagtctatggcggaaagatccataaaacacaggaacaagcagtaaatacggaacaaacatctttgtttgaccaaccggaaccacctgctgcccctcagaaaaaatctgcgcccaaaagtggcaaacaaaagccgctcagtaaagaagacttcatcaaaaaggcccagatccttgctaaagccatttctgttcctaagatattggtccagacaagttccactgtttctttcaagcctttcccggtgaaacggttgatagaagattttgaggttgcagcagcaaaaattgaaagatttgatgcggtaaatcagcaacttcttgcttctgtagatgctcagatcctcgaagtcgatgacgcagtaaatactttggcatgtatgcttctggattccatcagtgaactttcctatgatgatgccgacttcattatggaactggtttatgggtatcttgctcaaatcgatggcacagaagaagaaaagaggaaaattgtccgtcgttatgctgcttccatcgtggatgatatccggaaacaagtatatgaacatatggagagaaagacatgggagacccacatcgtccagaaagactttattcttttcagaaagttcgtcaaaaatgtaaaggaaaatggtcgtgttaagtttgacaagccgttcactgataaggcaaacatcaaaaaatatttgtttactggttataaaaaatcctattatccggagaatgcgtttgacagtgactctgaacgccttttctcaattattctggaagaagattctgatgtaatcagatggattaagccgcccctgaaccagttgggccttttctggcaagccgggcagcaatacaatcccgattttcttgtcgaaactgttactgaaaagtatatggtggaagtaaaagcatccaaggatgcggattcagacgaggtaattgcaaaagcaaaagaaggaatcaaatggtgccgcttcgcgtcaacagcagatccggacaaaaaacattggtcgtatcgtttgatcacagacgataatattcatccaggcaacagctgcaagtatacgctgggtaccgcaagaaagatttcggaggattaatatgggtgacagattccagtatgcagaagtccgccaaaaacttatcaacgcactgagaacagacctcatgggacctcaaagtccggatgaagttttggacgagaaccctatgtttgcctatatcgtgggtatgttgtatcctcagacaactgcttctgcagatggaatcgatgtaggcgagcaggaagttgatactgatattgcctatgaagatggtgaaaactatacttcgggtgaagatgatgacaacgaacctattgcggctacaaagttcaagcaacaatcatctatcggcataagtttttatgtcaaaacttccacatcagctatcagtctggatatttcctggggagactatattaaaaccaccgagaaaaaaacaaataaagatggcaaagaggtggaagttgctgcatacaagcgcctgaaaatggaagaaacccttcatatctccttctcagatattaatcgcataaaggattatccattgatctgtgatcccaatgttgtagtgcatgtttcaaaaattgcgctaaaacatggtttctttcttgttacagcatatgtaattaacagaagacctggggcggaaagtgtacttgaatctatcatgtttcaggttaatctccgtgcatatgccacagatgggagccgggtgtttatagctgaacatatatgccgcaaagtgcttgcttcggatgaattctattttgaacaaagacctatcatggggcggggacgcggttgcgcagccacatgggatgctcctgttgaagggaaatgttgtgaaattacatcagactttattccacagtatgaattccctggtgttagtgctgcactaaaaggctttgacaaattctacttttcaatgcgttttttatcaatagcaaagaaaaaggatcaaattattgaacgtcttaacactattgcaaactcttatgaagaatggattctggaaaagcttatcaagaattctaaaatgcaggatcgggagttttctacagaaataggtgaacaagtcatttctgactgcaaacaggcattgacccgcattagagaaggaattgatctgttggtgactgatccagtagcctttgatgcattttgctttatgaacaggaccatgattctccagcggaacatcatgaactattccaaaaagcatggtgcaggtgtagaatgcaatttccaggactttgtaaatccccaaaatccggataacgactttgggtggagaccgtttcagattgccttcattctcatgaatttaagcgccatggtcaatccacaccacatagaccgagatatagttgatttgctatattttccaacaggtggcggtaaaactgaagcttatcttggcctcatggcatttgtaattgcgaatcgaagacttcatattaaccctaatgacacttttaacagggatggtggtgtgactgcaattctacggtatacactacgcctattaaccactcagcaaagagaccgaatcataaaaatggtagttgctgctgagttgatcagacgaaaaacaggcggcagatttggggcagaaccgatttctataggtttttgggttggtggaaccgttacgcccaataatttcaaagatctaaaggaagatcccaatgaccctggaaaggcaagaagaaattgcaatttactctataaacagctattgacatgcccattttgtggcaaacctctttccgctgaaaatttctatattgactttgacaggaaatccattgagatttactgttctgacccaaactgcatgttctataaatacaagcaagacagaatagcaattccggtttatcttgttgacgaagaaatctattcaaagtgtccgaccattatactttctacggttgataaatttgctcgtcttccttgggatgttaaaacaaatactctgttcgggcgggttgatcgactgtgtagccgagacggctatgttgctatcggagatgaacataagcgacataacaagacggctactttacctactgcttcacttaaacccgttaaacaatttgctccaccagaacttatcattcaggacgaactacatttgattaccggccccctcggcactatatatggagcatatgaaacaattatcgaggacctctgcgcatatatagataataatggacaggcaattaaaccgaagtatgtagtttcaacagcgaccattaaaaatgcaggcgaacagacaaagtgcctttatggtagaaaaaacacggcacaattccctcccaatggatttgaaattggtgatagtttcttcattaatgaggttcccattacagaagatccctttagaaaatatgttgggatatgcgcaaacgggcaatccatgaaaacggcattactccgagtctatgcagtattgcttcagacctcatacgagttatcgaaggatgaagcgacaaaaaactatattgatccgtattattcgctggtgggttactttaatagcattcgtgaacttggcggtgcagttcgtctactgcaagatgacattccaaagcgaattaaacggttaaaaaagaagtaccattatgagcgcgagcgtcccttaaaacgccgggcagaaattacatccagaatgtcttcgtatgacattcctaacaaactcaaacaacttgaaacaaattttcaatcggatgattgcctggatacggctgtcgcaacaaacatgattgctgtgggaatggatgtggatcgcctcggactaatggtagttaccggccaaccgaaacagaattctgaatatattcaggctacaagccgaattggacgaggcttccctggattggttgttacactgtataatccctatcgcccaagagatttgtcgcattttgagaatttcaccgggtaccactctcaattatatcgatttgttgaaggcacaacagcaactccgttctctgcacgggcgcgcgatagagttctccatgctgtaatcatttctgctattcgtctaaagtatcctgatttggctcgcaacacgggtgcaggtcttattgcatcgcttacagatgagcaactcgataacattaagtctgttattctcacgcgccttaatatcattaagccctctgtgcgtgtagaagttgaaacagaaattgatcagtttattgactggtggaaatttctggccacacagaagaaacccctattgtactatattggaaaaacagatacatacaaccgcctaatgaattattatggcgaaagatgcagcgaatcggaaaaaccaaccttaaattccatgcgtgaagtggaaagtgcttccaacatgtattactattgggaggattaatatggcgcaacaaaataataaattaggcgaactccgccctaatcaaattattactacatttggaccaggagcaattattgacgctgtaaaagattccgttataatgctggataccaattactggactgaaacaggaaaaaagataattgatggtcgcttagcgtcctatttaggagtagactgtttctacatgcctcgttcatcccattttggagatgtgcctgtctcaacttttccgtattttcatgtctgctcaaatccaagatgtggaagattgtttgacgccagaataaattttgatcttgagcgctatcttcgctttggagttacatgtccagaatgtcacaaacctgcatatccatcaagatttattaccatttgtgaaaatggacatatgagtgattttccctggagctggtgggttcacaaaggcaatgctgtctgtaatggcactttaagaatgtactcaacaggaaatacctctacattagctgatatgtggatagaatgttcgtgcggtgcacggcggagtatgagcggtgcgacacaaaaagaaaactttgaagggttgagttgccaaggacagcatccatttcgcccaaaggcaaaacgcgaaaaatgtactaagccgatagtcccttctcagagaggcgcttcaaatgtatatttttccgttacccgaagcgctatctcaattcctccgtggatcaatccgctttataatcttatcgatgaacatatgcggattattgaggaaattaaagacacttttggcgatattggtgttgaaaaaatctacgaaaaatacttttccagttacagcaaagaggaatttgatgcagccttaaccaggcgattaaacaatattaaggaattcactgaaattaaaagaatggagtacgatgcaattacccaccacaatgacccggtatatgcttcaaacaagaagcacttcaaagccgaagaagaaagtctgcctgaatatctcaagaagtatttcagccggattattcgcattacccggctccgggaagtgaaggttttacttggtttcacaagagtagatgcacctgatccggatgcggatgaacaggccaatattgtttatttgaataaagggaaaacagaacgatggcttcctgcagttgagatcaacggtgaaggtgtttttattgaatttaaccaagaaacactaagcgaatggttaaatcagcctgaggtaaaatcattctctcaacgttatgcggaaagctatatggaattttgcgcttcacgtgattggaaagtaactgtgatgagaaatggtatctatgttttgcttcatacattttctcatttgctcattaagcaaatgtccatgtcgtccggttattcttcttctgcaatcagagaacgcatttactttggagacaatatggctggaatacttttgtatacaggaagtcccgataaagaaggttccctcggaggccttgtggaactcggatgtgttgataaactaattccaatcatgcgagatgcttttcaagaagcactgctttgcacaaatgatccggaatgtctgcataatgcccctgctgcaacaaattcaaatggtgcggcttgccattcgtgttgcatgatctcagaaactgcctgtgagaacggaaataaaatgcttgaccgaggcttggttgttcccattgcagaacgtgaaagcaatgcattcttcggggaactggtgaaagaactatgtcaactggaaatgtaaatctggatattcttctcaactccataaaaaacgcaacccctattgattccagtggaaaatttgagatgaatgcagaaagcatcggattaataaaaaaacggtatccaatgctctcacaaatggaagccgaagagatttgcttacttttgagttcggctttgacaactgatcaaggctgtcgctcagaacttgtagtcacagcccccccccttcattttcggttaaagctcgatcgacggccaacactgtttcggctatgatttccggagcgaaaaaaagtttattaataaccggatattcgttatctgattattttggagatttggttgagcgtatgattcagaaaagcagaacggggattttaataaagttctttgccaatggacttgagggacagcctgaatttgaaaaactattgagaaatcgcagccaatttttaagaatctatgattaccagcactcaagtgatcggatgtcttctctacatgcgaaagtcatatgtgttgataaatccaaaacccttattacttcagccaatctttcttatcatggtcaagaaggaaacatagagatggggacttacatggaatctccagtaattgcacaacaggttgaggatatttttacaaagtttttattttcaaagatatttgtagaacttaagtagtacgggtatggtgattttatggctgatgtacatactcctccagtcagaagtttcaatatgtcacatataaaagggaaaaacacaaaacccgagatgattgtgcgacattaccttttctcaaagggatttcgttatcgaattaatgataaacgttatcccgggcatcctgatattgtacttccaaaatatagagtatgcatttttgtgaatggatgtttttggcatcaccatgacccttgtaaatactttgtatggcctaaaagtaacgccgagttttggaaaaataaaatcaacggaaatgttaagcgcgatgctttaaactatgagcgattaaagagcatgggctggaataccattgtaatttggaaatgtgagctaaaaccggaacagcgactggaaacattgacacgtttagttgagaccatatgtatgtatttataagtacctgataaatacagttgcccgcagtttgccaatattgatttgaaaaaaagttgacttgtaggtgaaaacagatgactgaagtagtagcagctctgatttggaatcaggacaagtttatgatctgccaacggccagcgcataaggacagaggactgctgtgggagtttgtgggcggaaaagtagaaccaggcgaaaccaaggaacaggcgctcattcgggagtgtcaggaggaactggctgttatgctgaatgtgggcgaggtgttcatggatgtggtccacgaataccccgacctgacggtccatttgatgttgtttcatgctgccatccgagaaggtatcccgcagaaactggaacacaatgatatccgctggatcacggtggatgaaatcgatcaatatgccttctgcccggcggatgaagagattctaatgaggctaaagcaatcgaaggagaaagattaggcggaagccttttctactgcattcggaaatgcggacattcagagaaaggaaagtgcgggatgaatgtgatctgctttggcgattccaacacctacggatatgatccccgaggttatttcggcgggcgctatgacggggacagccggtgggtggacatcctggcgacggaaaccggctggactgtctgcaacatgggacagaatggccgggagatcccttctgccgctcctgccttccctgctgacaccgatctgctgatcgtcatgctggggaccaatgatctgctccaggggtgtagcccgacgcaagccgctgagagactggcacggttcctctccggtgtctccctggatcgaagcaagctcctgttgatcgcaccgccgccaatgaccctgggcaagtgggtgcccaaccagcagttcattgatgactcccatacctttgccaagtgctgtcagaccctagcggagcaactgggtatccgctttgctgacgccgggaaatgggacatttccctggcctatgacggcgtacacttcacagagcagggccacaagaactttgctgctggacttctggaggaactcagatgaaacgaatgatacccctgttgctatcccttctgctgctgaccggatgcggtgggaatgacgcaaacggctcctatgagcagatcacccaggaagcagccaaagaaatgatggacacccaggaggtcatcattctggatgtacgggagcaggacgagtacgacagcggccacatccctggtgctgtcctgctaccggttggtaccattgatgaagatactgctgccgaggtgattcccgagaaggattccacggtgctggtctactgccgcagcggaaaccgcagcaagactgcgtcctctactctggcagacctgggctacaccgacatctacgaattcggcggcatcaatacctggccctatgagacagagccataagtgtaacggaagcctgtaaacagcacaaaatctatatcgcctatacaaagaatacgggaccggcttgacgaaagccggtcccgtattctttttcttgtcagtgattcaggagtttttcagccactccacatattcctccagggtgatgacatcgcggtcacatttctttttcatctctctggcctgctcactccaagcgtagaaatccgtatcggagatgcgcccggctttgatccaggcaaaccgtttcttatactccttgcggtaggccttgaataccggatcgtcagactgcttctttgtccactgctggaaggcgccagcctcacggcaggtctgctgtcctttgggcaccggacgctcacagtactccgcgctgacccgtccggtctgcggaaagtagcggccgcagttcttgcagcgccgcaccgtaatacccctctccacacagctgcgcagagagtagtcgatcatgtccagaatgctggcggagtacaaaaccggcgaacaccgccccggctccaccggctcaaagctgagcggaatggggcggaagcgaaacaggctggaatccctcggactatcgtgaagataattcttagctgcctgctgctgtgggtcgcgccctgcgctgtccacatccagaaccaaatcaaagaatcgctgcacctgcttctgatagaggagaagctgctccgggagatgccgtagctcctccagcatctgctgatcctccgcgctgccccggtcgccgtaaatccccattctggagaaacggtcataccaacgcacatacagaagctccaaatagatgtgccggcttttcagctggcccagctccaccatggcctctgtgccggcatcccggtcaaactctgcaatcagccgactccaacgatctgcgatccgctggagagcaggtgtcagttccctacaatccatctccagaaaggtgagcaggctctccaggaatggaagctcccgatcaacggacggtactccctgtatgccagaggcgtcacactgaaaaaactcccgcttttcagagaaatacattttcacataccacatagtcggctcctcaaaaatagactaatgctaaattagagtttcaatagacttgacaaacgtattttggtgtgttaagatacactcgcagcgatgactgtctaattaaagttattattagtctaacaccaggaaggcaatttgtcaacgaaaactttcattgtcctcctggtacagcaccttgaaaacagaatacccatcaccagagatgatactccctggagaagtattgccatgacgctgttgtgggcgaagcagccgagcataccaaggggaagcaaacgccgtgcgtgtcaaacaaggccgcagggcaggaacgggtatggtgatggccagacacaggcaaaagacagtcaccgtaaaaaaagaccgctgaactgctgcaacagttcaacggcccgctgcgtttcggaaaacacagctcaatctgtgttcagtttatcagagagacctccgaaacgcaagaacaatttttctctgcacttgaaaatgatcggaggtattgaaatgaagatgtcagtctgtaaaagctacggcgacctgccgctgttcctcaacgcaaaactggtggcacaggtgctgggcgtgtccatctctaccgcctacgaggtaatgcacgaacccggtttcccgacactccgtgtgggcagccgcatggtggtaccgaaagaaaagttcattcagtgggcggaggaacagtccggaggtgcgaaatgagaaagcagagctggaccaagcgggatcctatcaaaaactatttcccactgcccaacgagatctacgatctggggctgtcccgcggcgcgatctcggtgtacagtttcctgcttcgccgggaggaccgcaagacctatcagtgtctgctcagctaccgggagatcggcgagggcgtgggcatgtgcgtgaccacggtacgcaagtatgtggcggagctggaggagcgatcgctcattcgcactgagcgcacgactgttaccaccaaagacggccgcaagcgcaacggacgtctgctctatcatatcctgcctatccagttggccatcgatcagtactacgagcgtcagatggacatggccgacctggcactggagcagcagaaggcaaagcagcgcctggccgcgctggagagaaaggagtgtgcatccggatgctgatgcaggaactgggccgtatgatcaaggaagatcccaacctgtgtgccatgactatggtggacaagcgaaagtacatcatcagcaagtggaacgccagtcatagtgagcccatcgacgaagacgccgtggcactgtttctctgtgatgagaaccgcggcaatctcacggatgagcagagagcctttgcgaaagagcgctgtgcggaatttgaattctgcaatcaaattactgtgtaccgtctgtttcaatgcggcgagatgatgcgccagcatctggtgtccggtccggcggaatacttccggattttcctgccgcagtgcgccgtcccatgcggcaggggaatccccctttgcagcggcctgtgaggggctgtgtgccctccttcggggcagggcagagtccctgccccacctggggctttcaaggcggatttggcccgatttcgggcaaggttccgggacggaggccgcggggggacgaggagcaggagaaaaccctggcgtttttgtgcgcccgggcagtcacatccgcccgcagtgcgggcggtttcggggatttggagttggcgctgtttcggccagcaggctttgggattggcgctgttcttgtaaaaaagcgcctgaatccccgccgttgcgggatttcaggcggcgctgatgagaaaaggaggcgattttggagatgaaagaggtaaagaagaaacactcagtgtggctgagcgaatcggcctgggccgatgtggaacatcactaccaggcggacaactgctcaaccaaaaatgagtacatcgaaaaggcgatccagttctattctggctacctggatacggaacacgcggaggaatatctgcctcgtgtcctctcggatgtgctggagggcaagctgggtgccttcggaaaacgcatgggacacctgctattcaagcaggcagtggaccaagatctgatggcgaatctgcttgccagcgataccaatgtagacctggatacgatgcaaaaacttcgggtgcgctgcgtgaaaaatgtgaaagagaccaacggggaaattgatttccaggacgcgtttcggtttcagaagaggattgaggaatgaagggtctcattcaaaagtccggctacatcaagccgggaagcggcggtggacactacgctgagtacatcgccacccgggacggcgtggaactgatggaacccacggcaggcggctacctggagtacatggccgagcgtccccgctcttacgggctgttctccgcagacggtgctgttgatctggagcaaaccatggagaagatcaacgcacacgccggtccggtatggaccttcatctactccctgaagcgggaggatgccgcacggctgggctacgaaaacggtgagagctggcgcagattgttgctggcccatcaaacagaactggcgacagcgatgaaaattccgcccagcagctttctgtggtgcgccgccttccacgatgaaaagcaccacccacacatccatatgatggtctggtctaccgatttcaagcagggctatctgacagagaaaggcatcgagcagatgcgctccaagctgtccaacgatatctttcaggacgagctgttgtccctctatcaagagaaggatatgtcctatcagcaggtgcgggacacagcaatggaagctatgggtcgtctcattcgggagatgaagtccggactctgcgacagtcctattattgctgggcagatggaaacgctggccgaaatgttatctgaggtcaaaggcaagaaggtgtacggctatctgaaaaagccggtcaaggcccaggtggacgccatcgtggatgagctggccaagctcccggaggtggcggagtgctatgaacactggaaccggctgcgggatgagttggagcggtactacaaagacactccaagagaacacaaaccattgtcacagcagccagaattcaaggccatcaaaaacatggtcatccaggaggcggaggaactgcatctgagtacattcaccttcgaggatgcgtccatgagggacgaggtggatgaggatcaggaggaggtgtactacgcctggtcctcccggtgggagatggcggaagcctatcagaacgcgaaagaaatcctctcagtatatgaaaacacagaggaagaaaaagcggaacaggtacaagtactgaagaaactctgggacgcaggttttcccgtggcagcacatcagttaggaaaatgctggcgggatggtatgggtgtgctgccggatgacgaacaggcggagctgtggttccgccgtgcagccgaagccggtcatgacttctcacagtacgctcttggtaagctgctacaaagtcaaaagcggatggaggaggcggtgtcctggtatgaggaagcggcggcgcagggcaattcctacgccgcctaccggctggggaaactgtatctggaggggaaggatgtcccgaaggatgtagccaaggcggtagagtatctaaccaatgccgctcaggagggcaaccagtatgcccagtacaccctgggcaagctgtacctcaccggcaaggatgtggctcgggatcaagagcaggcgtaccgctggttctgggaatctgcatcacagggaaatgagtacgcccagttctttctggatcacttcaatgacaaccacagtcctaatgtgctcctctctgccaccaaactgctccaccacatgggccggatctttcaggacaactccattccgccctgcccgccgggcagtcacagaacagaccgcaaactgctccagaagatccgtcagaagaagatcgccctgggccacaagccggatgatcatgaggaggagcagaacatgggtggcatgaccataggcgggatgtaggcgtattaaaatctgacatgccaaaacaaagataaaaacctcttcgcagtcgcaaaatctttctgaaaaagtttcaaataagggctggatattgcaaagaggttcgggtattgtgtgttgctgataaggaggcgacgcacatgaacgactacatgagagcactgcatcagcggttctttcgggaaccggatgtgtcagagttggaagaagatatcgagaacacccgccaggaggtccgagacttcttggataagatgcagcggcgcaggctcatgcatctggtggacagtcagaatctattgagagaagagatctccctggccagcttcacctctgggttcaaactggcctggggactgagcaaggaactggaggcggacggcctgtactccttcgacgaggaggagacagaacgagtctgccgcagaatggaacaggaggagtgatcgagatgacaaatcggcttcccattcagcggtgccagtactgcgggtgcgaggacatcggtcttggctggcagcacggcgaagcgctggtcacattcaaaaaacacggtatgctgggcaaccggctgcggtatctgatctgccgccgctgcggcgctgtgctctaccagtacgtggcggaaccttacaagtaccctcctgtgaaataggctgtacagcagccgcacgacaaatgaaacggaacgattggaggtgaaacaacatggcaaagagaagaccatcgggggacggcatggtgcgcaaacgggaggatggccgctgggaaggccgcatcgtggtgggccacaaggaaaacggtgatcccatcttccggtatgtgctggccaaaacccagaaagaactgctggccaagcttcaccgtgacatggatatctatcaggacgcacagcttaccgaggacagccgcatgactctgggcgagtggctggatcgctggatggaggagtacggtgccgtcaccctgcgtcccaataccctgcgcagttatgagcagtacatccggtgctatgtgaagccgtatctcggcggcaagatcgtctcccgagtcacacggctggacattcaaaaactgtaccggaagctgaagaaagaggggcgtgtccacgaccacccggaatatggacacgagctatcggacagcatggtgctccgcatccacgccatgctccaccgctgtctcaaggatgcggaacgggaccacatcgttccttacaacccaacggacggtgtcaagctgcccaagagcaactacaaaccaaagcaggttctcgaccgagagcagatggatgccttcctggcggcagtggacaagaatgaaatctggcgggacttcttctacacggagttgaccaccggccttcgtcgaggtgagatctgcggtctcatgtggagggacttcgatgaaaacgctgggacactgaaaatcctccgctcggtgaatgtacctaagcggggagaactggagatcggtgagaccaagactgagcggggcagacgcaccatccgtctgccccccagtactgtccagcgattaaaggataagaaaaaacacgccatcagtcagtggatcttcccggatcctctggctccggagaagccggtgcgccccagtgccgcctactactggatgaaggtgctgctgaaagaggcgggattgcctcacatcaggttccatgatttacgccacaccttcgccacccacgccctggccagtggtgtggatgccaagactctctccggcattctgggacataccaacgcatcgttcacgattgatacctacactcatgtgacaccggatatgcagagagctgccagcgatgtagttggcggctttctgaaaaatctattgggagaggagttgaacccatggcaaggaaacgaaaaagcggaaccggcaccataaggcagcgcaaagacggccgctgggaaggccgggccgtggtgggctatgacgacaaggaccttcccaaaacgaaaaatgtgctggccaagaccaagcacgagtgccaggaaaagctgaccaaactgatggaaacagtgggacacaccaagtctgagaagatctgtgccgatatgcccttcggtgaatggatggacttctggtatcagacctacatcaagtccggactccgccccgccacgcagaacacttatgagagtaccatctatcagcatattatcccccaactgggtaagatcccactgtgccaactgagtcagaaggatctccaacagttctacgcccacctgaaaaaagaggggcggcttgtccgcaccgaacaatatgggaagggcctgtccgaccgcatggtgcggatgtgtcacgccaaatgccgggcggcactggaccaggcggtgcaggagaacctgatccgaaccaacccggccgtgggctgcaagcttccgcccaagcggagccgggagatgcaggtgctgtcccgccaggagctccagcggtttctcattcaggcaaaggcggatggctacttcgaactgttcctgctggacctgtccactggccttcgccgaggcgaactgctggccctccaatggtctgatctggatctggatactggaacgctgtccgtaaccaaacaggtctacgaggtaaatggaaagatgcagttgagtgtcccaaagacaaaagcctctatccgcaagctggtgctaccgcctgccgtggtggaggtgttccgggagtaccgaaagacagcaaagtctcggtggctgttcccctcgcccatcaaggaggatgaaccgatcaaacccggctccatgctccggcggctccatatcattctggagcgggccgggtgcaagcaaatcagatttcatgatctgcgccataccttcgctaccatggcgctggagaacggcatggacatcaagactctctccgccatgctgggccatgtgtcggcggctaccacgctggacatctatacccacatcaccagcgacatgttgagtgaagctgccgccaaaatcgatcggggcctgggcaatgaggtggcggaggactctactgaggtaaatccgctcactgacttccagccggtcatgcgacgcacccgaaagcctggaactggctgcatcactcagatcaacgaccacctcttcgagggacgctactcacccacctggccggacggtaccaagcattccaaatgcgtctacgcccatacccgtgaagagtgtgaggagaagctgaaggtactcatccagcagctgaacgccgagcggaaggcaatcctggacaggctgcgaggaatcccatcgcctgagaaacttaccaagaagcagcggcagatctgggagtatatgaaaatttaccccgatgagacaaactacagtgtcattgccaggggcgcaaaggtgactcggcacactgtggccaagcactttgagatgatccaaaagatgttggagaagcgagaaaagaggtgcactataacatagtgtacctcttcttttatggtgcctcgatatagttcgcactcccactatggcatataaaaacaaatgtatggctttgcgctgtctgggtcgcttaggattactgctgcttcagtttggaacaaggatatccatttctactacaactataacagtttactaaaggtactcactgtcatggaagagattacacaaggcagttagattagtttcagtattgtcaccaacatcattatgttgatgttggtgatacaactcaatacatattcgcaaaaatctttgatcttgggtgtcaataattgctgtaagatgacagtgcctttttaagaacatttaaaagttaatctaggccaagtaaatatattggagttaattgctttttgaaaatttttgtagcataattaataaagaaaagtctcaaggtatattggggaggcgaaatgaaaactatgcaaatttttgacttttcaaagaaatccgatcaagaaaagttatatgaaatatttttaccttatttcagtcggcggaatattgttccattttttggttctgtgtttacccgcaattatccagcaaaacgtggattagtaccttctgtcgatgaattaaaaagcgaattaattgatattattgctaaagtagaaaattattcagaagataatcgggatgaacttagggaaatgaaactttctgagcttgcggagattttttggcctcttatggaagatgaggctactcccaaagaatatctcgatcagttctatacatacattgaggagcacttctgcagcgtgcatgacctcccaccagagtatcaaaggctaattggctgtcggtggcggtacatatatactttaaactatgatgatgctattgaggaggcgtcgattgatgccctcaatgtcatcgttccatattgtcggcaaaaccaacgatggctggcacagaaacgctgcttatataaactacatggagattcaaaaaaatttttagagacaggagagaaaaaatactgcattctcagtacccaacaatatctaatggcgatgagtgataaagaaaatgctgcaatgagtaaaaacctcgaagcagatttttcttcgaataacatcatcttttttggatgtagtttattagatgagttagacattttgtttgctgcaggcacacaccttgcaaaagaaaaaaggcaaaatatagatacacatagctactatgttcgatatgtaggcaatgatgctgttccactgacagtggtgcaacaacagagattcaaaagttttgcaatcacagatatcattgaagtaaaagcagaagatatgttagcgttttattcatttcttgcaacaatatcggaagaaggaggaaagttgcaaaagacagacagtcttggtgagtttacaggctttcaatttctgcagcgagaatcaaccgatcgtgagaatcttgaataccttttttattcttcacgaattcgacctaaagatgaaacaaacaaatttattctacccagtttttttgtccgccgagatataaccaaacaaataatagagaatgtcaactctgcaaatggatatttccacattattcgaggaggtcgacttagcggaaaaagttatgtcctggtcgaccttcttaaagagttccaatcaagaaatacttactattttccgagtaacaagcagatttctgaccaatgttttgaacagttgctttcattaaaaaatgcgattcttatttttgatgaacactgtcttagccacaatcagattaagtggattacatcgaagtatcaaaaattgatttcaagtaattcaaatcaaattataatggcaattgatcgctccaccggaatgttcaccgaacattttcttgatcgctttcctgccatgagcgaatttgtcaagatatacttgctcccctccgagttcaacgatggcgaggctaaatgttttaatgccgaatttggtaaattggggttgctggattacgagtgtgggtggagtttgctggattacatgttaaagatagatgatgagtcgacgaaaaaacatcgttcaacccttcctaatatcaacctcattcggggccagaaaacattaatcgcttttattctttttgcaaatcaggagtccattccaatatctcagagtaatataatgggtattacagagacgctatatgcactatgtaaaacagcaaatgttgctatccagaaagattacttgtcagaagtggaatttgcacctgatttccacgatggttttcgttttgtgtctaattctaagtattgggcttataaatgtctctcagcgtatgcaaaagatcatgctcattataacaccattgccgatgctttttacgaaattgtaagtgcaatacaacgacactataatgggcgatttaatcaaagttatcatcaggccgtcaaaccctattacttttttgacacaatccagttcatcttctttgctgactcacagcaaacagggtcgctgtttctgcccgatgtaatctacaaaaagcttttgccactttttaaagatgatttccaatttcttcatcaaaaagcaaaatgccttatttggaattcaagacgcaagaaaaacaatagggaaagatcgcacatacttaatgaagcgcttcagcaggttgctcgagcaaaaagacttgctcaaaaacgcaaaccagttaatttagagtatacactataccatatggaagtaacaaaaaccctgattttagtgaacaactggcggcactgtaggatgttatttaataaagttgagcagtcagaacagttatcttcactactcaagactttttatgacatggaacaacagatgttgacatggggaaaagatttagatcttgatgagcgggaaatacaagattttaactggtttgttgctcaattggctgaatctcaaattcgcaggtgtatgtcgccggaagatcgcaaaatggcaggaaatgttatgacaaaatggcgggagattcagtcataaaagtaaacgggtgtcgcatgttagatgaatgaaatcgtcgttaggcaacacaaataaataaccaaagcatttgtaggaaaacgccagcataatgtctacgcatcaggcgtatcagtatttaacaaactataatcaaagaatagcgcccgctggcatccgtggatgtttagcgggcgctactgcgtatttcagcaatcttgtttggggtacttgccatatgcatttttccagtgttctgccgcgttcaagaaggcagtgtaatcatgggcgcggataaactccagtgcctgcttgtatttggaatatttgtagccgggatggttgagaaaagcctggactgtctcgcaagactcgtactccgcacagtctacacaggtgatgtggcctttagtcaggcagcatttcttcatcctgcatttggcccggctcaaatcccaagagccgtccggataccccggtttgcagcccttgcaggtcttctcaaattcacggcaggtcttgcagtaggcgccacagcaaccgattttctctgtgtcattcatagggaggagttcccttcagtgcgatagatcttcagaaaatcgctgatgctttcttcgactgcatagagggacttctcatcgccgtatttgatattgatgcatcgctttccctttttacatgcaggcagactcgctgctaaacgattcagaaactcctcatcggaaaaatggatggagaaatgttttttcgctgcggagactgccacatatccctcattcatctttttccccaccagccacatgggcatagagaaggagatcttattggtcaaatggggaaattccgtattcataaattcaatgaatgaacagatatgtcgctgttgctcttcatttaacaacgccacatactcggaaacagaagctacacccatgttacacctccacggtccataaacgcaaataaaatcaagcgataaatgcagaaaaaccgccatttcggacggcttttctgacaaagttggtccgagtggggagactcgaactcccggcatcttgctcccaaatgtgtgtcggaaccttcagccggcactttaccgccctctttggccctttcctctgcttggacagttcctctttagaactcttttgccctgcttgtttcaagaaaccctttcgtcttttgggatttgtgtgggattggattctgtgtattaaaagatgttccgcccggtttgaggggcaatggcaggctggatcacctcagtggaggggcgcaggaattgcgccgcataaacaaagaataaagcccgtcccaccggcagtctgagcgcagcccatctcctcgcaaatcaacggctgtctccctaaagttatttcattctaccatgccgccgtacaaaagacaacagaggcttacacagggcgataaagtagtggctatttctctctttctgtggtattgttcgtttgccaaaaggaggcgacgacatgcagaaaggaaatagctatacggtgggccagtggtgcgaccgctggttctgcgagaaccagggcagatggagcggcagcaccgtgggcggataccgcaacctgatctaccgccacattctccccggaatcggggacatcccgctggcggggctatcagaagacaccgtcaccagtttctatgacaacctgcggagccagggtctcagcaccagaagcgtctggtgcgtccatctgctcctgcggcgctgcatggatgaagcggcccgtgaccagcgtattccctacaatccggtacgactttgccaggaaccgcaagcagaaacatataaaatagcccctttgcgcctggggcagctccagcggtacctgaacgcagcggaacagttgggcgcactccctctcatctacacaggactctccagcggcctgcggcaatgtgaactcatcaccttgtcgtgggccgattttcatatccgctgccgctacatcatcagggggcagcgcttgttaaccctcaacagcagggctgagcatctcctggaacgaataccggaaaccggcttctatgtgttcctcaaccccaagaccggagcgccgtatcagctccacgagttgtactacctccacaagcggatactcaagcaggcgggcttgccgtgggtggccttccggaacctgcagcgccagtgtagggaggtgggaatatgacgctgagagagtatgtcctccgctggcaggaggtctatgacaagccccagagccgtccgaccacatacgcagctcatggctatgttttcaagaaccacattctccccggacttggggagatcccgctcgctgaattgactgtggagcaggtgggagatttcctggaggagcgaaggcgctttggcggtcaccgcccggaaagtcccgaatacccagggctgggggagcatgccatgcggcacatccaccggctgctccagcaatgtctggatcaggcgatccgagatgggctgatagcggacaaccccgcccgtaggtttcactatccaaagcccaagaaggtcagcgccaatgtgctgacggcatcagaagtggaggactatctggacgcagcggagcggttgggccacctccccatgttcctgctggcgctgacggcgggacttcggcagggagaactgattgccctgaagtggagcgacctggatgtaaaagaacggacgctgaccatcactgagaaacgctcggtggaacggcgggagctggtggagtacgaaggcggcaccaggatcgtcagtctgaccccggaagcggttgaactcctgcgcctggaacacgctaaacacccaggaagtccgctcatgttcatgcacccggccacccagaggccctactcaccacagatggtgcgccggctgcacaatgagatcatcaaagaggccgggctggatcacattcgattcacagacctccggcacacctgtgccgtcctatcgctgcaaaatagaatggacacgaaagaggtttctcagatgctgggccacttcaggaccgcaatgacacggcagaactatgccccctatctggcccatattgcctccaaaggcgaaaacaatcccaatgaagcatccacggaagatctcagggaagcagcaaatattctcgataatctcctgaaattctaatagatattctgcggaaggtgtggtatatgtttgggtcacaaggagatgatgacgatggaaaacaaactgcttaaagagttgtatgattacttttatgtccgcccggagtttgacgaacaggagaacgaagtggaggagtgccacaaagcgttgatcgcagcgttggaaaaaccggaacgaaaactggtgttgcggatcatcgatgcccaggacttgatcatagaacagacctccctcgacagttttatcgccggatttgaactggcgtggaggctctcaatggaactgcacaacgatgaaaacgagcgctcattctcctgtcggcccaggagaatgagcgctcgttgtgtatgggaagacgaaatataaaatgagcctgggcagccctcgaaaagctgcccaggcattcttgcttgtaggcttggttcagcgttcccacagaaggaccgcatccgccacagcctgctcaaattcggcctgcgccagaccggggagttccagataatctcccactaaatagtaaaccgcatctacctgccgatctacctgataggtggctgtctcaaagtcggtcagcagaccgttgccgatgcacaaatgtccctcacgatccggcatcacatccgagcgaagggtacggtcaaaatagaggaaaacagcattccgtccgtccacctcccggctgaagccgtggaaagaatcgtagctcccgccgtgatagtagaggtcgatcacctcatccaccgcaagctctgccgtcaccagaccgtccgtataggataccggctgcggaacatcggcagcccccgccaggacgatagagaagattagcatggccgccacggcgatcaggaccgcccgccggcgcccacgggagaacttcttcttcactccctgaagaacacgggcttccgtttccgactcctgagagagcgaggggacgggagtctcctccttcatttccgccaaacaggcgcggcacttctcgcattgtgccacatgggcttcgatttcctgtttgctggcctcgctgcacagcccgtcgcagtacaggggcagcaggtcgcggatgatatcacatttcatcataatccctccttgattttctgtttcgcacgataataagtcactctggcccagttttcagatttgccgaacaattcgccaatctgcgtataaggtagttccgcaaagactcgcagggtgaacacctcccggtatggctctggcagagcatggagccgctggtggatatggcgggcgttttcctggatgagcagatcctcttctacattctgaggggaaggcatctgctccagggcctcatctcccgcctgtcgttttgcctttctcaaataagatagccaacagttctttccgatttgacacagccatacggacagcctacattttccttgaaaggaggcgctgtgttcaatggcacgacagaaggtctcctgggccaattcctctgccagcgcctggtttccgcagagtcctgtcagatagcggtacactacagggaactgctccttgtacagttgatcaaaatccatccacaccacctcgctttctgcctatatgacgcgcatcaatgcgggttgttacaaaattggttttgtctttttattttcctggaaagtacagtgttatcgctcgtttttgaaatagtgtgcaataaaaagcaatcgataaaaacaaactttgtatcgagcgcaaataggcagttgttgaacaccagacccgcagccacagcgattaccgccagcttcgctctgtgggccgctgatttcagagtttcaaaatcggtgatataagtgcctaagattcagcatgagattgctaacagcggccacctgcaaaaagtaaaccacacagccccaatagatgtgggagtcgctaaaatgcggccgtgtgcttaccttcattccagacagatttcttgacagtttcgtttaaacgaatataatgatagcagagtgtttcagcttaatgttcttcgatgaggtgcaaccgtgaacggatatataactgtacaagaagctgctgagaaatggggcgttaccccacgccaagtccaaattctatgtaaagaaaaccgcattacgggagctatgcggatgagccgtatctggattattcccgaaaatgccaataaaccaaccggagaaaagaaagcacagtgtaggaggaaaaatgatgcttcagagcaccatgaataaaagaaaaaagattgacttgtcctctgcaccttggacaatgcatgagttttttgcagggagcggattggttgcatacggtttgaaaggtatgtttgcacctgtatgggcaaatgacattagcgaacagaaagcagctgtatatgaggctaattttggcaataaccattttaaactgggcgatattaaagatgtcaagggcaatgagttgccctttgcccacttgtcttgggcaagttttccatgccaagacctttctctggccggttctataggaggtatccatgccgaaagaagcggtttggtctgggagtggcttcgcgtattggatgagatgggacagaagccaaagattctcctactggaaaatgtagcgggcttactctctactcataatggcgataactaccgggtgcttcacatggcattggtggagcgcggttatgattgcggcgccatcatgttaaatgcctcatacttcgttccgcaatcaagaccaagggtatttattattgcagtcatacatggagagccaattccaaaagaattatttagcgacggcccctgctggcttcataacaaagctgctacggaactggggaattctttaccgaactggatttggtggaaaactgagaagcctgcaaaacggaaaagtacacttaaagatattattgaaactgggattccttttgataaagataatgccctccggcttgttcctgagcgtcatcaggaaaagcttaacgagcatgataatgtgtatgctactgggtaccgcagaactcggtatggagaacagcgattggaactgcgctttgacggtgttgccggttgcttgaggactcccgagggcggcagtagtaaacagtatctcgtagtcaaagaaaacggccaaacacatgctcgattactaactgtgcgggaagccgctcggctgatgggggcaccggatagctttattcttcccgggagttacaacgatggctataaagcgatgggtgatgcggttgcaatgccggttgcccaatttatcggagaaagatttttgactaagattgcggaggcggtgtacaatggctgacttcgaaagtaagctaaaagagttccaaaccgataataatattttcagcaaaggtaaactgtccgttgtgattcaatttactcgaatggtacaaggaaaagagtatccactaaatcctgacgatttcaagacggagaaagagggacaggttgctggattgggcggcggcaatctgaagaaaatcctaaaagaccatggcatcacgcagcaactgtctgctgaaggcggcagaaccagtcgtggcagcatgggcttgatgattagatatgtcgattttctaaatacatggaacgcggaagaagcggttgatctcgttgcaattgaagagttttgggctgaacaggtgcgagaatatttcagaaatcagccctttaccctcactgcggatgcatcaaaaaccattggctcgaatctggacgatttattcgagcaagcaaagaagcgacaaaagcaaaatcctgggacacagtatctgggcacagttctccagcatctgacggcagccaagctttgtttgattctgccagaaggctctttcgagattcatggagcttctgttgcggacgcgcccactgcgcgtagtggcgattttgtaattaacaagacgattatccattgcactacttccgtaggagatttgctgattaacaagtgtaaaacgaacattaataacggatatcgtcctgtaattattacgatttttgagcgagtgcagactgcgctaaatcaaattgaagacgccggccttgctggccgggtagaggtctgggatatccagcagttcctttcttccaatgtatacgagcacagtctttttgatgaggacaagcgtaatgctaaactcggagcaattattgataattataatcagattgttctggaaaaagagaccgatcccagcttgcgtattgagttcgaagcaaggtgatgatgtgtggcagatgttttcgataaagaaaaacgatctgacattatgcggcaagttaagtctcagaagaacaagtctacagaactgcgactgattgagatatttaaagaacagcacatcactgggtggcggcgtaattacaaggtgaaaggccatcctgattttgtttttcctaaattgcgcgtcgctgtatttgttgatggatgcttctggcatggacatgattgccggaacacacgcccttctgataaccaggaatactggcagaaaaaacgagcgcgtaatatcgaaagagataaagcgattacagctctttttgaggcgcgcggttggacggttcttcggatatgggagtgtgaactgaagaagaaaaatcgacaacagcttctgaggaagatatcaagcgctatcgtcacgcaaaattgagttatattctatagttctgcaattgtgatatttacataggaagaaggtgtggagcatggactggagtggttgcgtcaatatgatgcagggctatttagaaaacagcccgcttatcgtgctggggtcgggagcttctatgccttatgggctaccttctatggggtcactggctgaagagatagaaaaagatcctactattatggctgatcctcaattcgatgcactcaagcaagcgattgctgattatgggcttgaaacagccattgacagtgttcggcttcaggaagaaactctcgaatgtattagaaatgtcacttggaagaccattaatcgttgcgatacggaattttttgataaaagttccttgacggctcccatggaacttgtggagttgcttaataaagtaatcgccccatctcctaataaagctgtagttgtaaccactaattatgatagactcccagagtatgcagcagatcaaataaatgctactgtaattactggatttgaaggggcgctgttgcgcaggctcgagttgccaagtcaaatagtgaaacaaaggcgtataagagcacgagagcgtacagttgatatctggaaagtacatggctcacttgattggtttgtagacaaaaacgaaacgattatttcggtacccatgactcgaaaaattcccgaagggtttagacctttagtggtacctccagggaaagaaaaatacagcagcacgcataaagagccctatcggtcaatcattgcagaagcggataaagcatttattcaagcgggggcgtatctttgcattggatacggatttaatgacgagcatattcaacccaaattgcttgcacagattgcaactgggaaacccattattattttagcacataagatgactgaatcgtgccgcagacatgtaatcgatgcgcaggtaagaaaatatatgattttcgaatgtgaaaacgatgaacacaccaaggtttatggaaatggttggtcggaaatatatgaagggaaatattggtcgctcgatgaatttttgaagatttggtgaggaggcgaatttgatgggtatattttcatataatcctgaagaaatactgggaacagtagagagtgtggatacttcaacagcaattatcaaggttgaaaatgatgataaactcagaggattgcaggtaaatcacctggtggcgattcaaagttctaaggttggccaacatttgatcggattggtttcaaaaattattcgaaaatctggatattcagaccctatagctgacgtaactcccgaatttgcattcaatgtaatcaaggtcgtattgattggaacacatttagataaagaagggttgcaagaaaatgtgttccgtagatcgttggcaacagttccgacaattaatgcggaatgttacctgattaatggagagcgactgaaaagatttatgcaggcggtttcttctgtgcctgaaggagaagacaggatttgccttcaaattggaaattactctattgatgaggatgcaatcgcttggataaatggaaacaagttgtttcaacgtcacgcagttattgttggcagtactgggtcaggaaaatcttggtgtgtggcaaaaatacttgagcaggtagcgactctgaaatcggcgaatgctttgctttttgatattcatggcgagtattctactttagttggaaacaactttacgcacctaaaagtagcaggacctaatgatgatatttctgatggaatattatttcttccatattggctacttacatatgaagaaatgctatccctcatgttggatcgtagcgacaataatgctcccaaccaagcaatgatgtttagtaacgaagttattaagcgaaaaaaagagttcttacatggaattggcatggaagaaatggaagctaacataacgttggatagtcctattccatacagtttagacgatatgattcaatatcttactgaactggatcaggaaagagtgccgggggcgagaggagaaaagaacggaccttatcatggacagtttacacgatttattcaaaggctggagaccaaacggaaggataaacgtttgaactttatgtttagtaatgctggaagattgctaacctatgaatgtatgtcggaactttgctgtaaactaatgatgcctgctaaagatgggtatagcggtgtaaaaattattgatttttcagaagttccatcggatattctgccgttaatagtttctttgatcgccagagttgttttttctgttcaacagtggtcacaaaataatgagagacatccaattgctattttttgtgatgaggctcatttgtatattcctgctcacacagaaaaaagtatcgatgatgccagcttggtcacatttgaacggatctcaaaagaagggcgtaaatatggtgtgggcttggtagtgatatctcaacgaccgtcagaagtaaatcgaacagtcttaagtcaaagcaacaattttattgcaatgcgcttgactaacgcagacgaccaagctgttgtgaagcgtttgcttccggatagtttgggggactatgcagagatgctcccaattttggatattggagaagcacttatagtaggtgactcaagtctgctacccagtagaattagaatttctccgccaactttaaagccaaaaagtgcaacaatagacttctgggacgaatggtcaaaggaaactgttccagctaatattgaaaatgctattgaagcgctgagaaaacaatccaaataaattgccgttgtagatatggacactcacaccttgtcaccgctccttaagttggcccaatagttacagagtaaacctcggaaactgctctgtaccgagattgacgctgtttcaagaattacacaggccactctatatgagtacctaaaacatatgcagaaagatgaggtgaccagatggcagacagaaaaatccgtgctgggtactaccggcggtacgacaggaaagtggtctatgtaatctccctggccattgatgccgacaccggcgaggaaagtgtcatctggaccacctatcccttcgcggatgtccctaagtactacacctccagcaaaaaatccttctgcgctttcgtggaagtggacggagaacggaaatccaagtataagcggatgctcaacatgaagatctcgggggaagccatagaacagctggaggaagaaggcttccggggaccagttcgtaaacgaaaaaattggcaactggatgaagcttatgactcccgcgagtaccagcagtctcttacctaccacgcatacgcaaaagatctctgtgagcactacaacttcgaccggaacaaatatcgcctctgcgtaaaggaaaagagactcgttgccatcaccaaaagtgacttcgccaagctgaaagaggatctgcagtttctggacaatgccctgaaaacggtgctgactgcataccgggattatttccgggagcggttcgtggatggcctgtccattcgcaagtacgcggaagcccatcagctgaaccgcggcagcgtagactatcagcaaaagaaattcttctctgccctggcttctctgctgaaagaacgggacgaggcggagagtacatgccgactgctgatgccagcacaaaagtaaataatccaacctcaaacggagcgtctgctttgtcgcagacgctccgtttttctgtcaaatgtatgtcagcgggatatatttttcccctatacaagtagagagacaactcgggtaccatccaaaggttatgtcaaaactatgtcacatgcaaatgttcgcggctaaagaagtagagggagttttgaaaaggagatgatcaacatgagagaatctgtctgcaaaaactacggtgaggcgaaggtgctgggcgtatcaccgtccaacgggtatgaactcatgcacgaaccggatttcctggtactgcgtgtgggccactgtatggtggtgccgaaagaaaaacttattcagtgggtggaggagcatacgggaggtgctatatgaagtttcaacagtggcccaaacgagatcctgacaaaaactatttcaaggttcccaacgaagtttttcacatcggtctcagttacccagagatctccatctactgctatctgctgagcatcgaggacagagaaacctaccagtgctaccccagctacaagaccatcggcaaggcgctgggtatgagtgagaacaccgtgagcaagtatgtgcgcagcctggaggagaaaggtctcattcgcaccgagccgacaacggtgaggagcaaagacggcaggcccctcaacgggaacctgctctacaccatccgtccgatccaggcggcaatcgaattgttctacgagcggcagttccggcagctggaggaggataccgcccgtcagagggcggcggaacgcctcgcagaattagcccgtgaaagcccccagaacgccctgtgtgcgtcttttggagaggaagcgagtcccagtaccaatccggggttggaggcccaatttggccggctttcggatgcgctcccgaggacgaaagaaaaagcaggataaacgacggggtcgcaagcgcccccgtcagaagcacctctgcccgcagtgcgggcagttgcgggggcttttgcggggattggaaatggggtcaaaatccgggctgtgacatcatctctgcggtcacaatcccccaaagcctactgccacaaggaaaaaacaggggtcaaccctcggaaaggagaacattatgagcaaaaaagagaaattccccctctacctctcaccggagaaaaaggctatcctggagcgccgatatcaggaggacgggagccggagcatcaccgccttcattgagcgggcggtggacttttatctggactacctcagcgccaacagcgccggactgtttctccccacctccatcaagtcctacctggacggaaggatgggacagctggaggagcggctgtcctccatcgccttccggcaagcggtggagcaggacatggtggccggtatcctcgccgacgcgtatcagttcagcaacgaagatctgcgccgacggcgggcggagagcgttcaaaatgtgcggaaaaccaatggccgcatctcgctggagcagcgggtgcgtgatgcttgggaggaggacgatgagtggcaggattgatcgtgaaaagcccttatctcaagtgcggaggcggcagttcggtcagcggctatctgcggtacatcggcacgcgggaacgggtagagatcctcccggatgaccgtccgcccactcgaaagcaggagcaactcatctccaaactgacaaaggatttcccggaggccagggagctgggcgagtattccgattacaaagacaagcccaccaaggccaatgcctctttctttatcacccgcgcactggaggagaactggtctaaagtgcagcagtcagacggctacatgaagtacatcgctactcggcctcgtgcggaacggcttggtgatcacgggctctttggtgatgaagatgctgtggacttggagcaggccatgcaggaactggatgagtacgacgggaatgtgtggacgcatatcctctcactgaagcgtgaggacgctgcgcgtcttggatatgacaatgccaaagcgtggcggaatctgctccgagcaaatcgcaatgacatcgccgccgccatgaacattcagccgaatcacttccgctggtacgctgccttccatgacgaggggaagcatccccatgtccacatgatggcttggtcaacacaaccgggagaagcgtacctgacgcgagacggcatccgcaatatcaaatccacgctcaccaatcagatcttcaaacaggagatgctccacacctacgaacagaagtcacagtcgagggatgaactggtgcgggaggctcgccgcgcgatccggcagctcacccaggagatgacacgaagcgtctgtacggctcctgagattgagcagaagatggagcaactggccggacaactggaaacggtcaagggcaaaaaatcctatggctaccttcccaagtccgtgaagaaaaccgtggacgaggtagtggacaaactggaggagctgccggtagtgcgtgagtgctacgaccggttgtgcaggctccagggcgaggtggagagttactaccacgacaaacccagagagcggaaaaagctgtcccaggagaaagagttccggcagatcaaaaacgctgtcatccaggaggcggagcacatccgtctgggtgagatctccttcgaggatgataacttggctgagcacgacgagccagaacaggcgcgtggtgagtctaatgcctgccgggagctgtggcgaatcattcagaacgaggacatttctctggactaccgtgaccgggcagcagagaagttgggacaggtggcggagcgcggcgacgcccatgcccaataccggatggggcagctctatcgggacggccctctgctaatcccggacaaccgcaaagcaaagcactggctcacccaggcggcgaaacaaggtctgccggaagcacagtacgcccttggcaagctgctcctcactgacgattgggaggtgcgggacccagacgagggcatccgctggctaaaacaggcagcggaaaacggaagccactttgccgcttaccgtctgggtaaagagtatctcagaggagaagttatttcaaagagtgtcactaaagcggcggattgttttaccaaatcggcggaggcgggaaaccagtacgcccagtatatgttgggcaagctgtgcctgacgggacaggggctgccacgggatcaggcccaggcgatggtgtggttccgccattccgccgcccagggaaatcagtatgctcagttcttcatggagcagcgaaacaatctccgccagccctctgtgatgctggcggtcacccggatgatctatcacatgagccgaatctttgaagatcatgccctgccccagtctgggactggactgcacatcgaccggaagagtagacaaaagctcatggagaagcgcattgcgacgggccacaagccagatgaccatgaggagcagtggcctgaaatgaccatgtaagcggcgcagaaaatgagccgcaaaacaaagaataaaatcccttctggcagaagggtagaaaggaatccgatgaaacgatccaagtacaactctttcaatgaactccctctgatgctgaccgtgcaggatgtggccgatgtgctgggcattggactggcccacgcctacgaggttgcccaccggcaggatttccccactatcaccctgggcagccggatcattgtcccccgtgataagttcatggcgtggatcgatgagcaggcggctaaaaagacggaaatattttagtggctatttcaaaaattctgtggtatttgtttgtgttgcaaaaggagggatgaacaatggcaaagaaacgagcaaacggcgagggcagcatccggaaaaagcccaacggccgctgggagggccgatacacccagggcatcgaccccagcaccggccgcgccattcagaaaagcgtgtccgcccggacgcaggccgagtgcaaagagaaactggcaaaggccatccgggacaaccggggcatcccggtgaaccacaacgaggactatactgtggcggagtggtgccggctgtggtttgaaacctacagcaagcctgtgatccgccccaacaccgcaaagacctatgagaacatgatcgaaaatcacatcgtaccggccatcggaggagtaaaactcaaacggctcaccgccatccagatccagaagatgtacaacgattccaagaccagcgggcgagtgcagcggttcgagaaaaagactgacacggccctgtctggaagcacggtgcggcgcatccacatggtgctctcctcggcgctgaagcaggcggtcaaggagcggattattccatacaatccctgcgacaactgccgtatcccgcccaaagagaaaaaggagatgaccatcatcccgccggagaaactgggggtatatctcagtgaggcggaaaagtacggcgtcctgcccatgttcttcctggagttatccagcggcctgaggcgcggggaattgctggcgctccggtgggacgacctgaatgtgaaagatcgtatcctctcagtgagcaagcaggttacccgcatcgacggagagctggtggtgacggagcccaaaaccaagaactctgtccgcaaggtggcgctgtcccagcaggcggtggatatgctggtgcgggagcatgaacagcatccggacagccccatcctgttcccgtcgccccgcaccggcggctactggagcccggatgcggtgtccaggatcaaccggaaactgctggcgaaggcgggcatcgaggagcatgttcgcttccatgatctgcgccatactttcgctactatggccctctccagcggcgtggatgtgaagaccctgtccagcatactgggccactacagcgcagggttcaccctggacacctatacgcacatcaccaacgatatgcagagaggtgcggcggagaagatcggcggcttcatggaaacagccacagctaagccggaaccggagccgcctgatccgacggaggagagccggtgtaaggtgataccgttcgagagagtgggatgaaagcaacaagggcggtgcaactgcgccgcccttgttgttatagtgaagaatttatttcgttcatcaactggataatgtattctctgtgttcttccttgtagttgcctttttcgtcagcaatgccagatttctcctgtatctctcttgcttttttgtccctgatatcatcttcttttagagtaataattttatactcgggaaattcagttcttagtttctctgcgtcatcggccttatcaccatcaaaaatagaaacaattttcttgtatcctaaatccttaaatagtatcaagaaggctttcattttaggcgcaccgccgacaccccaaccaaagaagtttccctttaaagttatatttagttttctggctattttgttaaggattacaacgtcctcttggccttcaaccaaaataatgctgtcctcaaggaaaaaggcttcattagcttctataccaagcgtgtgaggattgttcaggtcacgaagtataccaccaaaagtgtttctacacttgtcagaaatcatatagcattttgaaacagtatcttcttttaccacgcgaatcaaattggcaccgttaacaatagcatcccaattcacaaagtacggcgaatgcgtacatacaataatttgacgagtcatactgtattcaagaaaaagagtcattagacgtttttgcagcgcggggtgcacggataactctggttcatcaataatgatgacgctttcctcgggtgcatcaaatagtgcggcacaaatagtaaaaatactccaaatgccatctccaacgccctcgctactatgtgaaactgtgccagttatgtacttaatataatattggcctgaatcacgctgctcaatggtccatcgaaaatcacttccgagtactcttgtgataactttatcgaaatcgcccttttgcttttctatctgaaatatccgagactcaaaataatttaaagaagcactacgttggctttctaattttagagcagtagaaatatagccatcccgattccattggttttttgcaaaatcaaaaggaattgcacgtctggatggtaagacatagggtttgaattcaagtggcttatttttttgtgttgaactaccgcctccaggaacggaagttacagtatatattttatcattctcatcagtcagcgataatgcgatttttccatcagtcatgtgattgcgtctcccttcggaaaaggaaggggaatcatttccgataaatgctcggattgactcaataatagtggtttttcctgcattattggcccccgtaatgattgttaatccactgccagcgtgttttttgtcagggatagcaaacttgaccgtttgagcttgaccgaagccacggaagcccgagatagagagttcttttatcatagtaaaatcctcctgaagaagaaacgcaaaataaaaaatcacatgggatatagcactctttaactaccttggtatccaaagagtttatagcaaaattattatagggtataagattgcaaaactcaagacttcctcgtatctacaacaagaatacgacaatcgtgccaattagggattggttagggattcggtggtttcagcagctatccttgctcatgctcttgccgcttttctgcccctgaaaccaccgctgaacagcaattgccctaagcacaaaaacagaataaaaaacgaagaaaaaccgcctaaataggcggtttttctaagaaaggtggtccgagtgacaggattcgaacctgcggcatcctgctcccaaagcaggcgcgctaccagctgcgctacacccggatatgaagttgtggggtggcccgggcgtattctcccaaagcaagcgcgctaccaactgcgctacacccggttatggaatttttagatgtggtcaaacatgtggtcaacgccgatttttgaccagttaccggcgatgagaaaagtgctgtcagcccatgtgtcccaaggctttccgggttttccaggggctacggaccgaaccccagccgcacgctcccaaagcaagtgcgctaccaactgcgctacacccggatattttgttggagtgttccactttgttgctcagtcagcttttctattataatatatagacagaaggattgcaagagggcattttgatatgatatgatagcccatacgaggtgagctaggctatgcgaatgagaaaaaaaccgaacctgggagtgcggatggaacgctgtacccgggtgctgatttccgacccggaggagcggaagggaaagtggcgggagctgatgcccgaggcgaaggaggtctttctggagctgggctgcggcaagggccgctttacggcggagactgcggcgcagaatccacaggcgctctatattgcggtggaacgggtgccggacgccatggtgatcgccatggagcgggtctgtgcccaggagctgcacaacgtcttttttgtggatggggacgtagcgcagcttccgctgttctttgctccgggtgaggtagaccgcatctacatcaacttctgcgatccctggcccagcaaccgccacgccaagcggcggctgacccacccggacttcctgctgcgttaccggcaggtgctggcagaggcgggggagatccacttcaagacagacaaccgggatctattcgagtggtccctgttccagttccccagggtgggctttggggtgtctgaggtcacccgcgacctgcacgccgacggcatccacggtgtaatgaccgactacgaggagaagttccacaacctggggaccccgatcaaccgctgtgtgggtaccatgggcccgctgcccgaagtgccggagcctccagcagaggaatgaccgcgcaaaaaggagcttccgctgtatggcggaagctcctttacttgtgctcagagaaacgcgaccacccggtacatgagcatgaagtgaaacaccgagcccataaggatgaacaggtgaaaaatctcgtgacagccaaagcggggattatcgcggccaggccacttgacggcgtagagcacgccgcccacggtgtagagaatgccgccgcccagcacccagaaaaagccggcaggggggagcaggcgcagcagggggacgagggccaccacagccagccagcccatgaagatatagatgccggcggtgagccagcggggggcggtgatccaggccagggtgagcaccagcccggccagggccaaggcccagatgacaccgaacagggcccagccccaggcaccgtcggtgcggagcaccaccaggcagataggggtataggtaccggcgatgaggaagtagatagaggcgtggtcgtacttgcgcagggcgatgcggcccttgacgctgacgttgcggcagtgatagagagtgctggccgtatatagacccaccatgctcacaccatagataaggaaggaaaccacgtgccaggggctgagggagagggcggcgcagcgcagcaggagcagcacggtgcccagcagggccagggcggccccaatgccgtgggtaatggcggaccagggacgcagcccgtcataagggtcccggtccttttcccgcagcctggccgggcgcggctttgcctgggaaggataatagagcatggccttgcggcgggggagtgcgttttcctgattcatatggatcacctttccttacctttagtataacacatgccgcacaatataatcaatagaaactttaaatataatttttgaaattatattcggtctcctgttcaaagggaacaacgctaggatatggcggaacgggcggcactatgcggacaaggcggcggttgccggagggaccggagtgtgttatgataagaggcgcgaaacaggggagggcggagcatggagcggattctgctgatagaagatgatcaggcgctggggcgggggaccgccctggcgctggccggggagggccgggaaatcagggtggcggccaccctggcccagggctgggcggccctgagcgaaggggaatacgcgctggtgctgctggatctcaacctgcccgacggaaatggactggattttctcactgcgctgcggcgaaccagcggggtgccggtgctgattctcaccgccaacgacctggagagtgaccaggtggcgggcctggagctgggggcggacgactacgtgaccaagcccttctccctggcggtgctgcgggcccgggtgaaccgcctgctgcggcgggggagcgccccggcggccacgctggagctggggcccttctccttcgactttgagcgcctgcgctttatgcggaacgggacggaggtggagctgtccaagacggagcagcggctgctgcgcctgctggtggagcaccgggggcagaccctgacccgggagcagctcctggaccgggtgtgggacgggggcgagtttgtggacgccaacgccctgtcggtggcggtgaaacggctgcgggacaagctgacggacgcccccatcaagacggtgtacggcctgggctacacctgggaggaaaaacggtgaccccggcggtgtgcggggccctggccctggcggcgctgggggcgggcttcgggctggtccagtggctctacacccggcggctgctggcccggctggaccggatgctcgccggtgcggtggacggcagctttcgggagagccgctttgacgagtcccgcctctccgccctggagggccggctggcccggtttctcaacggcagcgccgcctcggcccgggagctggaggggaagcgggccgctatacagaccctgatctccgacatctcccaccagaccaagacccccatcgccaacatcctgctgtacgcctccctgctggcggagggggagctgtccccggagcaggccgcccaggcggccaccctgtcccggcaggcggagaagctgtcctttctgatccaggccctggtgaaagcctcccggctggagacggggatcattaccaccgcgccggagccccagccggtggggccgctgctggagggggcgctggcccaggcccgtcctcaggcggaggccaaggggcttaccctggcggcggagccctgcggggcggccgcccgctttgaccggaagtggacggcggaggccctctttaatgtggtggacaacgcggtaaagtacaccccggcggggggacgggtgaccctctccgccgtccccctggggcagttctgccgggtggacgtgtccgacaccggcatcggcatcccagaggaggagcaggggcggatcttcggccgcttctaccggggcggcgctgtgcgggcggaggagggggtgggcatcggtctctacctggtccgggagatcctgcggcggcaggggggctatgtcaaggtggcctcccgccccggccagggaaccaccttttccctctacctgccccgggaatagggcggatctttccaaactgtaagatttgagaaagagtgtggaaagattgatccactacaatgggtactgtcagaaggcagtacccattttttccacaggaggagattccaaatggcgattttgcagaccagggaactgaagaaatattatggcgcgggggacaccctggtgaaagccctggacggggtggagctgagcgtggagaacggcgagttcgtggctatcatcggcacgtcggggtcgggcaagtccaccctgctgcacatgctgggcgggttggaccggcccacctccggcacggtgacggtggacggccgggagctgtccaccctgaaggacgaggagctgaccatcttccggcggcggaagatcggcttcgtgttccaggcctataatctggtgccggtgctcagcgtatatgagaacatcgtcctccccattcagctggacggcggcgcggtggacgagagctacgtcagggaggtgatcgccgtcctggggctggagaagaagctggacagcctgcccgggcagctctccggcggccagcagcagcgggtggccatcgcacgggccctggctgccaagcccgccatcctcctggccgacgagcccaccggcaacctggactcccgcaccagccaggatgtgctgggactgatgaaggtcaccgggcagaagttcgcccagaccatggtgatgatcacccacaacgaggagatcgcccagctggccgaccgcatcgtccgcatcgaggacgggcgcatcgtcacgcggtaagggggcgagggtatgaacgtctccaaccgcaagtgtgtgcgcaccctggcccggcggagcctgcgggccagccgcacccgcaacctcatcgcggtgctggccattgcgctgaccacggtgctctttacctccctgttcaccatcgccctgtccatcaacgacggattccagcagaacaacttccggcaggtgggcggctactcccacggcggcttcaaatacctgaccgaagagcagtacgaggcgctgaaggacgaccccctgattgggcagaccggcctgcggcggttcgtgggtatgccgactcaggcccctttcaacaaggcccacgtggaggtgagctacgccgacgccaacgacgcccactggatgtactgcgacccggtggagggccgcctgccccaggagggtaccgacgaagcggccaccgacacccacgtgctggagctgctgggcgtggagccggagctgggggcccggttcaccctcacctttgatgtggacgggcatgagaccactcagaccttcaccctctccggctggtgggagtacgacgaggccatcgtagccaaccacgtgctcctcccggagagccgggtggacgccctgctggacgaggcgggggtgaaccccaacgccccggaggacggcatgaccggcgcctggaacctggacgtgatgctcaagagcggctcggcccacatcgagcgggacatggagcagattctggccggccacgggttccagagcgaggacgccgccggggaggactatattcgctccggcgtcaactggggctacaccggcgcccagctcgccagcggattggacgtccaggtggtggccgccattgccgccgtgctgctgctcatcctctttaccggctatctgatcatctacaacgtgttccagatctccgtcaccaacgacatccgcttctacggcctgctcaagaccatcggcaccaccggccgccagctccggcgcatcatccgctaccaggccctggccctctccctggcggggatcccggtggggctgctgctgggctggctggtgggggcggggctcaccccggcggtgatcggccggctgaacggcgtgaccaatgttgtgtccgtcaaccccgtcctctttgcggcctccgccctgttcgccctggtgacggtgctcctgtcctgccgaaagccgggccggatggcggcaaaggtgtcccctgttgaggcggtgcgctacaccgaagggagcaaaacccgcaggaaggccggaaagcgggcggggaagggggtctccctgctctctatggcctgggccaacctgggccggaaccggggcaagacggtggtcaccgtgctctccctgtgcctggcggtggtgctgctcaccatgacggtcaccttcgccaagggcttcgacatggataagtatatcgccgcctttacggccagcgactttatcctggccgatgccggacacttccagaccggcggggaggtattcaacccggacatggccctgccggagaacgcggtggaagaggtggaggcccggggcggcatcacggccggcggccgcacctacggctgcacctccccggtggaggagttcatcaccgaggagtactaccgctcggtgtggggccggtggaacgacgcggaaaccctggatcagatggtgtccggcatggaccgcacggaggacggcctgctggccgatcgggcccagctctacggtatggagcggtttgccctggaccgcctgaccgtgctggagggggatatttccaagctctacgaaccgggcgggcggtacgtggctgccgtgtactccgaggacgactacggcagaccgcggatggacagccactgggcccgcttgggggataaaattacgctgcggcacgtggaggagtacgagtactacaaccccaacaccgacgaggtgtacggcggagaggaggacattccggagggcgcgccctttgccgcccgggcggtgaagtaccgggacctcgagtatgaggtggcagccctggtcagcgtccccaccgccctgagctaccgctattacggggccgacgagtttatcctcaacgaccagaccttcctccaggacaccggcacggcggatatcatgtactacgcctttgacgtggacgacggcgcgacggcggatatggagggctttctccgggactacacggagaacgtcaacccccagctcgattacgagagcaaggccacctacgccgcagagtttgagggcttccgggggatgttcctgatgctgggcggggcgctgagcttcatcgtgggcctggtgggcgtgctcaacttcttcaacgccgtgctcaccggcatcatcacccgccggcgggagttcgccgtgctccagtccatcggtatgaccggcgggcagctcaagaagatgctggtgctggagggcctcctctacaccctggcggccgtgctggcctccctgctcctcacagtggtcatggggccgctgctgggtaccgccgtgaacagcctgttttggttcttcacctaccgtttcaccctggcgcccatcctgcttattttccccatcttcgtggtcctggggttggtgatccccctgctgacctaccgctccatcgcccggcacaccgtggtggagcgcctgcgggaggcggaatgacaaacgggcgcaggatataaaacgagagccgacttgtttgacaagtcggctctcgttttggcctatgataagaatgcaccccttaagaccctgcggagcaagggcttgagggaaaggatggtttataaagcagaagaactcttgaccacacggcccctgccgctttttattttgcaaacttgggcgcggatacttcatttcccgcgaatgcattggggccggggttggacagggagaaatacatctttgccgccttggttgtaccgaagtcctgattggagccgctgtcctgcacctcattaaaggcatcccggaacatttggttgtgcgcctcctcacggttgagcaggaagtcgatggtttcccgtacctttttgtcctcaatctggcggtagaggtattcgtatactaccttggcccgctgctcggatgcaatattgctcagcagatccgcgcagagatctccagtgacagtgacatagtctgccgtccaggaatagccggaggcgttgatgagaccgggattcaaaccaagcagaacatgtgtttcgatctcgcctgcctggaccttgtctgcctccacgtcatgaccgttgagcagattgatggtctgagctaccatttccatgtggctcagctcctccgccgcgatatccataaacagatccttgatcttggggtttctgatgcggaaactctgggacatatattgcatggcagcttttagctcgccgttgccgccgccgagctgctcctgcaatagtgcggcatactgaggattgggctgctccacttctactggatgaaacagttgtttttcgtgcttgaacaagcatatcaccccttccgattggttgtgtttagctttccgcaatttagaaaagctatgcgggctctgctcgttttgcatgatacaggcggcagattgaaatacctttaccaccaaaagaatacgatatgcattaggaaagaaaggtcatatatacttacaagggagcaatcaagccgactttaccagcgcaaatttttatacgatgccgcactagagagatgacggcctcccgcgcggggcccccatatttcttgggatcgtagagcgcggcgtcatgagccagacagtcccgtaacgcctgggtataggcggcccgaagctccgtggcgaagttgaccttacacacacccatggataccgcacgctgcacatcttcgtccgggacaccggaggagccatggagcaccagggggatatctaccgcttcccggatctgagtcagccgctcaaaggccagcctgggcttgcccttgtagaaaccatgtgcggtcccaatggctacggctaaagagtcgattcccgtttcccggacgaaacgggccgcctcgcctggatctgtgtaaagatcctcacctggcttgacctccagatcatcctccttaccgcccagtttccccagctccgcttccacacaaggccgggaagacatcccgcttgccatctccaccactctgcgggccagggcgatgttttcgtccagcggcagtttagagccgtcgatcatcagggaggtataaccgtctgacgcggcctgctgacatagtccaaaccggtctccgtgatccaggtgcatagccactggcacagacgccttgccggccatagcacgggccatggccgcgaagactgctggctccgcgtattttaatgtggatggcgtcgtctgaagtatgaccggcgcgtgctcggcccccgccgccgcgatgacagcctgcatcatctccatattttctacattgaacgcgcctaccgcataaccgtttgcacgggcatccctcaaaagtcctctgctgtttaccagtgccatataatatttccaccctttccgtattcaaggctttgctttctccagatttgcttcagtccctgagtaccgcatagagatagtcgtcgatgcagtcccccacacggtccatcaggaggtcttcagccttgggaggcaatatacccgcatggactctggcgtattggactggcatatactggctgatcagggccattgggatgcctgctgtgttcaaattatccagcaggaggcggagcgcaccctgtaccttgctgttggtcaggtaataccgggcccggtctgagtagctgaaggcccgggcgtaccgcttctccggcatagagccatgataatatttggcccactggccctggtcctccagcatgacttgctccaggatctcacgaaaatgggaacacgggaaatccatcatcccatacaattcccgttcgatctgctccagggcaaacagtccttcccggagggcgaaggtcagagctggtccgaccttgagaatggcgatcccgtcctctaccatctttcgaaggcattgccgcggctgataatccgtggaatgtccttcaaagaccaggttggggtgccgctttaaatgctccgtcaggctgtgggcggctgtccggtcatattcgatcacgctttcgtcggcaaattccaccccgggctgcaccacaatggcaaccacacgctcccatgccgcctccaaatgattggagcagaacgccgcccggaacgtggacagcgtggcttcgcagtcctccggcgcggttacggttacgctgtcctcattttcctgggcgccgcctgggatgggcacctcactgccgatgatatagaccggcgcaggggcttccgggtgccacgcactgtattgggcaaaagcttcctcggcgatacggcagagttgggcgccgcggtgggcgatcacaacatccgataaccgctcattgggagcgtcgtccgccaggcgcatgctggtatcaatatgtattttggaaaagccagccagtacataggagcggatcagttcgcctgcgtttttcattgcctcagcctcgggaagatgggtccaggtcagcggacccaggtggtcgccgccgcagagcagtttgtcaatcgggaaattttcctcttcagctaaacggttcagaaacgcccggaacgctaccggggtcatgccggtatagccgccgttctggttcacttgatttgcagtcgcctctaccagcaccaccgtatcacggtccttggcccggcgaagggccgcccgaattacatactcgttggcactgcagcaggaatagaggcccatttcacgattctgtccgcgcttttgcaagagttcagaaagcggattttgaatttgtagattggtcatagcttcccctttccttttgcacagagggcacccggcgatagccgccgggtgccccattggcacgttctgttttcagacgataaaatttaagaacttcttcattgggtcttgctggctttgcgggcggccaactcctccatgatctcagcgtggcgcttctcggtcagcttatagaacagcatggggacaactgcaaggattataattccagcactgactagcgtatatacaaagtggaaagaatttaatacgttcaccggctgtacggtctcttggggaatgtagccagtcagaccgattacagcggcaacagcgatacctgcgactgccatgacacacttggtcacgaagcaacgggtagaggtaatcatagcttcattgcgctggccggttttccattcgccatactcaattgtatccatcatcatcgcgttgacacagaccatgacagctccaacgcatacagttgagacagaagatgtggcaaaaagtacaatagcgttatgatacccggcaaagtagagaacgaggctggatattgtcatgagcccggcaaagagaaacatgcaattctttttcccaatatgctgagagagaaaggtgaagatcaatgcgcctacaaccataccaaccagattaattaagttcagcacagtcatataacccaggctgccccagttatatacacaataataataattgagatagcctttcagcatcatacctagcaggcaaaagatatttgagatttggatcaggagcaagggcttgttttgaaaaatattttttagtgccagtttgagctcaaacttctcactgtcgtctggtaccacatgctcccgtaccaacttgaaggaaatcaggtacatggtcacaccccagacggcaacagcaagtgcaaggaaaaagtaaacataccagttaaattcgccaaagaaggccagtgccattggcatcactaatccaataattccagtaatggtattggacgcggtggtagtgaagccaacgatttccgagcgctctttcgtattgctggtcattgccgcaggcaagctccagaatggtatatccacggaggtaaacacaatactgcctgtgatgatatacataatacctgcaaaaatgcacagtccgatggtgccgatatcgggcttaaagaaagagagtgctaaacagatccccataagaggacctgagcggagaagccacgggcgaaaccggccccacttactcctagtacggtctgcaatgatacccatagagatatcggtaaaggcgtcaaagaatcgagccccaccaaaaaggaacgctaggaagccggcgggcagctttagaatatccgttaaaaacggagtagtccaggtagaccacaaggtatacatagaatcatgcccgagtacaccaattgcgtggccgagcttttccttcttggtacattgccttggttcttcctctaatttagcttccttaacgacttcggtagacacaaaatttccctccttgtttcttcctcaacgagttgcggggcaagcgcgaataaccttggcatgggtccctgtggctcttgcatttatttaatgatactccggcaaccagtcgccgtgggcctgtatgaggtcgtccacaaggctgcggatctcatcgatggtcagttcgctcccggcatgggggtccagcatggcggcctgatagatgtactccttcttcctggtgagagcggcatctacggtgagctggtgcacctcgatctgccgccgattcagcgcggcgagctgattgggaagcggccccatgtggcagggggagagatgaccctcgtttaccatacaggagacttccacacaggcatcgaagggcaggttgtcaataagcccagtattgagaacgttaccagcaaatccaaaggttctgccggtctccagtgcctcgatgatgccggcggcgtactcgctgctccttgtgtgggtcaggttctcattgtggaccagatgctcggcctgctgcttccaccgcgcaatctgatcgcggcaacggcgggggtactcatccagcgggatgtgaaagcggtcgataagctcaggatggtcctttttgatgaaccaggggtaatattcgctgctgtgctcgctggattctgtgacgaagtagccgaactgcttcatgatttcgaagcgaaccatatcatgatgattatcaggagtaaactgctcggccactgacggaattctgtccgcatactcaggatgtaactcacgcaatgcaagcgtgggggcgtaaattggtccctcctgggcacgcttgcggatgatgggatagagatcctcgccgttgcggctaatctctaatagccaggccatgtggttgatgcccgaaatcttgtaagaaacgccgtcccagggcatgccaagctcggcgaggagttcaggtacacaggcctggtgggagtggcacagaccaactgtattgacagaactggctcggaacatcgccaagcatagcatggacatggggtttgtataattgatgaagagtgcatcaggacagaccttctccatgtctttcgcaaagtccaacattacagggatggtgcgcagtgcccggaacattccaccgatgccgtgcgtatctccgatcgtctggcgcagtccatattttttgggaatttcaaagtctgtaatcgtacaggggtcatatcctcccacttgaatgcagttaatgacgtattttgctccacgtaaagcatccagccggtctgcatatttgacgaccttagcctttccgtcgttagagttccggttaatattagaaagcatcatataggactcttccaaccgctgatggtcaatgtcatagagcgcatactcaaactcgcgcatagcatccgtcgtaatgcagtcgcctaaaacattttttgcaaagacggtactgcctgcgccaagaaatgtaattttatccaaatgagtaacctcctattttatttggaatgaaacattatgcgttagtggtataagtcaaatagtccaaatcaataaccggagtatcgcacacaatgcggatcgtgtgcgaaccggctggtagatcagtcttttgaaacaaaagctttcccacagccgcagctccgttaacatttacctgctgcacaaactcattatcgatataaacgctggcaacaccgaagttggaatcattttgtccataccaacggatttcgcttccagtaaattcgaactcgaccgaggcgccggcactactggcataacgggcggttccttcctgaaagacgtcatgatagtcatcattccatacgcctgtatacaccagttgggcgtccattgcatcaacagtaaccgtcgtctccggcggcgttggttgatcttgctctggtagataagaaatatagtccaaattgatgttccaggcgttttgtacaaggcgaatggtatgttctccttcctccagtcccgtacgctcaaacattagctgcccagttgcttcctggccgtataggattatgttttccactaactctccgtctaaatagacatctgcagtgccaaaattgaagctcatctctgcatacaggcgtacggctgtaccacggaaagtcagttcagcataagcgccggcttcgtctgtgcgcattgcgtttcccatgtagaactcgctgttgtgatactcttcccaattcccaacataagtgatccgatccgagagcgcatcgaccttttcatagatgggttcaagggtagcagcttcatatgcaaagcggtcaatatcaatcactccgctcttgcacacaattttaatggtatgctcggcagccggaagatcaagcgcttcaaaaagacatacgcctgcttctgcgaccccattcgcatcaactgttgttttcagttcatcgtccaaataaacttctgccgtgccaaaattggtatccctctggccataccagcgaatggaagttccagtaaaggagaatacaaccgaagcatccgtactgttggtataacgtgcagtcccttcgctgaaagatgcgttattgtcatcatgccatgtccctgtgtaaataagagcctcgtctctgtcatcaacagaggtgaaactataatcagggtcaacaggttctggatccggttccgaaatttccaccgctttaaccagtagatagtcggaaaaacgtgtattgaatacagcgttatcacccatcaggtttgttgccacgacacgatcattgacatagtcaacaatcctatacattttatttggatctagccccttcaactcaatatctggatagccagtggggctatatttgctcccatctttgtagaaggcatagtacataaccccgtctttctccaccacataggtttcgtaagggtcaaaaccataactgtaaagatcgccaataaaccggcctttctgcaactgaactgtatccgcaatcccaagccatttttcatattcttccttggcagtaccgctaaggtcacgtttttcaatgagaacagagcccgtaccgacggcacttggataccagatgttattgtggtcggctgtaacagggaaataatctcccatcagtgccttgtaggctttcacgcgtctccttgtttgatccacagaagtggggtcagccgtagcaatctgtgtcatatatggtaaactatagtagtcctggggcgtaccgcagttgcacaacaaattgaacacattggggtcgttggccaccatagcctcataagagacgcggtatatctcggattgcttttcagtggattcttctggcgaggcgtggttatgtgcaggattgtagcattcaggcatactccacacataatctcccttgaagccatcgaacccccaatcattcattgcacggtttacaaagtcaacttggcttgcaatcgcaccatccgccatagggcaaagtgcatatcccaagctgggattggtcccaccaccaggagtaggaagccttgcaggtcttccatctgcatccataacgaaatattcagggtgttgctgatagagtatactatcgatcccgccgtcacaaggtctccaccaaaggagtgcagtcataccatgctcatgaattgcatctgtcagccgcaacgcatcggaggctccatttggaaacttttctggatttaaggcccagtctcctgcattggtataccaaccatcatccaaagtgatctgcttgactccggctgcctgaagttcatccaatttgccgattattaagtcgatcgtccagttaaacccccagccccagctttcccatcggagatcatagctgctatcaggaatatccccaggtgcaggcataatcacgcccaagtgatccattgcatttttgtaacctctcaagccgttataatagtcacccggatggactacagcaaagctctcaccaatttcgatcacgcttccggcggcaatgactttgcctggccacccgatagaaacttgagctgaatcactggtttcctgaaccggagtatgtacctccctcctggttgcagaagcatcgccaacggtaatccctccatcagcaatgtaaatatctgacacaggaatacttgcagccgtgtcatcctgtttattttccctactgaacttgccagagtcggtcaggtcaatcttttgaagcgtatcatagtagtgcatcggcccctcaccgccgccgttataactccagatacgatcttccgcaccataaagctcatacacactgccaatgaaccaagacacttccacatcagaagctcctgcctcataggatgttgcagtatataccacaccctcctcgatatcagaggtctccagcacataggtacgaattaggcccgtgctcatgctctgagaggtaatggtcattctctgaccgctgcccatcactccgctggtgctctgctccacatcacatgaaatatggctgaagtcctgaacctcctgccctccaaccactgccccccccaatggagaaggcttgctcatctggataagcccagacccctctgtgcggtacagagtgattgtctgcccgtccgcgtcataagtgacgcggacgccattgccggcaatggcataatcaccttctgcaatcagtcctgcgttgccggtgtccgttgcaggcgccgccgcaaaagaagcggtgggcaagagctgcagacacagcatcgtactgagcgtgagtgatatgaactttttaccacgcatttccgagtcctccttctctataatcctttgtgttgaaagtcgcctgctagaatcgctttattctcccacatacgaaaaatagtcgaagtcaaccaccggagacacacagacgatgcggatggtatgcttcccataggccagaccgtccgcctcaaatagaagctgctgagccgccgccggcccatacacatttacctcccctgccagaacgccgtccacgtatacctccgcagcgccgaaatttacatcattttgaccataccaccgaatggccgtccccacaaatgtgaactccacggacgcgccgatctcgttggtataacgggccgtcccttcataaaagcttccgttgctgtcgttattccatgcacccgtaaacaccagggaagcatcccggtcatccaccgggacatatacgggcgcaggctcgattggaccatacgcatacacattgagttcggcggcagtaccgaacccacctgcgccggcaatcgccttgagctccaggccgacggcttctaccggtgcaaagctcacggttttatccttggcatcgagcgcccagtctgagccggaggcgactaggtccttgctgccgtcctggtggatggcgtacagctcatactccgaaattatgccatttgtcccgttttgacgtggggtatagacgaagcggccgacggtatagggctggtcaaaggaaacggtgatactctgcggcagttcatctttgggagcatagttggtatgccatattgtgcggacgtttccatcgaggacattggaggcggggccctccgtcgtcccgccgtagacgctggtggcggttgccgtcatattggactggggaatcagcgtgtacggattctccaccactgcaatttcaaggtcgtcggacaggccctctcgggtctccgccatgatgcgcgctgaaccgacagaaacgcctgtaatggttccaaactcatccaccgtcgccacatccggatcactggaggtatatttcacgacctgatcagaggtgtccacaggcgcgaaactggtttccagcttcatgacatcccctgtgggaagggaagtggtctcagcactcagcataagggaattgccggaaaccagggcgggcgtcgtgtagccggggtcatccagcagcacgcgcatcatctcaacaaaactgttttccgcatagccgatcctccagatgcggtcatcctcacttttggcctgaatggtcagattcccggaggaatccgcgaccatcttgttattggtgtccttctgcagggcactgtaccagacgcgcatggtaccatctccggcggagctgcctggctcatagtaaaaactggagcgatagatctggaaatcatcccaactgccgtctggcccgggggacagcaggggcttggtgcccacctgctcccagttgactccatcctttgatgtggtcaggtgcaggacagagccatccggatttcggccggcaaagcactgggaaatacaaacaaactccttcaaatctggaacatactggacatcctgatgccagggggccaactgctgcccattctcgtcaagccccaagaagccgttgacgcggactggctcaccccaggtgatcccgtcgtccgaataacgcatttccacgaagttcgcctgaccattctgataccccacgtcgccggtattgttggcccacaggatgaacacatcccggaagtcatcgtagacaatagtgggagagagcatatcgtagcggtctggagaagcaatggcggtaatgaagtcatcctctccatccgcaacctgacgctccgcgtcggaggtgggcttcgaccatacgcgggtcatctcatcataagtcacggggacgccccaatgtacgccgtcataggaaatccgcagccggacttcggccccaacgcctccgccctggtcatccgcccagttccaataggccatcatggcatcgtattccgcgttatagaccatatcagcgtcgcagttgtggtagcgggtgctgggcggctgcggctcaatgggattggaaagcccctccggttctacccaatgcactccgtcgctggaggcaacgatggacgggttttcgtagatggagatccgcatcacgttgggcgtataaacggcccaatagcgatagccgttccacggttcttccaggacaactacgtccgggtgagtcacctggtcatcggcatgcgcactgtcgctgtaataggcgggaaaatcctgatatccgggggccttgttcaatgcggactcgctggagtctgccgcaagcgccgcggttggaaataactgggccgtcacgagtaggcccgttagaagcgaaacagctttccttcgatttctcatatcccttctattcctcctttgtagtccgtccttatcctgttaacgacgcctgatccggcagtttcatatttggagctatcctctcccctctgttttcaaatcgtttctctcagacaaggcaaacgatccttgtaaaaaaaatttacagggatatgtaggcgtccaggcccttgggctggtcggggtttccgcctagggcaattgctttcagcagagctgtcatttgcgcgacatagatgaacagaatgccccatgcggcgaactcgccgacttccggaatctgaatatgggctgccgcgtcgtacctattttctgtgcagtgggaaatcgtgaccacagggccgccgcgctgaatcacatctttcatcatagcgctttggagcttttcttcaccgggccgcagcaacgcgagagtcagagtccgttttccactgaccacgataggcccgtgacggtaatccagcagatggaaatagcggcctgtcagcatggagatctcggtaaaggcgagggcgccctcctccgcgatgccgcaaatggggccgtccgccagcaccaccacattgtcccaatcaaggtttgcgatctcggccagcaccggccggtacttcagctgaaacgaggtgctctcccgcatggctgccaggacactctctcggaggcggtcatcccttgcgtattccgccgccagaagcagtgtggaggcatacaggttcgtgacagttcgggtctggcagacactgtcatcatggcaccagttcagcgtcaggttcaggtcgcacaagggcatcagatcattcccatcctccgttgtgatggacaccgctggacatccgtgagcctctttgatgtgcttcagggcccataccatttcagaggtctttccggaccgtgaaagcaggagcacgatgctgcccttcaccgtctcataccagaacagagggtccacaatgtagtcgccggcggcgatcgcatttgcgctggttcccgggagcgacgcaaacagagatgctgtgctcttcgccagcatatagctggagccgcagcccaaaatggtaaacttcttttgctggttttcctggaagaactgctccagattttttttgttcttctcaaagtattggcaggtgtagttcagggacagcggggtatccagaatctcagcttcggtcaaaaacataacatcattctccttcggacatttaactgggtgataaagggaaccgttccatggccaacatgagcgcgccctcggtcgcggagtatttgggttcacaaagtatgcagttcagctcttcggcctttttacggagaggggccaggatgaattctccggcatggaagataccgccggagtaggaaacgctgattggctcggcggagaaacgaagttttgtcttgagcgtgcgaatcatgagcgccaactcaagcgcagccgtttcatacagcgcggcagcggctgtgtcgccagcccgggcggcctgtaggacgtaccgctggaaccccgcgactttttcccgatagggggcaaagtcccggacaatccgatcaataaactggtagtcctccgtcaggccaaactccccgtggactagatcatagagcggacccctcggcaaccggccatcggcctctttggaaaacagactcattccctgccgaccaatccagtagcaggagccctcatccccaaaaaactccacccaccccccgcagcgggcaaattctttgtcacacccgcgtccaaatgcgatagaacctgtgccggaaacaatatggattccctccccacaggcgagggatccagcccagccaacttcaccgtcattcacaacatacactgggactggagtcagagcatctgtcagcaggcgaacgatctcccggtcatttgctgggttttcgccataacagggcatacccacgcaacacccggcacaatcctgtgggcttaccccgcccccggagagggcctcccgtaccaccttcgtgatcagggcaacggattccggaataccgatggactgataggaacaggtcgggtaggtcatggtttggatcggaacactgtcagcggtggagatcgcgacggcggtttttgtgcctccgccgtctaccccgacataccattgcttcatattggctcctccatgtggtacttttaactgtaataacgcgtgcggatcggctacttctgtatatactgtatagttttttgctaattttgtctatggttttgggtaaaataggccaactaccctcagttgtatgcattttgaatcgatacaactgacctgagttgtatctctttttttaacagggaaatatttccttgtaaattcactccccatatgataaaataattggcaaaatagtaatagtctctaaaaatacttgtaaggatctatggggcgattggctatctgaagtgacgtgaagcagcggcaagcggggggtgcggtatggctcaaaggccggtctatatagacgtttacacggagatgcttcgtgatatacagacggggctctatccggaaaattcactgttcccccccgaagaaaagttgtgccggaagtataacgcaagccgtagcactctccggcgtgcactcaacatgctgaaagaaaccggtgtgctttactcggtccagggtaatggaacctatattaagccgttcgtatttacccagcccctatctgatttctactcgtttactgatacgcttaaaagcagcaatattctaattcagaattctgtcattcactatgatctggtcaaagccgataagtctttggcgattgaaaccgggtatcaggagggaacggtgttccataaactgctccggctccgctcggccaggacgtatcctctgatgctggaaaccacctttctcccccaaagccgtttcttgacgctggacacggaggcgctctcctgcggctctctatatgagtttttgcgagaacagtataacttccatgcagatcgggccacggaaaaattccggcctgttatgccgcgctcagaagaaaggacgctgttgcatatctcatccaatgttccgtgtactcttttggagcgatacagctatgagggcaatgtcctgattgaatatacaaaatccattgtccgcggcgataaatatgcgtttcggattgagttggcaaacaactcggtgattcctctcccggaacaaagggagcgatgagtacatattgcattccagttatctttatcctcacagttttttgatatttgtggtgagatggaaaaccagccatatgagtctgtagaggggaggacgtgctgtcctccgcatccagccaccggcggcaagggccggggccgaccatagttccgcctatgctcggccggtataaaataaagctgcgccccatgccattccattttcggacggcatagggcgtgttttttgtgcgggaatcactttttgtcggataacttctaaattaaatccaggaggttggtttttctgctggcttatgcggcgcagtcagagcacggtgcgtagatacttttcaaagagacggtcaacggccacgaaagctgaaagatacaggagactttggacatggccggtgagctccgctgcaaggccatccgttataagactgccctgcctttgatccaggggggctcagccacagccgggccgatgtgcgccgaacggtgtccgagggactacgtgtgtgaaccagccgtccctaatttcaaggcacatcccgtagtgggccacaaagagaacggtgagtccatcttccgctatatctatactgatatccagaaggaactgacagttaagctccggcagagtattgaggtgtatcagagtgtcgagctgactgaggagagtcggatggcactgggccagtggctggagcaatggttgaaaaacatagctcctaacattcgaccctctaccttgagacgatatgaaggtaccgtgcggaaccacattgtcccctttatgggagacaagccaatcactcagataaccggaaaagacattaaaaagttatatgatacgctggctcgtcagggaaaccgaaccacaggagagtgcttgccagcagtactgtccgtgggattcactccatgctccatgaagcactggggaggcaaaacaaattttaacggatgagcagttggaacgatttgtggagattatccgggaggatgccgtctggtatgacttcttctatacagaactgacaaccggactgcggcgaggtgagatctgcggcctccagtggagggactttgatgcagatgatggaaggctcaagatttgccgcgctgtacatgaggagcgtggcggaaaactgactacttgggataccaagacatcagctggtgccagaacgatcaccctgccgcccagtactgtagaattgctccgggagaggaaaaagtccgctctgacggaatggatcttcccccatccgtggaaaccagaacagcctacccacccgagtactgcctatgatcggctgaaagccctgttaaaacgggcggagctgcctgatatccggtttcatggtctgcaccacacttttgccacccatgcgttggcatctggtgtagatgtaaagactctgtctggaatcctgggacataccaggtcggcgttcgcccagacacctacccacaccactacggatatacaaaagcgggcggctgagatcgtagaggaatttcttaaaaatatctttgaagaggagttgaagctatgggaagaaagcgaaaaaacggcgaaggcaccgcccagctgagaaaggacggccttcccaagacgaaaaatgtgctggccaagaccaaaggtgagtgcgtggataaattgaaaacactgaaagacaccattgcacctgcaaatccgtccaaggttcgggcagatatgccatttggggagtgtctgaactattggtacgaaacctacagaaaaccataaatccggcccagaacccatcgaacctacgaagggtatctccggctatacatcaaaccaaggctaggcgatattccactgaacaaactaacagaaaatgataagcagcaaatttgtgtgtggatgaagccagatgagcatgccaatggaaaaggtattgctgacagccagattcgatgttgccgcagtctatgccggcaggcactggagaaagcagttgaggagcatttgatcctctgcaacccggccattggatgcaagtgtccgcctgcaaaacgagaagagatgaaaattccctcaggggaaactatgcagagagtactcatccaggccaaagaggaaaattactatgaactcttccctctggagtttgccactggcctgcgactgagggaactggccgcccttcagtgggacgatttgaacttaacgactggagagctgcggatcgacaagcaagctagcattggcggatcagaggtagtcatctgtgaacccagaacaaaagcggcggttcgtaccatgatcctgccgccatccgtcaggcgagtgctggcagagtataagaccaaggtggattcacgatggatgtttccatccccaaagaaagaagacttgcccatgcgtccatcctcgccccataagcgcctgcacagaattttggattatgcgggatgtgaacgggtgagatttcatggtccgtgccatacttttgcaaccaacgcctaggcctacggaatggacatcaagaccctgccgacaattttgtgttatgtatccagcgctactaccctgaacacatattcccacataaccgacgagatgcagcaattggcggcggaaaagattgaccgtgataccgcgaaagcagaggtcaaacaaccagaagagcggagagaacattccatgacaaacttccaagcaaggaaacgatggagtcgcaaagcaagctgaaatgttgcaaaaccggcccgccgatggaaggcgcccatccggcgggctgattttttctgtctatgggcaaatttgtggtcaagaaatattctcagaaaatataagagaagatttatgctgaaaatgcgactgtttgagagatagcggcaacttccaacgagattagttgggaggcgctaaacagtattggcacaaacaaaaaagacgggcactcctgaaagggggtacccgtcaagtagttaaagcagaaatccgtctgtggtatttctgtggtcaaacgagaaaacgccgcagttttcactgcggcgttttctatgaatgaaatgtgtggacaaaaaagatgcacactttcaaaagctttgcaacgaaacagaataagcattttggaagcgtttcagtctaataacttctgcaacggcttttattgccttactccaaaagacgaatttcatcatcttcaaaccaattatttttcatggcagttgctttcactgcttcgcagtcatatgtataagcaattatagccaaacttttttgtgcgcgagtacaagcaacataaaacagacgggttgtccttgttatactattgtctttaccctctctttcattcttgatatcagtttctgtttttagtttgacgccaaaaagtttttcataactaaaaagaaatccttttgcttctgcgtcatctataataaccataactcttgggaattccaagcctttaacaccctgatgtgttgcaaacctcgtattatcagagacatatgcaaaatatttttctaaagtggtaaatgggacagatagagcctttcttaaagccgttatccttatagattcgtctgcggcaggagatgacaatatgttatctacacgttcatccagtttaaatagccctgtgtcttgaattgagcggaggacatccaagcaagttggaatagcatcatctttccatagttccatcaatttatctacagcactttcgacttgctgcagtgcttttgtttgatcgtcaagagaaatccatttcttgctttccattaaaggagaatactctttgactatttttagtacttcaaagtcattattgcctttataggcctgaacaagcggagatataacttttgacagaaaagaaagttctgaaattgacccatctcgcaaagatgtgttaaatacaggaacctcattaagtggtaaatacagttctaaaaagccaaagcgactagcagccatatggtgttctagtatgagacttttatattgtttactgtcacgccactcaccatcaccagtttcttcagacatgatttccgcaactcgctgctccgtcacttctttattagcatctgaagaaacgataaacaaccttacatttcccacctctgcgtctgaccgagggcgttgttgttgagtatcgactgtaaaccttatggcatttgccaaagtaactattcgagatgcactgcgatggttcatgattttttggggctttacccagtcatcagggatacactgagaaaggttttctttgccatcttgatagattcgttgcattgtatccccaaacatgccaactatgaactttcctttgtgcctttcgcatacggtaaaaatggcatctaccagttctttttttgtatcttggctttcatcaatgaggagaataggatattgggaaatcaaaatgttctgcatagtatcttctgcacagataaatttcgaccccatttttactacttcactatggttgagagaatcatatcctacattatctccatttggattataggtaaaccttcttaccgtattgattttagctagtcgctcttgcttttttcgtatatcctctgctcgtttttctgaagtttttcccgctttgctttttctttgcttttcttcaagttctgcgatttcaaggtttatcgaattgattacccacgctttgatatctgactgatagtttttaataagctcccacaagaaactatgtatagttgagactgagaaaatcgacttgtaatgtaatcgcctggatatttcatcgcaagctgcattggtgtaagtaattacggctatctgttttctattcgttagaagccagtcacctagtgtttcatccaagaaagttaaggtttttattaagcttcgagttttccctgacccagctcccgcaaaaacaaagaaacattttggatcttcttttaaaaagcatctctgaatttcttcatctacatggtcatctacatgatcatctaataattcttcggttacctcttttattttatccatcgttaatcctccggatgtaaatagtcctgtagccacattaaaccttggttaatatatggtggaaccgaaagctcgtctggactaatttcaaaaattacgtctaatgcgaattctgccttctgctctgattttcctgcacgcagcattttataaattttttcatggatcatttcgaatgtgtcattagagttaagtaaatcatgcgtttgttcaaccaagttcccagaatcagtgacttttatcttcttgaaaagatcataatttgtatatataagacaatcttcaaaagttccaggtatggcctctttttcttctccttcaaagtccacttttacaggagtttgataggctaaacgaatagaaaatcgatacggagaagcaaaagaaaattcctttttatcttctgaataatctaccaacttgtcgatgtctttttctttcatcagccactttgcaatagcgtagtttccactgatttggccttctcctctcttgggaactacagatttgtgataaccttctttttctgctggatctaaatctgtaataaccaatgttgggaggcataacttttcaatcagaggacttaaccggtgagcatgacgtccattaaccccaagaattgtaatataccgctgatatagttctggaaactttgagcgtataaaatgtggtaatagcatactttcggctacaccttcgaccagaattgctgcatcagcaaaaaacaaatcacaatgggttgattgcagataacgtgtaacaaatttgttggtctgatctgaatccccaaatacatcagataagttaattactttggatgtcgctactgcgcattcagtcccttctggtagccgtttgaaatatcttaaatttccaaaagtagtttctatagcaatatggctcgaatgggtgctgatcaccaattgcgttgtaaaattcaagttttgcttgagaaatttatggttagttaaaactttatatgcttggcgtataaaaacttgctgcacttgaatatggaggtgagcttctggttcctctaccagcaccaaatgcatcggctcaattacggtattagtatctttagcttttccttcacgcatccagtcatctctaaaacccatcaaatcaaaaaccattgaaataaggttttgataacccaacccattatacttttctggtagtttcaaagtattgtcggttttactgagcgcatattgtacggctgaatcgtgttttaatgtttcgctagtcataactttagttgttattgtaagtttgggatcactaatacccggataacccaacccttctaattcttttattgcaggagcaaattttaatgcaagtgtcttatcaaaaacttggcgtgcgccttcagtagcttctaaaatatctaaatcttctggagaaggagccttttctggatctagatgtttttcataataattgcgcatttgggcagataactgtttccgaaccttttctgttccttctgaactgtcaggatctgcaaatccgcgttgtgcgtcaatcatgtcaacccttacgatgtcctttagtgggttatctgttaaacattctgcctcaaaggatgttggttgtacaggggcatcttcgaaatgtgacggatcaaggataaatgccttgatagaaaaatatgtagtcaattttctatcaagaaattcacacaagtcttttgggaagagattgaaagaacttttttcaacccttgcatgttctgtggtgcgagctgaagagtacgcttctcgatactcattaaataaattagaaacatcttttggtaagagagctaaccgaactcccaattttcctccgcgccattttaaggtaggaattatgctggcaacataatgcatttcattaggagccacatcaagccaaatatccattttaggaacaatagtatcccaatctaataaatcagcaggctactcgcaatccgcttccacccatttagttcctattctgtttatatcaatacgttttgcaatggttatgtcattaaaaacaaaactgcgatttgctaaaaattttgcaagagcatccatcgctgaagtttttccgctgttatttgcccccacaaacagagttgtttctttactgatatcaatgtgacatccaaatagttttcgaaaattctgaatatcaattcctattattcgcatactgtctctcctttgaagtagatgttactacaatatggcatgataaaatttagcaataaaatcattcaatctacaaaaatcccgtctttgcactccctatcaaaagagactatactaccatctttatctatcatcaataatcggttgatgattgttatctatctgatatagatccaattgtccttcattttgtacttgtttgtgttccagaaaattttttacataggtcttttgcaatatcacactacccgtatacttctcatttttcaaaatctttcgcaaggtttccctgctccatgtctccttgcctctcggagaaggaatccccatttcttttaggcgagaggatatccttgagagacttttaccctcaccggccatctcataaatgagccggacgatttgcgcttccttctcattgattacgagtcggccatctttgttatgagtgtatccataacagattctctgataatacctagactctgggttctcaaatgcttttctcagcccccatttgatatcttcgcttttggaatagctttcttcctgtgctctagcgcagactaccgccagaagaaactccgaactttcatagagggaatggattccctctatttcaaaataaatgtcgaccttccaccgtcgcagcatccgtatagtttccaacgcatctacagtattacgggcaaaacggtgtgccgattttgtaaggatcgtatcgatctttccccgccggcaagccaatatcatcgcattaaatctacggcgtcccttcgcctgtgtcccgcttccaatgtcggaataaataccggcgaatgtccaatgaggaattcgcttaatccattcctcatagtattgttcctgtgaggacaaactggtctgttgctctaagctgttcgtactgacacggcagtatgccgccacctttagctgcgtggggacgagattatttggtggtattgttctgacggaccacatgattttccccttaaagtttacactacatgagaatgactttttagcctgctcctatgggctttttcttgttggacaatatcaaatagttctctggagataattgcctcatgatgaccatttatgactgtctgagaagtgtgatcgaccatcttgacctgcacgccattttgcacctgcgtttttcctaaaatcacatcgcccacatatttctcattactcaaaatcttgctaattgtctctcgcgtccacaactctttgccggtgggagatttcaccttcatacgggccagagaagcagcgattttccctagactgtctccatcggcaaatcgttcaaaaatatggaatacaataatcgcctctgtgggataagctaccaacttgccttcggatgttactttatatccgtaacacacagtggaggcttttgcagattccccagtttggaaactttttcgaagcccagctttgatctgctcactctttgtcgtattcatcctatcatgttcctttcataattgcaatttgaataacaaaagacacagcccgaagctgtgtcctaaacatctatacttcatatttaaatgcaagagggttcgactcacttaaaatccattttccactactttaagcgaaaagaaaagttgacaaacccttgatataagccgttttctggcttttgggtttgtcaacttatcatggtggacctaatcgggatcgaaccgacgaccttacggatgcgaaccgtacgctctcccagctgagctataggcccatacagagtgctctcagcaaaatgaaagatccttgttgtggacactcagatattatagcataatttatccggttgtaaagaccctttttgaaaaaagtgaaaagtgatattgataaatggcgggaaatgatgtatgatatcaaatacagccttccgacggacggcgcagaggcgtccggcccgcggcaaggccgcactagtcggggagttagcggtgccctgtacctgcaacccgctacagcagggatgaatcccggcccccggaactgcgttgtgctgtctgccccaggtaagcagcgatgatggatcggtcccgcgcaaggccgcaccgtgaaccgtgtcaggcggggaaccgagcagcactaagcggaccgcgacctgtgccgcgggggtcccgctcctgagccggctgcctgggtaacgggtatagcgcagtctccaaaggccggtgtgcggtcttgccacgcgccggacgcggcgggagaggggcgaagcgacgcggctttccgcatcctccgcccctctcctttttgatttgatttgaggtgaccgcccttgtatcaggccctgtaccgcaaatggcggccccgcacctttgacgatgtggtgggccagtcccatatcaccgacacgctcaagcgccaggtggccaccggccggctgagccacgcctacctgtttaccggcacccggggaacgggcaagaccacctgcgccaagatcctggcccgggcggtgaactgtgaacacccggtggacggcaatccctgcaaccagtgtccgtcctgcctgggcattgagagcggctccatcctggatgtgctggagctggacgccgcctccaataacggcgtggaccaggtgcgcgccctgcgggacgaggcggtatacaccccggcggcagtgcgcaagcgggtgtatattgtggatgaggtgcacatgctctccactgcggccttcaacgcgctgctgaagattttggaggagccgccggagcacctcatgttcattttggccaccacggagctgcacaaggtgccggccaccatcaagtcccggtgccagcagttctccttcaagcggattctccccggcgacatcgctgcccggctggcctatgtggcccgggaggagggcattgagctgcggggggagggggccagcctgctggccaggctggccgacggcggcctgcgggacgccctgtccctgctggaccagtgcgccggtccatccggccccatcggggagcaggaggtgctggacgccctggggctggcgggcaacctggagacggcgcggctcatggagcagctcggcgggggagacaccgccggggccctggagaccctggcccggctgtacggcgcggggaaggacgtgggctctctgctgggcgagctgtccgccctgacccgggatctgctcatccgaaagacggccccccaggggggcgcggccctgctcaccggcggctatgacgaaaatacgatgcgccgcctgtccaaccagttccagacggcccggctggtacagatgctgggcctgcttcagaccaccatcgcagatctgtcccgcagcggcaaccgccggacggacacggagctgtgcctcatccgcctttgcgacccgggcctggacgagagcaccgcggcgctgaatgcccggctggcccgggtggaggagctgctggcgggggggattccggcggcctgcgcggtaccggggcagcccatgaagcagtccgcaccggcgaagcgggagccgtccgccccaagggcggagccagtcccggcagagcgccccccgttggaggaggagcggcccccactgcctgatgagccgggggagcgggtagacgtagacgagacgccggagccgtctgcagctcctgaggaccgcctggtggccggagaggcgcccaccggcggagaagccggccggagcgccgcggccgacctttggcccggcctggtggcggcggtgcggggaaaatttcctgcggtctaccccttcctgagcaacccggccatggtgcaggggcggctggaggacggggtgctcacgctgtgggtgaaggacgagtttaccaagagcatggtgggcggagcctccattctggaggagctggggcggctggcctcggctcagaccggcgtcccggcgcgctgcgcggtcaaggtggggaaggcgcccgctgccccggccgcagcggcacccgcccaggcggcggagcacgacaaactggacgatctgctggcgttcagccggcagtttgacaacatcatcattcaggaataaaaggagttgcgaccgatggcaaagggattcaacagccgcggaatgggcggctttggcggcggcatgaatatgaacatgatgaagcaggttcagaagatgcagcaggacatgatgaaaatgcagcaggagctggagaccaagacctacacggccgccgcgggcggcggcgtggtctccgccacagtgaccggcaagcgggagctgaaggaggtcgtcattgaccccgaggcggtggatccggaggatgtggagatgcttcaggacatgatcgtggctgcggtgaacgaggctttgcgggcggcagagagcgactccgcctccaccatgcagcagctcaccggagggctcggcctgccgttctgagccggacacagggggacgggccaaaggcccgcccctaagactgccgataaaccctcctgccgaaggatttggaggggaaagatagtgtgaaagggaaccgtcagggttccctttcgcgttggatcaaacgactttttattattttatgttaattttagaaagcccgccagcttgtcgaaacaccttttcgacaagctggtagcggacctttggtcctgagagggggacagcgcgtggaacagacgacacacaggcagatgtcggagagctttcggctgggggcggtgctggccctgaccggaggctttctggatgcgtatacctaccttatccggggtggagtgttcgccaacgcccagaccggaaatatcgtgctgctgggggtacggctgatggagggggactggggcggcgcaggccactatctggtacccattctggcctttgccgcgggggtactggcggcagagctgatccgcggacggttccggggggcccaggccctccactggcggcagatcaccgtggcggcggagctgctcctgctggcggcggtggccttcctgcccgcggcgctggacaacgcggccaatgtgttggtggcctttgtctgcgcggtccaggtggagagcttccgcaaggtcaacggcaatgcctttgccaccactatgtgcaccggaaacctgcgcagcggcacggagcggctgtacctatgggggaagaccggcgagcgggaccacggacaccgggcggcccagtactacggcattatcgtgtttttcatcgtcggagcggcactgggggcctggtgcagcggccggtgggggcagagggcggtgttgggggcctgtgtgctccttttggcggcctttttgcttatgtttcagcgcaaaccccttgcgagaacgggcaaaggggtataaaataagaaccacttaacaatttgaaccaaaatggggggcacacagaaatatgggagagcggtccaaggtttacatgacggacctccggtgcaggccgggggtcagcctgctgaacaagctggagaagctgatgcgcacggcgggcatcggggagatcaactttgagcgtaagctggtggccatcaagatgcactttggcgagccgggaaacttggcattcctgcggcccaattacgccaaggtggtggccgatgtggtgaagagcctggggggcgtccccttcctcaccgactgcaacaccctctatcccggccgccggaaaaacgccctggagcacctggacgcagcctatgagaacggcttctccccgctgtccaccggctgccaggtgatcatcggcgacggcctgcggggcaacgacgacgtggaggtgcccgtggagggggcggagtacatccagacggccaagatcggaaaggccatcatggaggccgatgtgatcatctccctgtcccacttcaaggggcatgagcagaccggctttggcggcgccatcaagaacttgggtatgggctgcggttcccgccggggcaagatggagcagcacgcccagggcaagccgatggtggcgccccgccgctgtgtgggctgccgccggtgcgccacccagtgcgcccacggcgccatcacctttggggaggatcgcaaggcgtccatcgactgggacaagtgcgtgggctgcggccgctgtattgcggtgtgcaacaccgacgccatccgccctggcaacgacgcggccatggaggagctgggctgccgcatggcggagtacgccaaggcggtagtggacggccgtccccagtttcatatcagccttgtcatcgacgtgtccccctactgcgactgccacggggagaacgacctgcccatcgtgcccgacgtgggcatgttcgcctcctttgacccggtggcgctggaccaggcctgcgccgacgcctgcgggaaacagccccccatccctggctcccacctggacgagcagatgcacagggagggcttctgcgacaagcacgaccacttcatcaacagtatgccggacaccgactggcgggtgtgcctggcccactgtgagaaaatcggcatcggcacccgctcctacgagctggtggaggtaaaataactgcacaacgcgtagaaagggagtaatctaatggacgtgaagaacatcctggcccactgcgaccacactctgctcaaacaggagtctacctgggcccagatcaaggaggtctgcgacgacgggctgaagtacggctgcgcctccgtgtgcattcccgcctcctttgtgaagcaggcggcggactacgtgggcaacgagctcaagatctgcactgtcatcggtttccccaacggctactctaccaccgccgtcaaggtctttgagaccgaggacgccatccgcaacggcgccgacgagatcgacatggtgatcaacatcggctgggtgaaggatcagcggtgggatgaggtgctggccgagatcaaggccatcaaagcctcctgccagggccgcatcctcaaggtgatcgtggaaacctgcctgctcaccgaggcggagaagatcaagctgtgcgagctggtgaccgagtccggcgcggactacatcaagacctccaccggcttctctaccggcggcgccacccgggaggatgtggccctgttcaaggcccacatcggccccggcgtgaagatcaaggccgcgggcggcatctccagcctccaggacgccgaggacttcatggccctgggcgcggaccgcctgggcacgtcccggatcgtcaagctggtgaagggcgagcacgccgagggatactgagcagaacagaacgggggaccggcccgcaggggctggcctcccgtttttgtttctcaaattttataacaggcggccggttttcaacatgaagttccggcgtatcatccatccgggggaacgatgtctccacgctaccccaatatccatccgtaaggtcggtcaggagcctgtgacgcagttaggccagttcctggacgaagcatcccaatattccggtgatcaaacagagcctgcccccttttcaaacagggggcaggctctttacatagaggggccagggacgataaaattttagagaaaatttcctgtggggccgactaagggctggctttccgcgtcttattaggcagaaaggagtgagcaaaacacgtgcagctgcaattctcgcatccttccatctccgactcggaatttgtggaacggattgagcagaaaaaggcatccttttaccgggtggcctttgggtatacacgaaatgaggacgacgccctggaggtggttcaggaggccgtctgcaaggcgtacaccgccaagtggaggcttcgggaccccgaacgcttttacccctggttttaccgaatactgaccaatacggcgctgtccttcctccgccggcggccgccgcagggggctgtgcaggaggcgtgggacgcgctcccggctgaggacggtgaggagcggtgggcagactccctctggctgagggaggagctggggcggctggatgaccgaagccgaaccgtcattctcctgaaattttacgaggatatgaccttccgggagatcgcccaggtgctccgcaagccggagagtaccgtgaaatccgattactaccgggggatgaatcaattgaaggaaaggacgacacagatatgatacagacatccgaaggaaacctgccgcaggggctggatgccgccattcgcaccggcctggagcgtgggcggcgcacggtggcccggcgggcgcgggtgcggcggggggccgtccggtcggccctgtgcctggcactggtgctgggcctgtttgccggaggggtgaacgcctcgccggccttcgcggccgccatggaggagctgccgattctgggcagactggtgcaggtgttccgggtcaatgcgcccagcgtggacggcggacagactgccgcaggcagccgggcggccctgaccatggagcgggagggcgatacggagtggctgaccctccgctacgagcagtccagcgccgggcgctaccacgccgaattcgcctcttttcccaagacggtcacgctgaccctgcccgggacggagcgggtggagatcctgtcggagctctcccgcgcccaggacaccagccagtacatcaagtctgtttacaccgccgaggggtgggtggaccgcgccgccgtggtccaactggagctggagagcgatgcagatgtgcagctccgggagtaccaggagccgggcagtattgtgatccgcctgactcccgcagagaaccggctggacaccatctactcactgcgtaccctgtcggcggacagcccggaggccctcagggccatggccgcgccggaggagggggcgcgcctgctgcgggacgacgcaggtcggctttttgtggagctgggccagtatgacacccgggagaaggccgagcgggccgccggtgaccggggggcggcgggcctgatcgtggagcggcgcaccggcaacaacgtgccggtctgctatgagacggaggaggcttaccagagtgcggttctgctggacgggtacaatgagcttcttcaaactactgtggaggtgaagcctatccttactttcctggaggaacacctggccggcgcgtccgccgaggtacaggacaccatgctccggggcctgacgggctttctggacgggaatgaagcggggctggactgggagcggattgcggcctgctatgctatggcgggacagacgctgcccgaaaaattccaatgagaaaggcggaggaacatgagacagagatacctgagactgatatcggtgctgctcctgctggccatactgacggcctgcggcacggacagggagggcgctgcgggcggcacggtggagggagttgtgaaccggaacggcgactttttggtgctcctgacggacgagggggagtaccaggcctttgaattcggagcgggagtggacacaggcgcactggaggagggagactgcgtatccgtcacctataccggagagctgggcaaggaggactccacgccaacggccgtaagtatttccaaacaataggggagagggccccgccggcagcctggactgccggcggggcatctgcttacgtgcggaaccagggcctttctgcgctatgcttgaaaagcaggaaggggccgtatcattcccctgaaaagaaaagggggacggcggtattttctggcggctgcacgggagaccttctccacataaaattcacaattatgtgctatcatccgtttcgggagtgattcgcagtgaaacgcattttgattgtggaggacgagcaggacatccaggagctgctggaggcctacctgggcgacgcgggctatgagacggcaacggcgggggacggcattgaggcggtgagccgctttcagcaggaggcgttcgacctggtcctgctggacgtgatgctgcccaagctggacggcttcggggtgtgcgagctcatccgccgccagtcccgggtgcccattgtcctgctcaccgccctggacggagaggccgagcagctccggggctttgatctggagatcgacgactacatcaccaagcccttctccatgcccatcctgctgcggaagctggcggcggtgctgcggcgggcggggggcggcgcgcccggacgctgcctgcgctaccgggggctgaccctggaccccgacgcggtggaggtgcgcctggacggccgggtgctggagcagctcaccgcccgggagtttgagctgctgcgggagctcctgtccagccccgggcgggtgtttacccgggaaattctgctggccaagctgtggggctacgactttttcggggacgagcgggtggtggacagccacatcaagaacctccgcaaaaagctgggggtggactacattgagactgtgaggggggtgggctaccgtgtgccgaaggaacatccgtgagagcctgacggcccgtatcttcctgctcaccctgctgctgctgctgggggcggggggactcaccttcggactgatcgcctgggccacccccatcacctatgtgtccgtggtcggcgaccggctccaggtgcaggtgagcgagctcaccgaccggctggccctaactaagctggccgacgccgggcccatcctggatgtatttgtccgggagagcggagcggcggtatccctggcgagccccgacggggagagtgtggacacgggctccctctatgtgtccgtcaccacggccgtgcaggagtctgattcggtgtccacctatacctatggcgccgatggcggcccggcacagagggaacgggccgggcactatgtgaccacggccctcagcgacgccctgatcgcggaggtgacctttgccgaccgggcggaaacctatcaactgctggttgtccctcccatgcgcctggccaaccaggcggtggaggccctcaaccgggcggcgccctgcctggccctggccctgttggccttttccctgctgtgcgcggtagggtactcccgctatctggccaggcccatcgtccgcatcagctccatcgcggggcggatggcggagctggacttccagtggaaatgcggcgagacccggcgggacgagatcggcgctctgggccgcagcttggatgagatggcggagcgcctctccgccgccctggccgagctggaggaggccaacgcggccctgcggggcgacatggagcgggccagggagctggaacgccagcggctggccttcttctccgccgcctcccacgagctgaagacccccgtcaccatcctgaaggggcagctgagcggtatgctggacggcgtgggggtgtaccgggaccgggagaagtatctggcccgctccctccaggtggcggggcggatggaggcgctggtgggggagctgctggccgtgtcccgcatggagtcggacggcgcctcccgccgggaggcggtggagctgtccgccctgacggcggagaagctggcccaggacgccgagctgctggagcagcgggggatgaccgcggtggaggcgctggagccgggacttctggtggagggggagcgcgccctgctgggccgtgcggtggaaaacctgctctccaacgccgccctctactcgcaggagggggcggagatccgggtgactgcggcggcccggggggcttgggcggtgctgacggtggaaaacaccggggcccgcatcccggccgaggccctgccccacctgtttgaggccttttaccgggccgagccctcccgcagccgggccaccggcggcagcggcctggggctctatctggtgcgcatgatcgtggagcgccacggcgggacgtgccgcatcgagaacagcgccgacggggtgcgcttcaccgccctccttccgcgcctctccacagaaaacacataaattctccctctctcctccacggggggccggtatccttgggacgaacccaaacaagaaaggatgccgagccatgcaaattaccctgcaagaactgaacatgacctatcccaacggcaagaaggccctccagggggtgagcgcctccctggacagccccagcctgatcggcctgctgggccccaacggcgcgggcaaatccaccctgatgaagctgctggtggcgggcctgctgcccaccggcggcgccatacgggctgacggcgagcctctgaccaaatgcgagcgggcctacaaggcccgcctgggctatctgcctcaggacttcggtctgtttgacgagctgacggtggagcagtttctggactacatgggggcgctgaagggcctgcggagcggccgggagagcattcgggcggtgatcgaggctgtccatctgggggagaagcggcgggccagaatccgcaccctctccggcggccagcgccagcgggtgggcattgcccaggccctgctgggcgacccggcgtttttgatctttgacgagcccacggtgggcctggacccggaggagcgcattcacttccgcaacctgttttcccggctggcccaggaccggctggtgctcctgtccacccacatcatcgaggatgtgcagtcggtgtgctcccgcctgctggtgctccaccaggggcggctgcgcttcgacggcacgccggaggagcttatccgggcggcagagggccacgtgggcacctttgaggcgcgggcggggggccgggaggacggcctgcacatcaccgcccgggtgaacaccgcccggggcgtggcctgccgggcggtggcggagacgctgcccccctatgtccggcccgccgagcccaccctggaggacgcctacctctatctcatctccggggagggcgaggcatgaacgtctggattctctcggtgcgggagctggcgcggctgctgcggggccggctcacctggctggccgccgccctcaccgtcctgtcccccctggcggggctgacggtgtaccggtccgcctcggccgacacgatgcagtccctctatgtggccaatcccgccctggccgggggcgtgctgggcgggctgttctttgccctgctcaccctctgcgactgcgcccgtacctcccgctgccgggtggaggtgctctgcgacgcggcggtgtctcccctgaccgctgccctggcaaggctgatggccctgctagggacggcggcgctgaccctggccctcacccttctgacctggctgccctggacggcccataccgtgggcgccgtctttgacggcggggattatctgctggcctacctcattctcatgggcctggcactccccctgtgtatcctgctggccggggcagcgtggcagttcacccgccgctttgacctgtccctggtgctggtggccgctctggcggccctgagcctcaccatctggcgggacaactggcagctctgctggctcaacccctgcgtctgggccctgtccgacgatttctccaacttccgcatcctccgctccgccgcctacatgcgcctgacctggctgctgggcctggcggggctgtgggccctgtcctacctgtgcatccggcggtacggccggggccccctgggctctctggcccgcacggcccggcgggtataccgccccctgctggccgcggccctgctgctctgctgcggctggagctgtgccgctcagcccttcatcgaccacagcaacccggatctcagcgccatgaccttcctgacgatggaaccgctggagggggtggcctgcctgcgccgctccgtccaggtcacgccggacacaaggcggggcacggtggagggtacggcctcctaccagctccagaataccacggggcaggagcagacggtggccctcggcgtcacccccggctacaccatctccaacgtccgggccaacggggtggaggtccccttctcggtgagcgattaccaggagtacaacgaggccaaactggaggtcgccatcccggccgaggagcaggtggagctgaccctggagtacggcggcttcccccaggagagcatgcccaccatgcaagggagcaaggagctcagcggcgaatacctctgtctggagaacgcggccctctctccccgcctgatgaacgtgatgccaggcgaagacggctatcccgccacaattgagatcaccctgcccgccgccatgacggtcatccccttcggcaccagcgaggcggaggtggtggccgaacatggggacggcaccaagacctggcgctatgagaccaaccgtgccggcggcatcctctacgccggcgactacgttcgtgaggagatccaggccggggggctcaccatcgacttctactacggccgcaagcaccaggccgtcatggaggccgccggcgcggcggaggccgtcctggcggtgatggactactgcgccgggcactacggttctcttgccttcggggatggggagcgcctcaagctgatccagagccgggtggccggcggcggctacgccggggacggggccagcctgctggacgaggccgacttcaccgcccacaacctgggcgacgcagacaagggcggcggggccgccgaggtgatgatccacgagctggtccaccagtggtggggcttgggcaacatgtttgacaccgccgacccctggtcggcggagggcctgacgtgctacaccacctaccgcatcgcgaaggagctctacggcgaggactacgccagggagcactatgtgaaccagtggcgtgcggaggtggaggactactacctcaacttctacgtccgccacccggagtacctggaggccctgcccgaggcggagcggctggccatctccaactccctgtccggcatgcgccggtacagcgagatgccgctgaagattttgaaagcggaggagctggtggggggcgaggcggccatggatgagatcctgcacggcctcttcaaccgggagctggatcccatgtacccctatctgacctaccaggaatttttggacgcctgcgggctgacggaggaggacttgacccttgattaagatatttcgctgcgagtgccggcggctgctgtgcaacaagtttttcatcggcctgctggcggtgctgctgttctatgccggacaggtgttctacgccgtagccctccccggcgtggcccatacggcccctttttcgccctggagcttcggggcctacctggggcggctgctgccccttgtgtgggtgggggccctgtttttcctcacctttttcacgtcggcccggaagcggcgggcggcggtgctcaccgccgccacccccgccgacccccggcggtacgccctggcccgctgcgctgccgccctggtgggggtggctctgctctgcctggcggcgctggccctggccgccctgctctatgcccgcctgttcggctggacggactggggctccctggccctgcccgccctggtgatcctggcgccccctctggtgttcgccctgggcagcggctggctgctgggccgcctgcggccctggctgctctatgtgtggatgctcctcccctttgccctggcggccctgcctctgccggaggccctggggctgtggaacggcggcctgtgcacgtcctatcccctgactctggggatgctggacccggctttctccctcccggcggcggcctgggccgtccaagggctgcttctggctgccggggtgctccttttgctggtggcgggaaaggggaaaaaggtgtataatcagtgacagaccgtataccataagcacataggttccagaaggaggcgtaacagatggattctaacgagagccgggcgcgggcgctgttgggcgacctgtccgccgggtgcagcgcggtggcgtgggagacggcggacggcggacacctgtgggggcgcaacttcgatttcaaccgcattgcggcggacagcaaggtgacctttgtaccacggggacaggtgttctacgcctgcggtaccgagctggagggcaatctggagccgtccacccgctgtacggcggcctacgctgcggtgggcatcggctccctggtgctgcgttccaccccggccctgtatgagggcctcaacgagaagggcttgatgggcggccagctctactaccgcacgtttgcccactttgccccggaggcgcggcccggcaccctgcccctccagccgcccttcctggtgacctggtgcctggccacctgcgcctcggtggaggaggtggcccgcgcactggaggagcgggtgtcgctggtggccatccccatgctggggaccgtgccgcccatccactggatgttttccgaccgcaccggggagagcatcgtggtggagtccgaccgggacgggctgcacatctaccggaacacggttggggtgatgaccaacagccccggctacccgtggcaccgtaccaatctgttgaactatccccagctccggcccctggattacggagagctggcctggggaggggagcggctggagccctgcttttccggcagcggggcggccggcctgcccggggactggtcgtccccctcccgcttcgtgcggctggccttcctccgggagcacgcggtcaagggcggggacgaagcggagggggtgtcccttctgttccgcctgctccacagcgccgcctttcctctgggtgcggtggagctcaccgggccgggggagatcaccccccacgaccggggcgtggtgccctatgactacacggtgtattcctccgtcctctgcgccgagtccatgcgcttctactggctcacttaccggaacagccgggtgtgctatgtggagctctcacgcctgctgaagggagaccgccccctccagttcgcgctgggggaggagccggagttctgcgacgtgaccggtgaaggcgtataacactccaacagggcgcaccacgaaaaaatgcaaaagctcaggtgcatgaagtgtttgcgcatgcgggccgtcccgtaatcgcatggccgtgccgcggtaagcggcgcatggccaactttgctatgcttatgaatagcaaaaagtaccccctgccgcatgcggcagggggtacttttttatcaaacgcgctccgggtccccggcaatgggctggaagtattttgtccggtactcctgaaagaggtcgtcaaactcctggttgaaaccgccgtgatgcagctcgtgcatataggcgtgggagtcgatgcgcaccttgtcgtcgggcgaggaggtctggcgcaggatgtgcagagccacgttggaacagtggtcggacatgcgctccagattgatcagcagctccaggaactgggtgcccagctcgatggtgcactcaccggccttaaggcgctccacatggcggtttttcagggtggcggcgatcagatctacaacctcctccagcggctccacctggacagccagggtgcgctggcggctctggtagcaggctaccgtcttgtccagcgtctctcccaccgccgcggtgagcctctcaagctcggcccgggcctggggggagaaggtaatgttccggtcgtggaggacgaccgcactctccgagacgttgacggcgtaatcgccgatgcgctcaaagtcggacagggtgtgcagcagctcggacacccgggtgctctcctcggcggtcagcgcccggtcggtgagcttgaccagatagttgtccagcagaccctccagcttgtccagcgccacctcggtttcgttgagccgctccagcttcttggcgtcaaatttccagatgagctccacagccagccggtagttgtcccgggcgaactcgctcatctgcaccaccgcatcgtgggcccgctccagcgccagggagggggaggacaggaaacggtcgtccagcacggacagctcccgctcctccgcgtcgccgggcaccaccgccttgaccagcttgacgagctggcggtggaagggaagaagcagggcagtacaggcgatgttgaacgccaggtggaggttggcgatagagcccatgtccatggtgttttcccagaacggaaagcgaaacagggcgttgcccgcgtacagaaccaccagaaaaaagaccgagccgatgatgttgaaaaagaggtgaatcatggcggtccgcttggcatttttggaagcgcccaccgacgagatgagcgcggtgatgcaggtgccgatgttctggcccataatcagcggcatggcgatgttgaaggaaaccacgccggtggtgctgatggcctggagtatgcccatagaggcggaggagctctggagcagggcggtgaccgccgctcccacggctacgcccagaaggggattggagaaggcggtaaacaccgactggaactccggcagatccttcagcggctccacggcggaggacatggtgttcatgccgatgaacagcaggcccaggcccagcacgatctggcccacaatgcgcttgtgcccgcccttgatgaacatgtagaagatgatgcccacaaccgccagaatgggccccaggaaggagggctgcaggaacatcatcacgatgttgtccgcgtcgatatcacccaggcgcagcaactgcgcggtgacggtggtgccgatattggcgcccatgatgatgcccaccgtctgctccagcttcatgatgcccgcgttgacgaaaccgacgcacatgacggtggtggcggcggagctctggatcagcccggtgacgacggcccccagaaggacccccttgaatacgttgctggtaagacgctccaggatatgctccagccggccgctggagagcttctccaggccgtccgtcatggtggacataccaaacaggaacgtggcgatggcgccaaacatggcgactatattcgcaatatccacaatgctcccccaaatctgactccgcggtcaaattttcgaaaaattttgctcatttccgaccacgataaattatagccttctggcagcggttcgtaaatatagagggagcgatttttaaaaatttagcagttccactaaaagcaatgggggaaaaaccgtcaatttcgttcacgttccgcaggggaagcccgcatggaacaggatcgttgacatagggacagacgcgggcggaatagagtggaactatggaggtgtgacaaatgttcactgcgtggattttgctgatgctcaacagcctgttcttcaccctgcgcctctccggcgggggaagcggctccttcccccgtccgctgaaagcggaggaggagcggatgtacctggagcggatggcgcagggtgatctggaggcccggaacatcctcatcgagcacaacctgcgcctggtggcgcacatcatgaaaaagtactatacacccaacggggatcaggacgatctgatctccatcggcaccatcggactgatcaaggggatcagcaccttcaagccggacaagaacgtgcgcctggccacctatgcctcccgctgtatcgaaaacgagatcctgatgcacttccgcgcccagcggaagctgcagggggaggtctccctgtcggactccattgacggggatggggacggcaactccctgtcgctgatggacaccatcagcgtggacgacaatatgctggaggagctggatgcccgtgactcctgcgccaaggtgcgccggtgcgtcaagcgatgcctggacgagcgggaggccatgatcatcaccctccggtacggcctgaatgcccgcccgcccctgacccagcgggagatcgcggcccagtgcggcatctcccgctcctatgtatcgcgccgcggctattgcaagcgcggagggggatgtctccgggggccgggacggcccggacggagacgccaccctcactgcggtgtcagagcgggaaaagccagcttctcggagggaggcccggagtgccggacgtgcggccgacatcaacaccagtggtacagtcagctcagcggataccggaggtatccggccaccaggtcaatgaatacgctgttggagggactgcgggtcaggtgccgtccggccagggtatccagaaggctgtggtcctcaagtttccagcagtccccgattacggtgcggacagcgcgctccaccgcgattgaggtggtatggaactgcttggcggtttcccggtagagacgcttggtgatcaactggagggagctgggattggccgccacctgcacagacatgtatacggtgtagtcaaatccgaccaggtttctgcgcacgcccagccggcgcaggagcagctctgccttttgagaggcatttgccgcgtcaaaagtaggtgacagggtgaaatttgtcataggacagactccttttttcaaaaagtagatgtaagggagcgtccatgactggtgtggaccgagccgcaagcgaccctctggtggatggagcgcatccgctgcttgacctccgataggctttccaaaaactatatgtacgcaaaagagggaaattggacaaatgattgaaagatgggagaggaatctgcttttttgtggggttaatttccaaggaagtcgacaatatccacggaataggatactttttttctttgacagccgtttggaatgaatacattccgtatctggcgcaaataccaaggtaaaatcaaacggaatccataggttccaggcttgattttaaggaggtcttcatgtcagagaaaattaagcaggatatctcaattggcaaaaacctgcatcgcctgcgcaagcaggccggactgtcccaggagcaggtcgcggtaaagctccaggtcatgggcctccctgtcagccgggaaatcatctcccagatggaactgggccgctacagtatccgggtcagcgtcctgatcgctttgaagcagatttacggcgtttcttatgaggagttttttcagggcctgccagacagccggtaaaatgcagggaagaaaagccggagcacctgtgataaaataaagagagagagaacaggcgaggggggaatgatacatgaatgaggaacaggggaaattcctggaggaactctaccacgcgaattttaagcggatgctcctcgagctctaccccatattaaaggacatgccctcggcacaggttgccattcaggaagcggcgcggattgcgtgccagaagccggaggagatgatgagcagcccaaatcccgccggatggctgcggaaaacggcggggctggtggcgaagaacatgctgcgggagcaggcccgccagaaacggacctttcttccgctggaagtgcttctgccggagagtgaaccgtcagaatgggacgacagcgaccgcgaattggtgcagttgtgtctggatgtcgtctccgaggaggattttaccctgttccggagagtgaccctggatggttggacctatgtggatgcggcaaaggcggctggcatttctctgtgggcctgttacaagcgtgtggagcgaacgcagaaaaagctccgccgcgccatagaggagcacccggagcgatttttttgagacctgtccaaaaacaggatgctgtgtacatataaattattgaagggggcgcaatcgaatggcaagcccaagcaaaaatcagaactacgcctatctaagccgcctgagcacccaaaagctgctggagctgctggccgctgcgccggcgcccgcagaaacgcccgaggacaaagcttatatagacgcaattgtggaggtggtcttagagagagaagagagacatccgacagggcttctacccgaccccgagcaggcatgggaggagtttcagcagtactataataccccggagggggaggacctgtccctctacccggcagagaaccccggaacagccccatcagaaccagccccctctcagacagagtaccggccccaaagaaggccaaaacgccacttttttcgacgcgttgtcatagtagcggctgtggtggtgtgtatcgcattgccccctgcgcttggtttcgagaatgtgtttcagttgattggtgcgtggacagatgacatatttcttttgaataacgtaagtagtttagagggaaatgagatagaagcggataaaaaaagtgttgatatagaagaaatattaggggaattaaattatagtgaaaatatttttccaacctggattccagaagggtttgaattagaaaaggtcataacaaatgagtttgtcctttcaggaaaaacagaattacgtattcattataaaaatgggcaaacaagagagctaattacatttacttataatgtgtacaatagtatagcatcaggtaccatgacagcttttgagaaggatgcgaatgccttagaggaatattttgtcggagatgtaacgcattatatatttgagaatttaggaaaatacatagcagtatggaatcaaaataatattgaatgtgcaattagcggagatgtttcattgactgaattgaaagagatgctcaattccatatatggaggttagtatattatgagaaaagtgacaaacagatttgctgcagtaataatggtactacttatgatctgctctatcccagtatctgctatatcagagtctacaaaccgagcgagtgaacaaattatgagttattatatgaatgtagtaccagcgggaaatggaaaaatagcaatcgcattttctattgacggaaccggtgaaatgaaaaatattggagcagaaagtattataatttattataaaattggaggcgcgtgggtcgtagggtatgatttggatagatacgattcgggcatgagtacaaaagatgattattatttcgggaatgaactttattataccggaaccccaggtaaagaatataaagtagaggttacagtttttgcagagaattcttcgggctatgattctagaacgagaacatttaatgtaacagcttaaagaaaggggcgtcccgatcgggacgcccctttctttaagcttgactggacaggcaaggaatgccgcctgccgcataagctttaccaagcagtagcaaggagggatatgcttgggacagcggaagcgggaagtgacggtacggtgtacctataccgatggaggggcggaggcaaaggatttggtacaaggctcattccgcgcctttttggcgcgggaacttaacagggacacccctgggggtaactcatgtacctggagatagaaggggcggagaggtaccgcgccgcactttatattcggctgtccagggaggacgaaaccgacgggccctcagagagcgtcagcaaccagcgggccatgctggaggactttgcccgccagcggggggtgccggtggccggcctctatgtggacgacggctggtcgggcaccagtttcgaccgcccggagttccggcgaatgctgcgggacattgaggccggacgggtgaacatggtgattaccaaggatctgtcccggctggggcgcgactacatcatgaccggccactatatggagcgctatttcccggaacaccgtgtgcggtacatctccctgttggacggcatcgacaccggtgtggactccagcgccaacgagatcacgccgttccgggccattatgaacgacatgtacgcaaaggacatctccaaaaagatctccagcgtcaagcgggacaaacagcgaaaagggctgtttatcggcggcaagccggtatatggctatcagatgcaccctgcggaaaagaacaaaattgtggtggacgagggggccgcgtcggtggtacgacgtattttccggctggcgctggagggcctgagctgccgccagatcgccgcgcagctcaacgctgagggcatcccatcgccgggatgctacgcgggcctgtatccctccggtaccggacagtggagcggtgagcgcatctctgagatgctgcaaaacgaaacctatattggaaatatggtacaggggcgccgacggaaggtcagttacaagagcaaaaagtgcattcggcagctaccggaggactgggtggtggtggagggaacccatgagccgctggtgacgccggagacctttgaacgggtggggcgtctgttggccagccggcggcacacccgcagccgaacctatgagtttccactgaaagggctgcttttctgtcacgagtgcgggcacccgctggcggtgctcaaccggaaaaacagccggggggaggatgtgcggtatctggtttgccgcacctaccagcggttcacaaagacagggggctgcacctgccactgcattcaggagcagaccgtcactcgtgccgtggtagccaagctgcgggaggcctgcggggcctgcctggagcctgcggccctgctgcccgccgcccggtctgccgtagcagaggctcatggaggggaaaatccaacggcggaaatccgggccctgcgggccaaaataggccgcctgaccaccgtcctggaccggatgtatttggatcagctcagtggcctgctggctgaggcggattttgcacggctctaccggcaggcccgcgaggagcgcggcgcactggagcggcgtgtgacagagctggaacgccgggaaagcccggaggccggggacaaggccggggccctggttcagcgttttctggatgaggctggtgacaaccgggagcttctggtaagcctcattgagcgggtggagctaactgaacagagggagctcatcatccacttccgcttctgcccgccggaggcgcttttttaatggacctctggttacaataaccgcggcgcgaggtatcgcgcattgagaaaaaagcactcaagaagctggaggcggccatgggggctcaggaataagcactcctgtgccgcagtacatagcggctggggcccagcaaaaaagggctttactcctagcggctgaatgggatataataaaatcgggaaaaaagagaggggcggcgcaataaaacgctgctcccgtacattaagaagatgacaggagcgcgacaccatgttaatcctgcttgagacaatggcagaggagcgccgcaccgccactgcgccggagctgctggagccgctgatggcccggctggccgggggggatcaggaggcgctggcagagctgtaccaccgcacgcggacgtcggtgtacggcctggccctatcctacctgaaaaaccggcatgacgctgaggatgtgacccaggacgcttttgtgcgggcctgggaaaacgcccatcagtaccgtccccagggcacaccgctggcctggctgctgaccatcgcccgcaacctcgccctgatgaagctgcgggagcggggcaggacccaggacatggctctggaggactgggaacggctggcagcggagaacccgatggtgacggtggaggaccggcaggtgctggacgccgccctcaccgcgctggcggatgacgaacggcaaattgtgctgctccacgcggtgaccggctggaagcacagggagattgcaggcctgctggagctgcccctgtccacggtgctgtccaagtaccgccgcgcgctcctgaaactaaagacgaagctggaaggaggggatgccctgtgaccgatcaggaactggaacagcgtctgcgcaccgcgctggagcacgccgcgcccgaccatctggaggcgctcctctcccggtgcgaaccgcggcggggaaacgtgattcccatgactgtaccggcgcggaagccgcggaaaaaggcggccatggcctggcttgcggcggcctgcctggcgctggtggtggtgggcggaggcgccggtgttcagtactaccaggccaacgccgtggcttcggtcatctctctggatgtcaatcccagcgtggagctggatgtaaaccggcaggagaaggtggtttcggccgttcctctgaacgcggacgccaacgaaattctggacggcatggacctgaagggggccgatctgaatgtggcggtcaacgccatcatgggctctctgctcaagcacggctatgtggatgagctggccaactccatcctcatctcggtggaggacgacgacgcggcacggggcgcggccctggagcagaagctgaccgcagagatcgggcaggtgctagactccgccaaagtcaacggagcgatcctctcccagaccctcagtggggacagcgcccttcagcaaaaggcggacgagtatggcatctcgctgggcaaggccacgctgatccagtccctggtggacagcagcaaccatctcacgtttgagtccctggtggggctgtccatcaatgagctgaatctgctggccaattccaccgcagtccagaccccggacagcgcggggggacagaccagcacgaccgcctccaacccggcgctgaactcggtaggtacagccagccagagcgcctatatcggtgtggaggccgccaaggaggctgccctgacccatgcgggtgtgaccagtggggacgtggtgttcctggaggctgactacgactatgaggacggccgtatggtatacgaggtggagttttttgccggaaacacggagtatgagtacgatgtagatgccgccaccggcgccattgttaagcacgggcgggagcaaaagggcggcaacctgaccggcggcggaagtaccgctcagaccgacatcggcgaggcggcggccaaagccgcggccttcgcccatgcgggcgtggccgaaggggacgtgcgcgggctgacggtcaagcgggactttgacgatggccgcctgacctacgagctggaattctgggcaggtactacagagtacgagtacgagattgctgccgcggacggcagcgtgctcaagagcaagcgggaggagcaccccaatgccctgcccgcggaccaggccatcgggcgggatgccgcccgggacgcggcgttggcccacgcgggggtggcgctgaccgacacctacgagctggaggtggaggaggagctggacgagcgcacgccctgctataaggtggagttcaaggccggcggcatggagtacgagtacaagatcgacgccagaaccggcggcgtgctcacctatgagatggatcgggactgacgcggcaaagcgccgccccggagcgacaggctccggggcggcgctttttctgaaaaggctcaaagctccatatccagcagataggaggacaggcccttgccgtgcatgtccacggagagggagcgggttacgccgccgcccagggcggcgtacatgacaaagttcagcgcatggatattgggcagctcatagcggaccacctcacccttgaccatgcccttgaagtgctccttcacccgctcagcggtgactctctccttgagcagcgcatagtccttggggtcgtaggcgatgagggagatgttggagatgttgcccttgtcgccggtgcgggagtgtgcgatatcccagagtttcatagaaaatgcctcctttctgtcttgaaatcagacttcaaagatctcgacttcgggcttaacatcgcagcggctcaccagaatggaggccacggacacgatgtcgcgggtgcgcttgacggcgccgcagccgccggctgggccgttggtgtagagggcctccacctcgttgccgatgagctcggcgtcggccctggccttggctcggccggacacgcggacccgcacctcgctgggctcttcgttgtacttgaagtcggggttccagtacaggctgttgcagccgatgaggtcgaacttcagctcgtcaaacacgccgggggccaccagctccaggcgttccttgatgatgtccagggccagcctaccgcgggccacgcagccggggcctccgtagctgatctcgccgtcgccgatgaagcagtccttgtagccgatggaacacttgaaggtctcggtcctgggcttgccggaggcgccctccaccttcactttatccttctccacctcggtaaacttgacctgcttgaagtcggccaccacatcgggggtcaggtagttctcgggatcgtgaatctcgtagacgatctgctcggagcaggtctccaccgtgaccatgccgccggactccggaatcttggtgacgaagaaggacccgtcctcggagatctccacaatggggaagcccaggtggcccaggccggggacatccttcttgccgggttcggcgaagtagccgccagtgacctggccgccgcactccaggaggtggcccatcatggtgcccttgcccagcttgtcccagtcctccagcgaccagccgaaggcgtggatggcgggggccatgaagatggcggggtcggctacgcgtccggtgatgaccacgtcggcgccctgctccagggctttcagaataccctccacgcccatgtaggcgttggcggagacgatctcgccggggagcttggacaggggttcgtgggtctcccacacctcggtgtccatgtacttgtcgatgacgggcagcaggtcgtcgccggtgacgcaggcgatcttcatgccggtcaggccgtgcctgtgggcgatctccacgcacttctgcgcggcggcctgggggttggcggagcccatgttggtgatgagcttcaccttgtgcttccagcacaggggaagggccctctccatgcggtgctccagcaggccgttgtaccccttggacgggtccttcagcttggcctgctgaccgatggcgatggtgcgctcagccaggcactcgtagctgatgtagtccaggttgcccttttcgatcagctccagtgagggctccagccggtcgccggcatagccggccccgctgccgatgcggatggatttcatcatgcaatgacttcctttctgaaaattgaaggtttaaagacgggagagcggctcagatggcgatgccgcgggtgagaatggcgacaaccaccatcaccagggatatcagccatgctagcgggatggtctttttctggtgctcgccgaagtccacgccggacaggcccaccagcaggaaagtggaggcggtcaggggagagacggggaagccgacggtcatctggcccaggatagcggcgcggccaacgtcggctcccacgacgccgaagccctcggcggtctgcgccagcacggggagcacgccatagtagaaggagtcgggatcaaagagcagggaggcgggcataccgatgatgccgacgatgagggggaagaactggccaagcgtattggggatgatggacaccagggtgctggccatctcggtgatcatgccggtgccctgcatgatgccggtaaagcacccggcggcaaagagcacggagcacatcataagggcctccttggcgtgggcgtccacccgggccttggaatccttcacgctggggtagttgatgactgtggccagcacatagaagaacatgaataccactgcgggggcaaagccagagaagagcagagacacaatggcggcaacgatcaggagaatgttcacccagaacaggcgggggcgaaggagggctttctgttcgtccgtaagctcctgctcggcatgtccggcggcctgaagggccacagtgccgatgcgcttcttctcacccgcgccaaggaaggcggagatgaccagcacgcaaaccaggcctgccagtacggcggggaggactggcataaaaaatccggtgacggtggcctccgtgcccgccatggtggctagggcggtatgggcgcgaattgtggggccgccccagggcaggatattcatggtgccggcggagagggccacaatggtggccagcgtagtgcggcgcatgccgagcgcgtcatacagaggaagcagcgcaggcacacagatcaggaaggtgaccgctccggagccgtccagatggacgatggcagccagaatggcggtgccgatgccgattttgacgggatcggtgcctactaggctcagaatgcccttgatgatggggcggaaggtgccggcatcggtcaggatgccaaagaacagaatggagaagatgaacatgacgccggtggccgccacggagccgatgcccttggagccggtgatcatatcgcccaaggacttgaagttggcgaaaaagttcacaacaccctgcgttccttctgcggcgccctcaggtacgaccgcgataaagaaacaggagatgatgccggtgaccacggggaccacaatcagggccaccagcggagatgcttttttggtcataatcagtaccagcatgatgatgaccgtcaggaatccgagaattgctaaaggtgacattcacataacctcctcttatttcaagcaacctctccacacgctgcttgtgctaaaagaaatatgcaaacggcatgccaagatagggaggtatggataaaggcgcaaaaacccgaccctcaggtagctccggggaaacaaagagcaggcagagagagggcgggtttctaaaatattagaatccaatcgggcagaaaccaactggtaactgcctctataggttgatgcggctggtttctaatttattagaacagaattctaataaattaaaactgcatattcaatttattgtaaaggctggcaagagagatgccaagctgtgcggctgtctttttcttcccctccagagaggcgccattgcgctctaataggcggagaatctccgcccgttcaaaggtccgggtgcgctgggccagtgtgagaggcggctgtgcagttggaccagtccggaggttttcggggagggacagctcggtgatgacgccggagggggtgagataggcgcagaactccagcacgttgcgcagctcccgcacattgcccggccagttgtgggccagcaggcggtccatggcctcgggcgtcagctccaggcgtcgcttgagcttgcgggacagctcgtccagcaggctgcggcagagaggagggatgtcctctctccgctcccgcagcggcgggatgtggatggggaaggtgttgaggcggtagaacaggtcggtgcggaatttcccctcctccacatagcggggcagatcggcgttgcaggcggcgatgatgcgcacgtcggtctccacctcctccacgccgcccaccggccggatgcggcgctcctggagggcgcgcagaagcttggcctggaggccgacgtccatctcggagatctcgtccagaaagagcgtcccgccggcggcggcctcaaaaaggccgatcttcccgccccgcttggcgccggtgaaggccccctcggtatagccgaagagctcggactccagcatattggcgttgaagttggcgcagttgatggcaacgaacaccccggcggagcgggggctggcgttgtggatggcctgggcgtacagctcctttcccgtgccgctctccgactggagcaggatggtggcatcggtctgggccaggcggctggccagctcccggcaggccgccgaccggggggagaccgccacaatggagtcaaaggtgtagtgggcggcgttggccttgttgacccggcggagcacctgacggctgcgcttttcatagcgctccagctccgcccggaagtcgaaggcgtccttccaaaaggtaaccaccgacaggccgcccaccacctccgctccgtcgaagatggggtacatgttgacgaagtagatgtcctcgctctcctggcgcggggtgtgcaggatggggcgcttctgaaccagcacctccggcagccgggcaccggggcgcagcagccgcaggggatacccctcgatcggcccgatgggcccgccggcctccttctccagaaaggtcacataggcccggtttccatacacaatgcgctcctgcgcgtcaatgatcagcacgccctcctgcatggcgtccaggactgcgcgggtgatgggatcaagctgcacggcggccgcctccttccgttctgcctgtattgtagcagagaagcatctggttgacaactgggacaatcctggttgacgaagcgtaggaaatcggttacaattccaacagataggcggaggagggaagaacgatggacaaggtggctatgccggagggaaagtatctggcctcggtgaagctggggccgaaggggcagatcgtggtgcccaaggaggtgcgggagatgttcggcgtccggcccggggacacgctgctgctgctggcggacgtgaaccgggggattgcactccagacctttgagaaggcggatccggtcttccgtgatgtcttttcggaccgggagcaataaaagtgccgcgcctgagggcgcggcacttttatttcatcttgacattctgcctttgcggtgctataagtaagaaaagtattactaataagaaatgggggcgtaatatgagccggatcgtctttttctccattcccgcctacgggcacaccaatcccacggtggaggtggtgcggcagttggtgcgccgggggcaccgggtgcgctactactcctttgaggaattccgggcaaagctggagggggcgggggccgagttcgtcccctgcgacacctttctgccccccgcccccagggatctggggcggcggatggggcacgacttctccagcctcatggcgatggtgatcgatgtgacggtgtccatggaggagaaggcgctccgggagctgggcgaattccggccggactgcgtggtagccgattccatctgcgtctggggcaagctgtacgcccggcggctggggctgccgctggtgtgctccaccaccaccttcgcctttgaccaggagaccgccagggcgatgcgccccggcccgctggaggtattctacaccctgacgggcctgccccaaatcgggaagaggctggccctgctgcgggagcacgggtacgaggtggaaaagctcaccgacctgattcagaatgacagcgagaccgataccattgtctatacctcccgggccttccagcccggcggcgagcacttcggggagcgggtggcctttgtggggccgtccctcccggagctgccgccccggacgcagcggcgggagcggccgctggtgtacgtctccctcggtacggttatgcacgggaataccggcttttaccaggcctgcgcggagggcctaggggacgggccgtgggatgtgctgctgtcggtgggcagcccggagggggcggcagcgctgggcgctctgccccccaatgtccgggcagaggccagggtggagcagctccgggtgctgggggaggcgtcggtgtttctcacccactgcgggatgaacagcgtcagcgagagcatctggtgcggcgtgcccatggtgctggccccccagcagtcggaggagggggcggtggcccggcgggctgcggagctgggggcggggctgcgcttggagcgccgcggcccggcggcgatccgggccgcggtggaagaggtgctggcgcagagggaggcgtaccggcgggccatcgcgcccttggccgccggattccgggccgccggaggcgcggcccgggcggcggagaagatagaggagacgattgcgcggaaaacagaagaggcgcggccctaaagggccgcgcctcttctgtttacagagtttgagaatgaccgagatccacctcgggcatcagttcctggttgataatggtgagcatctcttccagcttggcgcactcctccggggagaaacgctgccggatgcgctcggtcacggcatggacgtagtcgttgctgatgttgtagtagtccttgtatttctgggtgacctggaggtggtactcgcgcttgtcgtgggcggactggatcttctgcacatagcccttgcggatcaggctgttgatcttataggccgcgttgggcggcgagatgcgcataaaggaggcgaactcgttgatggttgggcagcccagggcctggatggtctccatggcgaaggtctctaccgtggtcaggctggcctcgcggttttgaaagcgctcgaagatctcctgataaaaatgaagcttgaatttggtatacacgatttcaaatttctgttccaacatgccggcgcccccgcattgtcatatttttttcattttatcaaaaagcggagggaagggcaatcacaaatctttggccaaggcaaaggtaagctctgccgaaacggccagttggccgcccacggtggctttggcctcagcgacagctaccgggcccttctgctttagaatggtgcactccagctccagtacgtcgccgggggtgacctggcggcggaagcgggcgtttttgatgccgccgaacaggccgatcttccccttgttctccggcatggacagcatggtcacggcccccacctgggccagggcttcaatgatgagcacgccgggcatcacgtggtactgggggaagtggccctggaagaagggctcgttgacggtgacgcatttgatgcccttggcccacttgcccacctcgccgtccacgatgcggtccaccagggcgaaggggtagcggtgagggatgatctcagcgatctggttggaattcagctgcatcatggctcagccctcccacttcttgaagagcacgcaggcgttgtggccgccgaagcccagagagttggacagggcatactccacctgctgctcccggccctggttggggatatagtccagatcgcaggccggatcgggtacctggtagtggatggtggcgggcaggaagccgtcccgcaggctcagggcggtgaagatggcctccaccgcgccggcggcccccagcatgtggccggtcatggccttggtggagctgacggccagcttggcggcgtgggcgccgaacacggccttgatggccgcggtctccccggagtcgttgaggggggtggaggtgccgtgggcgttgatgtagcccacctgctcgggggacgccccggcgtcggccagggcctgggccatggcgcgggcgccgccctccccgttgggggcgggggcggtgatgtggtaggcgtcgcaggtggcgccgtagcccaccacctcggcatagatcttggcgccccgggccatggcgtgcccgtactcctccagcatcagcacggccgcgccctcgcccatgacgaagccgctgcgctcggcgtcaaaggggatggaggcccggcgggggtcatcccccacgtggagggcccgcatggaggtgaagccgccgatggacagaggggtgatggcggcctcggcgccgccgcagagcatcacctcggcgtagccgtcccggatgtggcggaaggcgtcgcccaccgcgttggagccgccggcacaggcggttaccgggcaggtgcacatgccctgaaagcccgccatgatggcaatgaagccggcgcccatgttggcgatggtggtggggatatagaagggggaggcccggtcaaagcccttctgggagcagcgcagctcctcgctctcggccatctcgatgccgcccacgccgctggagacgatgacgccgcagcgggtgagatcctccttctcccggtccagaccgctgtcggccagggcctccttggcggcggcggcggccaattgggtgtagcggctcatgtgccgcacgtccttcttgtccagcacggtggtagggtcccagtccttgacctcagcggccaggtggaccttctgggcggagcagtcataccgggtgatggggccaatgccgcacaccccgtcccggacagcctgccaggtgtcggcggcgttgtggcccagggggttgacggtgcccaggccggtaatcagcactctgcgtttttccataattgcgttcctcctcacatgcccattccgccgtccacctggagcacctggccggtgatgtatccggcctcctcggaggccaagaaggccacggcggcggccacgtcctcgggggcgccggggcggcccgccgggatggcggacagcatggcctcccgggcggcgtcgggcagggcggcggtcatgtcggtggcgatgtagccgggggccaccgcgttgacggtgacgccgcggccgcccagctccttggccagggacttggtcatgccgatgagccccgccttgctggcgcagtagttgatctggcccgggttgccccgcagggccaccacggagctgaggttgacgatgcggccgtagcgggccttcatcatgggccgagcggcggccttcatggtgaggaaggcccccttgaggttggtctcgatgaccgcgtcgaagtcctcctccttgagcatcatggccaggttgtcccgggtgatgcccgcgttgttgaccagaatgtccagggagcccagctccttcacggcggtgtcgatgagggtttttacggcggcgggatcggccacactgccctggacggcacgggtctggacgcccagggcctccagctcctttcgggtcgcctctgccgcggcggtgttgcccgcgtaggagaagaccacgttggccccccggcgggccagctccaggcagatggcgcggccgatgccgcggctgccgccggtgacgacggcggttcttccggtaaagctcatagcgttatcctttcagcgcggcggagagggcgtccaaatcggcgcaggtctccacggcgtaggtcttgatggcgggagcggtcttcttgacaaagccgatgagggccttgcccgggccgatctccacgatggtgtccacccccagctcggccaggcggcggatggtgtcctccatgtagacggaggtctgcacctgcttctccagcagggcggggatggtgtcctccggccccatctcccggcccaggcagttgaagagcacggggatgcgcatcgcgccgaaggcggtctccttgaacttctcccgcagggcgtcgccggcgggggcgaggagggaggtgtggaagggcccgctgaccttcaggggcaggcagcgcttggcgcccagctccttggccagtgcggcggcctggtccacggcggcctgctcgccaccgatgaccaactggccggggcagttgtagttggcaatctccaccactcccgcgccggcggcctgccggcatgcctcctggagcttctcgcggtccaggcccagcacggcggtcatgccgcaggggcggcccgccgcggctgcggccatggccttgccgcgaaaggcggccagggaaatggcctggggagcggtgaacaccccggcgcactggagggcggagtactcgcccagggagaggcccgcggcgtagtccgggacaatgccccgctccgccagcagggcggtcatgccggcggcgaaggccaccatacagggctgggtgtactcggtcaggttcagcaccccgtcggggtcggtgaacatggtggttttcagatcgaagtccacgccggcggcgtccagcacggcgcggaaggcgggatgggcctcgtagagatcggcccccatgccggggtgctggctgccctgcccggcgtatagaaaggccagactcattcgctcagcccctttcgcacggccgcatatccggccatcagctcctcaaagatctgccgcaggggacggatctcgtgcaccataccggccacctggccggccatgaagctgccgccgtccacgtcgccgtcgaacacggccttccgcagggagcccagggtgagctgctccatctcctccagggggacatccttcttctccatgcgcagatattcccgggccatcttgttcttgagcacccgcaccggcgctccggtggagcggccggtgacggtggtgtcgttggccccggccttgagcacggcctgcttgtaattgacatggatggggcactcctcgctggccagcaggcaggtgcccacctggacgccgcaggccccaagggcaaaggcggcggtgagctgccggccgtcggcaatgccgccggcggcgatgacgggaacgctcaccgcgtccaccacctggggcaccagggccatggtggtcagctcgccgatgtggccgccgctctcgcagccctcggcgatgatgccgtcgatgccatagcgctccagccgcttggccagaatgggggcggccaccacggggaacaccttgatacccgcctctttccaggcggggacgtatttgccgggattgcccgcgccggtggtcaccacctgcaccccctcctccgccaccaccttggccagagcgtcgatgtggggattcatcagcatcaggttgacgccgaagggcttgccggtgttcgccttggcggcgcggatctcggcccgcagggcctcggcgtccatcccgccggaggcaaccaggcccagggcacccgcgttggacacggcggcggcgaaggcgccggtggcgatgttggccatgccgccctggatgatggggaactcaatccccaaaagctcgtttaatttcatagaaactccttatgaaacgcctccacgaaaaagcctcgcagagtttccccgcccgcaggcggggaaataaaatgaaatccgttttcggccgcgatatgtgcgtggacgaaaacacttctcagcccacaagtgtgagtgttatccggcgaagccggacaaaacttgcgcgcgggggctgcatctctctccaacaagcggctctgccgcttgttggaagctacgccagctccagcagagccccggcccaggtcagcccgccgccgaagcccacacacagggctttttggccggaggtgatggccccgcctcccaccagctcgtccagcagcaggggaacgctggcggcggaggtgttgccggtgcgctcgatgttgccggggcacctggccggggcgatgcccagcttcttcacggcaaagtcgatgatgcgctggttggcctggtggaacacgaagaggtcgatgtcctccggggtaaggccggcccggtccagcacctcccgggcacagcggggcacagcctccacggcgaagcggaacaccgactggccgtccatatggacatgggggggcgcggcagtgttgacgccggggacgtagagcacctctgagttgccccggcaacccagcacggcgtggagggaggggtagtttgccccccactccaccagggcggccccggcaccgtcgccgaagagcacacaggtgctccggtcgccaaagtccatgacccggctgaggatttccgcccccagtaccaggccgtacttccggggggtggaggccagcaggcactcggcggtgtgcagagcgtacacaaagccggagcaggcggcgttcagatcaaagcatatggtatcctccggaaagcccagctccttttggagcaggcaggcggcggcgggggaaagaaaatccggggtgactgtggccaccaggcagatgccgatttcgccgggggcgacgccgccccgctccagtgcctgccgggcggcggccagacagagggaggtgtggctctcgccgtcggtgcagtagcgtcgggagcggatgccggtgcgggtggagatccactcgtcgttggtatccacgattttggccaaatcatcgttggtcacgacctttttgggcacggcggagccggtgctgattaacttaatcccgttcatgtacgctcctttctcagggccttcgcgcccatcgcgcggaattttttatagcgcccggcggccagaaccggaccgctgagcttgcccagggcattgagctccttgaccagggcggtgtccagagtccggaacagggcggcggggttggtgtgagcccctccctcgggctcaggaatgatgcggtcggccacctccagctccagcaggtcggcggcggtgagcttcatcacgccgcaggcctcgtcgctgcgggaggcgtccttccacaggatggcggcaaagccctccggggagaggacggagtacaccgcattctccagcatgagcacgcggttgcccacgcccagggccagggcgccgccgctgcctccttccccggtgaccacggagactacaggcacggtgagacggctggacagggccagagtgcgggcgatggcctccgcctggccccgggcctcggcctccaggccggggtaggcgccgggggtgtcgatgaaggtgatgacgggacggcggaacttctccgcctgaagcatgagccgctgggccttgcggtagccctccggtgagggcatgccgaagtggagggacaggttctcctccagggagcggcccttccggtggccgatgacggtcaccggcttgccgtggaacagggcgacgccgcccaggatgctgccgtcctcggcgcacaggcggtcgccccgctgctcaaagaaatcggtaaacaggtgcttgatgaaatctgccgtgccggggcgctccgggtggcgggccagggctaccctctgggcgggggtcagcttacttgccatgcgcgtcgcccccctttccatggagcttcagcagatggagcagggtggcgcgcagcgcgtcccttggaacgatggcatccaggaagccgtgctccagcagatattcggcgctctggaagccctcggggagcttttcgccgatggtctgctcaatcacccgcgggccggcaaagccgatcagggcgccgggctcggccagcatgatgtcccccaggctggcaaagctggcggtgacgccgccggtggtggggtgggtgagcaccgagatgtagaggccgcccttctgggagaaccgctccagggcggcagaggtcttggccatctgcatcagggagaggataccctcctgcatccgggccccgccgctggcggagaaaaggatgagggggagcttgtacttgtcggcgtactccaccagcagggtgaccttctccccgacggcggcggacatgctgcccatgaaaaagcggctgtccagggcgcccacggccacccgctggcccccgatgcggccggcggcggtgaccaccgcctcgttcatgccggtgcggcggcgggcaccgtccagcttggcctcatagccggggaagtccagcgggttgttggaggccaggggggcgttcagctcccggaaggtgcccttgtccaggatgaggctcaggcggtaataggcccccacggggtagtggtgcccgcacagggggcagacatagcggtggcctaccagctcccggcggggcaccgccttgccgcaggcggggcaggcctcctcggtgtgggccggagcgggggaggagccccgcagggccttgagggagaggagcttctggcggcgctgtgcaaagacgctgctcatacctcacgcacctccccgctgccgctccaggccagaagggtgtccatatgggcctctagaaagccggtggagtagttgccccggacgaagtcggggtggtggaggatctggtggagcaggtcggtgttggtagccggtccctcaatgaccagctcctccagggcccggcgcatccggcggatggcctccagccgggtgggggcatagacgatcagcttggccatcagggagtcgtagtaggggggcagctcgtagccggtatagaggccggtgtccacccgcacgccgtagccaccgggcaggtggagaaagtcgatgcggccgggacagggctggaaccccttggccgggtcctcggcgttgatgcggcactcgatggcgtggccgcggaacaggacctcctcctgggtaaccgagagggggagcccggcggaaacgcggatttgctcccgcaccaggtccaggccggtgaccagctcggtgactgggtgctccacctggatgcgggtgttcatctcgatgaagtagaactggccgtcgggggccagcacgaactcgatggtgccggcgttgacgtagcccgcggccctggcggccgccacggccgccgcgcccatccgctcccgcagctccggggtcagggccttggagggggactcctccagcagcttctggttgcgccgctggatggagcagtcccggtcgcccaactggatcacgtgcccctgtccgtcggccatgatctggaactcgatgtggcgggggttgacgatcagcttctccaagtacatctccccgctgccgaagcaggccagcgactcgctgcgggcctcctcaaacagggggatgagctgctccggctcatacacccggcgcatcccccggcctccaccgccggcggaggccttgatgagcaccgggtatccaatggagtcggccagggccttggcctgctcggcggtgtctaccgccccgtcggagccgggcaccaccggcaccccggcgctctgcatcagcttccgggcggcggccttgttgcccatggcgcggattacgtcgccggaggggccgatgaaggtgatgccggcggcctcgcaggcgtcggcaaagtcggcgttctcactgagaaagccgtagccggggtggatggcgtcgcacccagcggcctgggccacggtgaggatggcattgacgtttaaatagctgtctgccgagcgggcggggccgatgcagtaggcccgctccgccaactggacatggagagcttccctgtccgcctgggagtagaccaccacgggctcgatctccagctcccggcaggcccggaatacccggacggcaatctcgccccggttggcaattaaaatgcgcttgaacatgggctcacccttcccggtagcggagcagcggctctccgaaggacaccagggccccgtcctcctgaaggatctcctcgatgacgcagtcgcagggggcctgcacctcgttcatcatcttcatagcctccatcagacacacggtctgaccctttttcacatggtcgcccacctgcacaaagggagcagcatcgggggcggaggcggcgtagaaggtgcccaccaggggggcggtgatgcacttgcccgcaggcgctggagcagccgccggcgacacagcggccgcgggggcgggcaccggggcggcggcaggaatgggagcggccgggccgcccttgcccagctccagggagaagtccttggtggagagcttcagggtggtggcggtgctggcgtcaaagcgggccatcagctcaaaaatctcttgattggtcataacggctcctttcggaaaaaaggcaccggcctgcaccggtgcccaggttccttattactcagcgtgatcctccaggtacttcaccaggtcgcccacagtcttcatgttgggcagctcctcgtcggcaatggtcacaccgaactcctcctccagagccatggacagctccacggcggccagggaatcggcctccagatcctccgccaggcgggcatcgggggtcaccttgtcggcgtcgcagctcagggtttccacaataatctctttaaccttctcaaaatccatgacagattctccttgcaaaattacttcaatcattttacttaaaattttttaaataaaataatttaagcatattttagcaggtcattcgcatttgtcaagaaaaaagtttgtaaaataatgggttcaattggggtgagcccttgagcggcaaggtgttttgcccgagaaaaaagttgtagggtccccttgcggaggcgggcaaattgcagtacgatagcggaaaaggaggaatcatatcgtgaaagtatttattagcgcggatattgagggaaccgctgttaccgccacacgggagggctgtcggccgggggaatttgagtatgagcgcagccggaaggagatgacggcggaggtggtggccgccgccgagggggcccgggccgccggagccgagctggtggtggtgaaggacgcccacgggccggggctcaatattctgccggaggaattgccggagtatgtccagctcatccgaagctggagcggctcaccggagatgatggtggaagggctggacagcagcttcgatgccgcctttttcgtgggctatcacaatgcggcgggggagggaggcaacgccctgagccacaccatcaacggcggcgtggttcatcgcatcaccgtcaacgggcagcccgcctcggagttcctgatctacagttggatggccgcttggtatggggttccaagcgtgctcctcacgggagacaagaccctgtgcgaggtgggggcggagctgcacccctccctggttaccgtgccggtaaaggacgacgtggggggacgttcccagggcctcagcccagttttggcccacagacggatccgggagggggcagagcgggcagtgaagcaggacttgtccgccgcccgtatcaccctgccggagcatttccgggtagagctgacctataagagtcaccgggatgcctataccaagggcttctaccccggcgcggagcgggtggacgcgatgaccttggcctatgagaccggcgactggtacgaggcaaaccgtttccttttgttcgccatctgagcaatacgccgcgtaaagcaaagggccgcccggtataaccgggcggccctttgcgtgaatggggggtgttgttttaagtagccgccccggccggggcggcagggcagtcagccgcggcagcagccgcagccgcaggaggagtcctcgtcctccccgcccgcagtatcccaaaggaacgcggggaaggagacatacacgggccaacgggtgttggcagccgtgccgccgccgggaaagacgggcagctcggggaaggagggcagggtggtgatcccgccgttcccggtattggaaccgttcccgcagcagcaacagcagcaattgcggttctgaccgtgacaacaacacatagtaaggtacccccattcaaatttgcggcgggccttcgccccccacatcgacagtatacgccgcaggtccgccgggggtgcctggacaaacaagcgcccccggcccgcaggggccggaggcgccgttccatccgtatgttaggcggcgaccacgttgaccgcacgcagcttgtcggcattcttgggatcgggctccacatcataggtgaccttctggccctcctgaagggtcttgaagccgtcgcacacgatggcggagaagtgcacgaacacatcgtcgccgccctcgtcgttggagatgaagccgaagcccttggtctcgttgaaccacttgacagtaccgtgatacataatggtacctcctgaaaaaaatttggagctaaatgacatagaaaaaaacccacacatttgccgctcgtctgaagatccgacgatgactacaaacatgtgagttcaggccgtgcatttagactactatacaaatataacacgaaatccaggccacgtcaagaggaaagaagcggaagggggcggcaggcgccgcccccggagggattcagagacgctccttttccggattgtcggaaatgagccgccggatggcctcgtccgggtaggacagcagccggccgtattcccaggcgagctggctgcggttgccgccgaagtaggcccgctcggccaccagattggccttgcgctccttcaggcgcaggtactggtcgagaatgtggccagcccggtagaacaggatgttgaacttgccctgattcagcgagaggggaaagaggtcggtgagcagcggggtgtcctctatgtagagctggttgccgtactggtggcagcaggagcgggcaaaggggatcagggcgtcccgctctgcggcgctgtccatgggatggctgagggccagtgccttcaccccggagcgcaccatctcgttgaagcagtcaatcacgccgcactggtaggaatagggatcaatgttctgcataatcagggcctcctgtcttgtcccctctattttaccccaccgctgcccatatgacaagcgggtaaagaaagggaaaaaaaggaagatgtgtcgattttctaccgggcccagtcccggctgcggcccaccgcccggtgccactgctccagcaggcgctcccgctgctccggcggcatggcgggggagaaggcggtgtcgcaccgccacaggcggcgcagctcgccggtaccgctccacaccccggcggccagaccggccagataggccgcccccagggcagtggtctcccggatggaggggcggcggacctcccgatccaggatgtccgcttggaactgcatgaggaaggcgtcccggctggccccgccgtcggccttgagctggcccaatggcaggccggtatccgcctccatggcgtgaaccaggtcggccacctggtaggcgatggactcctgggccgcccgggtgatgtgctcccgccgggtgccccgggtgaggcccaccagaatgccccgggcgtacatgtcccaatagggggcccccagaccggtaaaggcgggtaccagatagacgcccccgttgtcgggcaccttctgggcgtagtactccgcgtcccggctctcggggaagaagcgcagctcgtcccgcagccactggatcaccgccccgcccacgaagacggagccctccagggcgtactgcactcctccgtccagcccgaccgccacggtggtgagcaggccgttgcggctggcgcagggcttgtccccggtgttcatcagcaggaagcagccggtgccgtaggtgttcttggcgtcgccgggggagaagcagccctggccgaacagggcggcctgctggtcgccggccatgccggcgatggggatgcgcacgccctgtatgtcggtgtagccgtagacctcgctggaggggcgcacctggggcagcatggccctgggaatgtccagggcggagaggagggtgtcgtcccagtccagggcatggatgtcaaagagcatggtgcgggaggcgttggtgacgtcggtggcgtggacggccccgccagtgagcttccacagcagccaggcgtccaccgtgccgaacagaatctccccccggcgggccttttcccgggccccctccacatggtcgagcacccacttgatcttggtggcggagaagtacgcgtcgggaaccaggccggtggcggcgcggatgtgctcctccagtccctcggcccgcagccggtccaccaactccgccgtacggcggcactgccagacgatggcgttgtagatgggccgcccggtggcacggtcccacaaaatggtggtctcacgctggttggtgatgccgatggcggcgatctccgccgggtttacccccgactgggcgatgacctccatcattaccccgtactgggaggaccagatctccatggggtcatgctccacccacccctcccgggggtagaactgggtgaactccttttgcgccacgccgagaatgttctgctcccggtcaaagaggatggcgcgggagctggtggtgccctgatccagagagagaagataggtgcccatagcgaagcctccttttagaaattgagggtgaagcggtcccgccggacggtgagcacgccctcccgctggagggcaccgatggtgcgggacagtgcgctgcggtccacgcagagatagtccgccagggcctgccggtcaaaggggacagtgacggtggcgcggcctgtccgggcggcctgctcctccagataggagagcagccgctcccggatggtgcggccggacaggtgccccagcttgcccgccagagagaggtttttctccgccagcacctggagcaggttggagatgagccgggtgtggaaggtacaggcggcggagcagggggcggagatgcggccgcagtcgatgagcagtaccgccgcgtcggcggcggccgtgacggtcaccggcaggctctccgcccgggcacaggcgaaggactcggcaaagaggccgccggggcggatctcccccatgaccactcgctggccgtcggccttggtccggctcacctgcacctggccagtgagcaccgcccccaggtgggtggcgggatcgccggcatgaaagattacatcccccttggagtactgccgcagccgcgcccccagacagtccagcatggacagcagctccctgtcccccatgccgtggaacagggcgaccctccgcagggcccccagataggcctccatggcggcctcccttctgttgcaaaagcaacccgtttgccctatggtagcagaaaaaacggacgaaggcaagagaaagccgccgccgtcttgcaaaatggggtggaagctggtaagatagggacagatttgacagaaacggcggtgaaggtatgacaggtatgttggccgttggcgtgcttctgattgcccttggcgtggtctttctcgcggtgcctctggagcagctccagaaggtgttccggcggatgcgttcccggattggaaccaaaatcggcggcgcggtgctggtggcagccggtatcgccctggccctgtactgacatggataaggcaggccgcccgcagtttatgcgggcggcctgcctgtttcacgcgggcgcagaaattgcccttgactctcacacggtggcaggcagtaggataatcctgagctcaggaagatcacatatatgtgaggaatcggccatgttgaaaatcggtaccttttccaagttgtccaggctcagcatccgcatgctgcgccgctacgacgagctggggctgctccagcccgtccacaccgacccgttcaccggctaccgctactaccgcgaggagcagctcaccacggcggggcgcatcgccgccctgcgggacatgggcttcggcctgtccgccatcggggcgctgctggaggacggcggacgggaggagctggaccgccgcctggcggagcagcagcgggcgctggaggccctcctggcggagacgaggcagcggctgcgcctcctggacacggcccgtgcacagttgagaaaggatgaaagcaccatggaatacagcgttactctgaaaaatctgccccagcggcgggcggcctgcgtccgcatgaccctccccagctatgaggccgagcaccagctctggcaggtgatggcccgggagaccgcgcccttgggcctccggctggaggagccctgtctctgctccgtcacctattacgacggggagtaccgggagcgggaggtggatgcggaggcgcagaagacggtccggggagactaccccgacacggagcacgtccgcttccgcaccctgcccgccgtgacgtttgcctcggccaccttccgggggccctacgacaagatctgcgcggccaacgccgccgtggccgcctgggtgcgggacaacggctatgcctttgacggcccggccttcaatatttaccacgtcaatcccagcgagaccgacgacccggaggagtacgtcaccgaagtgtgctacccggtgaaaaagcgggcgtaacacttcatgtgcacaggacctgccatgaaacgatgcaaaggctcaggcgcatgaagtgattgcgcatgtgggcggtcccggcccatgcgctgtcatctcatgaccatgccgcagtaagaggcccaggcttatgcctgggcctcccgctgtcagccctcgtagacctccttcgccatacgcagggcggcccaggccttgggccatcccgcgtaaaaggcggcgtgggtgagtatttccgccatctctccggcggtgacgccgtgacgtttggcgttggcaatgtgaaatttcagggagctgtccagaatgccgccggccatcagggccgtgacggtgacgatgctgcggtcgcgggcggagagagcctcctcccgtgcccacacctcgccgaagagcacgtcgtcattgagttgggcgaatttgggggcaaagccccccagctcgtcccggcccgccgttatcttttgttccataaaagacctcctactgattatctgtcccgccggtcagtgtctccagagcccgataggccgccgcgtccaccggctcacaccactcgttttgggaaccctccccgggcacctcgacggccaggtgctgaaaggcgctgtccactgccgccccgtgccagtgcttgacattgggcgggatattcaccacgtcgccgggacggagcgcccggggagcttcgtcccactcctgataccacccccgtccagcggtaacaagcagaatttgcccgccgccgcgggcggcgcggtggatgtgccagtggttgcggcagcccggcgcgaacgtgacgcagcctacgggtacctgctcggtggagagcatattcagatagctggcgccgtcaaagtaaggggcaaaggcggtgttctccgcccccgcgtggaaggggctggtgcggttgagctcttccagtgtcatggtgcaatctcctctccggccaggcggatattccacctgcggttgtttgctcctattttaagccgggctggcttgacagggaagcgccgattttgtaccatggtatcaaccaaaagtttgaacggaagggaggagcggccatgttcaacccccaattggccacctttgtctgcgtggccgactgcggcagcttcagccaggcggcggaaaagctctacctctcgtccacggcggtgatgaagcagctcaacgccctggagcggcacctggagctgaagctgctggagcgcacaaggcgggggaccgtcctgaccccggcgggagaggtcatttaccgctacgccagacagatgttcgccgactcggaccgggcgctgcgggaggcgcgggcggccgcccaggcggcccggtctgccttttgtgtgggaacctccatcctcaatccctgccggccctttatggacctgtggtaccgcttctgcgggcacttccctggctaccagctccacctcgtcccctatgaggacgaccaccaggggattttgggagagatcggcgccctgggagagaaatttgacttccttatcggtgcctgcgactcccgtcagtggctggaccgctgcaattttctccctctgggggagtatcgccactgcatcgccgtcccccggggacaccccctggcgggacggaaggggctcaccctggcagagctgcatggggagacactgatgatggtgaagcagggggactccccttcagtagaccgggtacgggccgcagtggaggcccatccgcagatccatattgaggacaccccgcagttttatgacatggaggtgttcaaccgtagcgtccagaccggccacctgctgatgagcctggactgctggacggaggtgcacccgtccctggtgacccttccggtggattggaacttcaccatcccgtacggcctgctctatcagctccggcccggcgcagatgtggcccggtttgtggccctagtccggggggacggccccgcataagaagacagcgcgcccgccggatttccggtggacgcgctgtttggccagaagggggacacgggctccgcctcatagtccggtgcggtaaagggggatgacgttgatgacgggctcctcataggggtgggcccgcttgacggccgccacggtctcctccacgcggtctgtccggcaggtaacctccaccttgagctctggcgcatggcatacctcacccatcctgcccagataaggagcggtgcccgccagggggcgccaggcgccgatgacagggctgtaggagagacagcagtcgtaccggccgatatggcccgcgtccaccgaccacagggcctgctgaacggcctccaggtggctctcagggagaaagatttccagcttgcagaactcaaattccatggcccctcactcctcccggtattccggacactggtagcggggcttgccccggctggccctgccgtactcaatggctccggcaggacatccgcagatgcaggccatacagtgggtgcaccggtccccccacacagggcggccgtcccggaggcggatattgttttccacacagactgcggcgcatttgccacagcccacgcaggtgctggtggagtggaaggggccggccttgatgataaagcggtaaaagaaggcgttcaccggtccggatttgagcttgtcgatcgctccgcgccggacgggcgggagggactcgccccggcggatgcactccgccccctcctccagccccggcaccgcggctgccacgatagcgcgggcctcctccggcccgggagcgcggaacagggcgatgtagttctccggcatgacaaccggcagaacgccgcggtaggtgaggcccatgtcccggcaaagggcctccagccgggggatgggatcgccgatttccgccccgcaggtcatgacaaagtaggcgtcccggctgcccgaaaaccggccgccgcggagcagagcctcgaaaatgcgggggagctgccagccgtaagtgggagacacaaagacccacggtgaccgggaggtgagggcgggaaagcggccgtcccgcaggaagggaaaggcgtccaccgcctcatcccccagccggtgggccagccatttggcgcagtagcggctgtttcccgtgccgctgaaatagaaaatcatcaggagcgctccttttataaacggttatttcatttgctccaacacatccgactcccagcggtggagggccgcaagctgctccggtgtgtggaaccagtgctcgccgccctccaggacggtgagtgctccgccgaaccggcgggcgaagtcctctaccgccgcccggcggagcatggcgtccccggaggcgtacagcagggcggtgggagtgggccagcggcacaccggatgggagcggacatactggaggtagggccaggagagggtctccccgaagggagtgtccagctcgcctgctgcctccagttgggcctcgctgacgccggcccaccccatcatgtctcggatgagcccctccatgtctaccaccggggagacgaaaagcgcctgctccagacgctccccggcgaaggccagcagggagaaccaggcccccagactggtgcaccgcagggcggtatgccgccaccgccctttggcatagcccaacagcgcccgcagctcgggcgctgcgtgccaggggtccaggggcaccccgtccccgcggcgtgtcccatgctccggcaagtcggccgccagcacctgccagccccggggacaggcgagggcggcaaagtcctccgcctcctccttgcacccgcccttgccgtggacatacagccagacccggtcggcgggaggaccatagagggcggccttcagcccggccgcctccagctcagttagttccatcgtttcctcctcgtgtgcccggcagctttaccgggcaggatactctattataacacaaacctggagaaaatgcttgactttgacgctgcgtcaactgctatgctgtagaagaaggagggaatgccggatggaatattccattcaagccctgtcgcgcctgtccggggtgaccacccgcaccctgcgctggtacgacgaaatcggtcttttgaagcccagccgggtggcggagagcgggtaccgctattacggcccggcggaggtggaccggcttcaggacatcctctattaccgggccctcggggtggagctggcccggatcaagaggtgcctggacgacccctccttcgaccggctggccgccctgcgcagccacctgaccgccctggaggcggagcgggcgcggctggagggcctgatccggtcggtacgacagaccatcggagccgaagaaaggaaggaaatcatggacgataagcagaaatttgaggcattcaaacagcgggttgtggactggcaccaggagacctatggggcagaggccagaggccgatatggtgacgccgaggtggacgaggcccagactgcggttttgaacctgaccccagagcagtaccaggagtggacgcggctgggcggggagctccagaccgcgctggaacgagcggtggcctccggcgcttctccggagggagaggacggccgggcggctgcggcgctccaccgccgctggctcaccctcaccggcaaccagtacgaccccgccaagcaccggggcctggccgagctgtatgtgtctgacccccgctttaccgcctactatgacagggctgtgcccggctgcgcccggttcttacgggacgcagtagcctgctgggcggagaggctgtgaaagggcggagcgccgcgcagctgcgcggcgctccgccttattccagctcgtccaggcggtcctggagctcgtcggccagatcctccagtgcctcgtggcgttctccccagtcctcataggcatcgctgtccatatcctccggctcgagctcgtccagctgctccagcacaagctggatccgttccaggcaggagagaagttgagcgcggtccatgccgtccaactctggctgtccgggaaaggctggaaaatcaagcgtgtcccccatccgggtgcctcctttcggctctatgaagtatgacgattataccacagccgttctctcatgaaaacattgcaggcgggatttctttccgacaagcaatggaataccgaacggcggagtagacaccaaaataaaaaagatgcgtctcccaaagccgtgtgacgcaacacgttccataatcggttccgtctctttttgaagagtgcgttcactcaaaaatgctctcatgatcttcttgataacgttcccttgaatttcggtcaaaaatacagtataaacttttcgcaagtctatcataaagttctctcgtataaagcaaaagtattattgcaagtagcttcttattcagcgtgactatgatttttattgtactacattacgacggattttgccgccccaataagactatgggggttgttcccaaaacatacaagtaactttatcgaagggacgattctcatgagcagcaggcaaaaaagcatcaagccgatgtcagtaggagttcgaatcccacccattacacgttttgacctttgaatttgctctgtttgtatttgactggtggcataaggcgttttatataggaaaggccgagacttttctagcaaaaaggattttagacataaaatggccctacctgaccagaacaaggataaccatttgttctggccaggtagggccattcaattggacccgcctaacgaggcaacgactctgacaggctttgaaagatagcccggttgtgaagaaccgccgatgaatccggtttacaggcggcggccagttcattgaaggtttccgctcttttctggtcgcccagatggctgtaacagacgcacagctggatacaggggagataaccatagcagtccggagagacaaagccgcccctgcgatcatcccgggcgcaggtcagagccagagcgtaccagtaggcagcctgctggtaccgctcctgccggaggaagcagtttccgatctcacagcagacctctgccctgggtcggtcgtaggtgaagctgcgaaataacgcagccagcgccgcttgctcatggcccaactccttgtgacagtaagcgcagtggcagcatgcgtcaatgttgttctccacccagccctggccttcttccaaaaatcgctcaaagacatccaacgcctcctcccagcgatggtggtagtagagctcacggccgtagtagaactgctgacggggttccagctgtttcccagcagccagttgggcctggtagatacgcaggttccggtctgggtcggaggggcgggtcttgcggtgggtgacggcgaaatccgagtacaggacattcccaaccggcgtgacaacctcgtggacggctcctacccagcacatcccagcccggtttttgatcagcctttcccggtagtaagagaaggtcacgcggccgcgttcgtcaaagccggtgtggtagggggccatgaccaccgagacagttgggtccagagtctcttttaggttgagaaaagccttctgatcctcctccaaaaatacgtcgtcggcatccagccacatgcagtaatccatagacgcatgggaaaaggcttcgttccgggcggcggaaaagtcatcctgccagggaaagtcaaagatttgattggtaaagtgggtggcaatctcccgggtccgatcggtggagccggtgtccacaatgataatctcgtccacgaggccagccacactcttcagacagcgctccagcacatcttcctcattctttacaatcatacacagactgacgcttatcatagtggcgcttccttttgattcatcatgatattgtttccgccggtttttaccggcggcactcagctcagacggatgatggtcagagaggccccagcgccgccgcttaccagaatggcggttccggcaattgtggtaaagagctgcaacgtaatggtggagtttgcgggcagtgtgaccttgatctggttttcaaagttagaggttgagaccaccgggttgatggtagaggggatgctgttcaccccgttgatcaccagccgggttcccatcagcagggccacagtggtattcacatggtaagatatctgataggtgcccgccgtggccacggtaaacaccgtgttcccggtgttggccgtgatgtcgggggacagaacttgggcgttgggcagggggattgggctgccccccagcgccaccagaacgctgctgccctgggtgttggcggcaaagccggcggtagaggtaaggttgggacctgtggctccagtgggaccggacgcccccgtgggaccggttgcccctgccgcgcccgccgcgccggtgatgccagctactccgacggcaccgtttgcgccggcggaacctgtcgctccggtggctccggtagctccgactgctccggtggggcccgtagccccggtggctccggtggctccagtgggacctacagccccggcagggccaactgccccggttgctccggtgggaccaatgggaccctgcgcgccagtgggacctgtcgtaccggtgggacctgcggcgcccgtcgggccggtcgggccgtccgcacctgtggggcccgtggggccagtgaccccgacaggcccttctgcggggcccgtcgcgcccgtcgcgccggtagccccggtgggaccgggcaggatgggggcgctcatggccgaggccaatttgccggttagcagcatctgctgctccatcacgctggacagcgtctcctgcacgctttgattgacctgcattacctcatccaaagccgcagccgcttcaaggcctggcagagtacccagaacgtattgcagcttttcaccctcggcgttgaggatgtggctcaggctgagctcctcagcagcaatggaggaaatgatctcattgatgctgccctctctgctcagaggaggctcgattgggggaaaggttggcagtgacatgagacatccctcctcagcttagacgggtaatggaaagggccgcgccggcggagcccggcagcagggtggccacggaggcgatgccaaacatttgcagggaaacggtgtccccggcgtttaggttcagcaggatctcgttggagaagtggctcagagacaccgcaggggccacggtggaggccgtattggccgcgccattgataagaaggcgggtaccgctggccaaggacgcggtggtgtttacattgtaagaaatctggtagcgcccggcgttggttaccgtaaacaccgtgttggccccgttgaccgtgatgtccggggagagcaactggccgtccggaaggggaaccagggtgccccctacaaggacggtcagcgccgtgccgctggtattggctgcaaaggcggaggtggcggtgatgttgggaccggtggggccggttgcaccagtcgcgcccgtcgcgccggtaatacctgttgcgccggtggccccagtggccccggtagcccccgcaacacctgtagggccggtggctcccgtaacgccggcaggtccggtcgccccggtggctcccgtggccccggtggctccagtagccccggcagctccagccgcgccggtggccccggcagctccagccgcgccggtggcccctgtcgcgccagtaggccctccggcaggcccggtagctccggttggcccggtggcgccggttggaccctgcatgggggaggctgtcaaagcgccctgcatctttgctttcagaaagagctggttctgcgccgcggtttccagcatactgcggacgctctcattggcggccagcacgtcgctgactgtggcgggagggccgctgagaccgggcagggttcccagaatatattgcagtttctctccttcagcgttgagaatatggctcaggccgagttcttccatcgcaatagaagagagaatttgattaactgcgtcttcccgttcagtggggggattcactacgggaaagctaggcagagacattatcgggaatctcctttcaaattgagaggtacatactaatatgcaccggtgcgctggcgggagcgaggcactccaaaacgtcgcgctgggacattctatgtatcttccagccaacaggttcccggtggaacaaaactgccccggatgtcatagggtaagacggcggcatggataccctgctgcacatcttggacccggccccgccgggacgaactatggagttttaatatgtctatgccctcctttccacccaacggggcggatatgacccaagaggaagctctgaccatgattatcgcgtccattgccatggaagagcttgccctgagtcatattctcaacgctgagggtgagaaactacaatatatcctggggactctgcccggcacaagcccctgtgcctgtccccatgacgtgctggccgtcaacaaaagcgtcaccgcccttgttgaggcagtgacgcaaaaccagatgctgttgaaaaacaagctggctcaggtgctagagttttgcccgcttccatcgcccccgccgccagcttgtaagccggagccgggacctacgccctgtccttccccttgccggccagatccctgtgtgtcccagtgtccggtgtcctgctccccaccccatccagtgtctcatcaggtactgtcctgtgaaaaaagcgctgttcaattaataggactgcgggagagaatgctgtggaatccggactgtcgcctgtgctggagacagcgaagccgttcaggaaaagatatctgtttggacgaacgtacccctgctcagattcagcttgatccagggaaaacctacgcagtccaatacgcactgaatgtctgcgccacatcaccggaagaggggacaattctcctcaggcagtcgccctgtggtgcgtttacagatgcgatgcctctgcatttttccataggacacccggcacacggtcagcagacattgcactatgtctctgtaatgcacccctgtataaacaatggatacagcgtgaagttgtccctgatgcttgacgccaaagcgcctctgtatgtggagcaggcagtgatggatgtggtagagctttgatgacatgattgagcattttaatagcatgtaacggctctgccgggcacaagagaatccagtacaaaggagataaaacgaattttgctgccggacaaagaatggctggaaagccagataaaagcaggtgttatattatgagcggaacctcattacaacctccggcttcaccttggatcgggaacgacagaaaatacattacggtaaaaatgaccatacagcgtccatccttattgaccgcaatcgctgtcagaatggccacattagtttgctgatagtagccggagaacccacgtggtctcagttatatcctccacacgccggatggatacgccggctagatacatctcgatcagggtttcttcacactgctctcccggcagcgacagctcacaatggcaaccgttttaaaggaaatccccttgagcttgggcaccttgagggcgacttcaccggaagtggtaatgaggctacggctacagtggccgctgcggtagccttagcgctgttcattgcgctcgtagcgagagcttctccgccttcgacttccaataactcgttgaggggaaacctccacgctacctcgcaccaattccttgtaggactcttaattactccctcatttagttgtaaaatttttggaacatggtttacagacttcttttgggatgctgtgtcgcaatttcattctacgagaggcctgcaacccttgtctcatctgatccctttttcaatgtgtgcatttggctcatcttttctgcgaaacttattttaccttatccaccgccaaggaatggtgaacagatgaagcaaaagcactataaaggacagaactacagggaatgaaaaaagccgcctgttacctccgggtatcgtgaaatcaacaggccgcttgattttgtttttgtgtgccttggtcaaatgaggagagggttgaaacgctctgtccctccaaaactggatttcgtatcttcccaaaccatactttttgtgttgacttcttctgaaactatccgaaatagcagaaacaccgcacttctcagtgtttttgcttatatatcttggaagagacggttaaaaccaatatttatgagtacctgtttcttcctcagtcgagacagcattacccctcagaagtggatttcaagcgcggcttggcctcctgcatcgaggtttataatacacagtgaatcttatcgcacattgcaaaactgtacgccatgtcgggtggaagatgtattcatgagcaacacatctcgatgacactttaagagttcgaatctcgtcgtatacacgttttacactttaattttacgctgtttgtatttgattggtgacacaaaatgtttcgcataaaaaggtcaaacctcttgcagtctaaggagttctggaatgaaatgaccctacctcctctgaacaatgtcagtcatttgttcagaggaggtagggtcattcagtatggtgcggatgacgggactcgaacccgtacggccatgggccactagcacctcaagctagccagtctaccagttccagcacatccgcatattgtcgtctcgaaagactgctagattattataacgagccgttacggatttgtcaactggaattttccactccgcaccagaaaaagcaaaaagatcgaaaaaaggagttgacaagtggggggacagatggtaatataatcttcgcgctgcaaagagcgctaaagatgcgcgagtggtggaattggcagactcgctagattcaggttctagtgtgcattacgcacgtgcgggttcaagtcccgcctcgcgcaccatgtcggagcaagctatggatcgcttgctccgacttattttatatgtcagagcgcgctcacgccgctgctcctcctttccaaacagaaccagcttacgctgggcttcggtttggggccgccctgtgtgcggcttttttcttgtcggttttaaccgtctgttccaaatttgaaagccacgtcttagccaattgaggctgagacgtggtttttaaatttggaatacctctatgatatgctggcaatcagtcatgctatagtggtgttttactacaaaatattatctggattttgcaggcgaaaggaaaagatataattttggaatcagaggatatggctgtagcttgtaataaagagcgaaaattgattacaattagcatataagcaattttggaaggattttctgtcaacatgaagggggcatgaaaattatatctgaacagcttcagcgatatagtaacacccacaccgcatggtctggtgatgaccgggacgctgttacaatgctccaggcatttttgggctcgggcggaaaatcagtgagaggttctcgactgaagacacatggcctaatacggatgggacgtttgaattagtcccgtctccagaggtgtctaggcggccaaagcggagctttgtggtccagagtaagggaacctcgaccccgcagatatcgctggacggcgctgtccactatcggctacgggatcttgccttccctgcatatgtggctttggaggttacgctggaccccggtatcttgttcctggtgttaaatacggggaagcgagggcaggagcgcgtattctggaagtacatttcccccaggtttctcgcgtcgctcgattttagcaaggactccgcggtgatccgctttaccggcggggacgagatcaaaaacacggaagagtctggggatgacttcgtctgtagctggacggggtctccaacgaccactccttgggctttcggtcgtcccctttcagttggcctatacagtctccattcacaaggcgcagggcctcgagtacaattccgccaaggaggtcatccccagcagcaattccgagcagatctcccacggcattttctatacagccatcacccgtgcaaaggaaaaattaaaaatcttttagagtgcggatacaatcaatcagattatcgacgggttcggcaaggcggccggcggccggttgggtctgaatatcatcaaaacacaatttctgaatgccgaggcagcaggaccgccacccgtctcttgacttttggcctgcatggagtataataagggtgcacagccaagtttatatggagcatcatgactctgcgcgagtgctgcccttcgggcaggcgcagggatgagggaagccggtgggagtccggagctatacccgtagccgtatgtgcttgaggttgccgttcgaggcgtgagccggtcattggggcagggccctgagaaggcggaacggcagacgcaggagcgagatcgctctggaatggcacgagccggaagacctatggtgtttgagagtggggcgcacgtcggtgtgcgccgggaaagcgcgcggaaaagcggccgcggcggatcataggatctgccgcggccgcagctttatgcaggagacagtgacgacgagcagaaaggaaggagaccgctatgctgaatctcacctggatcaagaaccccgaccacgtatcctactgtaaggagaacgaggtgctgccccggttggcgcgggagctgggcatcgccgacctggcacagcaggtagaggaattccggacccaccccacggcggagggggtaaatctgaaagggaagaaacgtaccactttgaagctgttcatccccaacctgaccttcccggagccggtggagatgggggagaacgtgtggatctatatgggggagctgtgccccgcctactgtctgtttaccccttgggagacaaaagagaattgacgcaacgggaaggagatacggttatgggcgaacaaaaaaaatactgggagggcaagcacttcgctttctataccaacaaggagtgcgaatattacccctgccacccggtgccggaggggacggagttcaactgcctgttctgctactgcccgctttatatgctggggcggaagtgcgggggaaacttcacctatttggaaagcggcgtcaaggactgcagcaagtgcctggtaccccaccgccgggagaactatggatttattgccgacagtttccagaagattgctggcgagatggcggaacgggagaagaaggaaggacagtaaacgaaggttccagcctatacattccgagatgcacatggaaaaagcgcccaactgctatgcgcaggcgggcgcttttttaggcataggtagccgttcatttaacaggtagcggggaggcatcctgtttcagaagggtgttgcccgccatactgctgatgaccggtgcgccgatccggcggctcatgtccaaagaggccacggtgcagcgatccagatcaatgccgcagccgatatccattttgtggagtagattgacgaaatcttcggtgggaatgttccccttggcattgggaatcacggggcagccgcccatgcccgccagggatacgtcaaaccgggtaaagcccaactccatggctttcacacagttggcaagaccaaatccctcagtgttgtggatgtgcagtgagatctgctctggccggaagcgctccagaattccccgcaggatgcgctcggtatggatggggtcggccattccggcggagtctcccaggcccagggaggaggcccccagctccatggctcgccgggcataggccagggttttctccagaggggtggcatcgccgaagggacagccgaagaccgcgcccagggccgcttgcacctggagatccgggaggctggcgatggcttcaagggtggcgaaggcctccaccggcgtggagccgaagccccggccgaaggtgtcgctgacggagaggaagaagtccacgtggcggatgcccagcgtactggcccgtcgggcggcctccacgctctccaccagggcggtcactctgacgcccttctcggcggcgtaggggagcaccatttggcagagggagtccagatcctggtactgccggccccggacggggtcggagctgaagacgccgatctccagctcacgggcgccgtagtcgatcatactacagataagctcccgcttaacctcggttggaaggacggtcttgaatttctgccagccgtccctgggggcaacctccctcagggacaccaaagagggataattcatggcgaaacactcctttcaaaagaagaggcacaccgcggacaccagaataaccaccgccgcatagagcagcatagccgcgataccgtaggtccagatgaatttgttgtccatgtttttctgactgagcaggatggctgcctgaccgctggacgcgtaggtgaggtaggccaccatggagctcagcgagatggccacggccaggatggtgatgtcataccctgcatccaccaggggaccgctcagggcggataccagggaggagaccaccagcagggtggctgtgttagagaagaagttggtgagcagcaaggtaataagtaccgtcatggccacaaagagcagggggctgtgattggagaagaggccacccagggcctgcgtcagccaggctttgatgccgtactcgtcggccaccagcaggccgccgatagctgccatggaggccacggccatgacaatgggccagctcacgcccttggtgaaggcctccacagggcagaagatctgttccccgtccacccggataagggccagcaccgccagggccactgaggtaaaaagaacggtgtccatttcctttagggcgctcagcaccggcatctcaggccagtaggggctggtgaaggagtggagggcgatgatcagaaaggcggccagggggatccactgcctccgggtcaggcgcaggggcttgtccgccagggcctgggccagatctacccggcccagggctcggatgtcgcaccgaaagaggaagcgcagggccagagcgaagaaggcgcagaaggcaatgagaatggcaaaggcctccgccacgaagcggaaggtgactacctgcaccccagcagcggccagaaagaactgccctgccgccagattaagggccgccatgctgccgatggtcatagggccgatacacatggtgataaaggcgcccaggcatagcaggcgggccagcttgcttttgggctcgataccggcctcggcgtagattccatccagcagggtgaaacccacgatgagggcgccgaacacccccatgaaggcggcggccaggccaaaggcgaagaggagcatcatcaccatgaccatcgggtatttttgagtgaatctgcgggtcaggaggaaccgggcgatgacctcgccggtgttgtcccggatgatgacgtagcacagggcatagagcaccacgatctgccacacataggaggcgcccataaaggagctgattacctgggcaggggtctgaatgccgttgattaccaggccgcccatggcgaacagggcgcacaggatcaggtcgttggtggtcaggatgccgataatggcacccacaaacacgcaggcgatggacacgccggcgggggtgatcccgtcagcccaggacgggatcagatgggggagcaggagcatgctcgccagcatggccagcgtccccaggtagtagatccgcgagctgtgcttgggggaggcgtttgtctgtttcatcgtttttcctccttctgtctttggtgcggtttcaccgcacacttctctccatggcaactataacacgggtcggcttatttgttaaattcatgtttttcctttttatttataaggaaatgttatataatggccataccacgaggaggtggccgtatgactatcgcgcagatgtcccatttctatgcgctctgccagtccggaagctacactcaggcggcgaagcagctatacatcacccagccagccctgagcaaaagcatcgcggcgctggagagcgagctgaacctcaggctggtggagcgtagcacacggacagtggcactgacagcggcgggggaggagttcgcacgggcgtgtgaggagatgctggaggtatatcgtaagggggtgaacaatgcccggacggcggcgggcgacatctcgggcctggtccgcttcggcctgccccgggaccgggtctgcgatacctttgccggcctgcggcggcatatcgaggaggaataccccaacctccggctggagctgcgcttttacagcgaaaacggccttctccgcgccctggatgaccacatggcagacttcgtcctggcttttggccggccccgggcggacaacgtggggcggcagagcctgtccgtcagccagatctgcgccgtgctgcccggcggccaccccctggctggggcgggagagctgagcttctctcaactgcggcatgaggcgtttctggtcccagactacaaaatctccggtgtggagtttgacacggtggtaacttatgccggccggaatggcttctcaccccacgtggtccaggaggcggactccattccccaaatcttcaccatggtggcctgcggatgcgggattgctgttttgtctgagctctatcgcttcagtgccggagagcacgtggtcttcgtccccctgagagatatcccgcccagcgaggagcatctgctctggcggcagcgggatgacaagtgcttaaatgccattgtggagctggcccggcgttactacggaggcgggatgtaggacgctgcggagaaaaaacaggccggccggagcgaggggtcccgctccggccgacctgttttttgttgtttagccttcccaagggatgggccgcccggcggccagggaggcggggacgtccagcagccgctggttggaggagccgcggaagcgcagggagatgtctctgagagcctccacaaattccccgtccaccagcacgtccaccagggagagcagcgcgccggtggcctcgcagcgggcgcggctctgcccggtcagctcctcccaggtgtagccggaaaaggcccacacggtcttgtccgggagctgctgccgcaggcggcggaggaaggggagcagggcgcgctggttgtccggctcgaagggctcgccccccagcagggtaagcccgctgatgtagggccggtccagggcctccagaagcgcctcctcggtctcggcggtaaagggctggccgtagcggaagtcccaggtctggggctggaagcagcccttgcagcggtgggtgcagcccgagacaaagagggtcacccgcaccccggtgccgttggcgatgtcgcagggcttgatgctgccgtagtacactggaaccgccctccttacaggtggagcacccgctccttgatctcctgggtgcggccctggttccagaactgggtgccgatgtagccgcaggtgcgccgggccacgttgagcttgctctgttcccggttgccgcacttgggacactcccacaccagcttgccgtcgtcctccacgatccggatctccccgtcaaagccgcacacctggcagtagtcgctcttggtgttcagctcggcgtacatgatgtggtcgtagatgaagcccatgacctggagcacggcctccaggttctgctgcatgtcgggcacctccacatagctgatggcaccgccgggggagagggcctggaactgggcctcaaaggacagcttggagaaggcgtcgatctcctcggtgacgtggacgtggtagctgttggtgatgtaggacttgtcggtgatgccggggatgacgccgaagcgcttttgcaggcacttggcgaacttgtaggtggtggactccagcggcgtgccgtagagggagaagtcgatgtgctctttggccttccaggcggcggtggcccggttcatgtgttccatgacctccagggcgaagggggtggcctccggatcggtgtgggagcggccggtcatgtacttgacgcactcgtacagccccgcgtagcccagggagatggtggagtagccgttgtagagcagccggtcgatgggctcccccttcttcagccgggccagagcgccgtactgccacaggatgggggccgcgtcggacagggtgcccttcagccgctcgtggcggcacatcagcgcccggtagcacagctccagccgctcgtcgaacaccttccagaacttctcgcggtcgccgccggaggagagggccacgtccaccagattgatggtcaccacgccctggttgaaccggccgtagtacttgggctttccggtctccggatccacgtagggggtgaggaaggagcggcagcccatgcaggtgtagcactggccctccccgttctgatccaccttgttctgcttcatgatcttctcggagatgtagtcgggcaccaggcggcgggcggtgcacttggcggccagcctggtcagatagtagtagggggtgccggggcgcacgttgtcctcctccagcacatagatgagcttggggaaggccggggtgatccaaaccccctcctcgttctttacgccctcatagcgctgtaccagggtctcctcgatgatgagggccagatcccgcttggtctggggatcgtccacctcgcccaggtacatgaacacggtgacgaagggggcctgtccgttggtggtcatgagggtgaccacctggtactggatggtctgcaccccacggcggatctcctcccgcaggcgcttctccacgatgccggagagcacctcctccgagggggtgccgcccacggcggcgatctccgccagcacctgcccgcggatcttctcccgggagacctggacgaagggggccaggtgggccagggagatggactggccgccgtactggttggaggccacctgggcgatgatctgggtggcgatgttgcaggcggtggaaaagctgtggggcttttcgatgagggtgcccgagatgacggtgccgttttgcagcatgtcctccagattgaccagatcgcagttgtgcatgtgctgggcgtagtagtccatgtcgtggaagtggatgatgcccgccttgtgggcctccacgatgtcgggggggagcagcagccgctgggtgatgtccttggacacctcgccggccatgtagtcccgctgaaccgagttgaccaccgggttcttgttggcgttctcctgcttggcctcctcattgttgcactcgatgagggtgaggatctggctgtcggtggtgttggccgcccgggccagggagcggacatagcggtagcggatgtagcgcttggcggtctcaaaggcgcccaggcgcatgatctcggtctccaccagctcctgaatctcctccacggacagggtgcggcccatctgggcggcagtctgctccacgctgagggcgagctgggctacctgcccgccggacagctccggcggctggtcggtggccagattggctttggtgacggcggcggcgatcttctcccggtcaaaggcggcctcgctgccgttgcgcttcatgattttcactggtgctgccactccttgcaattcattcgtccgctacattatatagggctaactggaaaagcgcaatactatatttggcgttttgtcaaatcggacagaccggggtggaattccggggcgggacacggtataatagacaaaacagacagcgaagccccggaaggagccacggggcggtcaggaggcatctgcggtgcgcattgatatcatcttcagcgatttggacggcaccctgctgctgggggacaagggactgtcccccgggacggcggaggccctggcccgggcggcggagcgggggatttccttcgtgcccgccaccgggcgttttttcaacgccattccccgggcggtgcaggagctgcccttctggcggtacgccattgtgatgaacggggcggtggtgtgggaccgggcggaggggagggccatccgccgggcggagctgtccccggagctggccgtccgggtgatggcccggctggaggactttcccggcaccctggactgctatatggaggacaactgcggctggatggaggccaggtactacgccgcgctggacgactggatcctggacccggtctcccggcggatcatccgggagatgcgccgccccatggaggatctgcggggctatgtgggccgccgggggcggccggtgcagaagatccagagctactttcgggacgaggccacccagcgggcggtgctcgcggccctggcggaggagtttcccgagctctcggtggcctgctccctgcccggcaacgtggagctcacccaccgggacgccaccaagggggcggccatggccgccctgtgcgcgcatctgggcatccccctggagcgggcggtggccttcggggacgagcgcaacgactgctccatgctggcggcggcggggctgggggtggccatggggaacgccgcgccggaggccaaggcggcggcgcggctggtgacgggcaccaaccaggaggacggcgtggcccggacgctgctccggctgctggaggaggaggcatgaccgggtcgtactatttccggcagctggacaaggccggccaggcggcctaccacgccatgaagaccgggctggccgccctccgccccgccttcccggtaccccggctggaggggcgggagctgggagacgtgctggcccgcctgcggctggactgcccggagctgttctacgtcaccggcttctcctaccgggtgcacccggccgccgccacggtggagctgctgccccagtacctcttcgacaaggggaagatccagacccaccagaaggcgctggccgcccggctggatcgcctgtgccgcccggccatggggctgaacgagggggagaaggagcggtatgtccacgacttcatctgccggaatgtccgctacgacaagctgaaaaagccctactcccacgagattctcggcccgctgggccagggggtgggggtgtgcgagggtatcgccaaggcggtcaagtgcctgtgcgaccggctgggggtgtggtgcatcgtggccctggcggagaacaacccggacaagggggtcaagtaccgccatgcctggaacgtggtgcgcctgggggatgcgtattaccacctggacgccacctttgacaactcgctgggatcggcggagctggtgcgctacgactacttcaatctggacgaccggcggctgttccgggatcacgaggccctggtctatccggtgcccgcctgcgccgacggggggcggttctactaccgggaggccaagctctccttcacccggccggaggaggtggccgggcgggccgcccaggccgtccgcaaggggaagcccctggtgttccactggcggggcggccccctgacgggggaggtgctgggggagctggccgccctgctggaggaggcggcggcccggaaggggcggcacgccgccatccggctgaacaggccccaggcggtgctggaggtgcgcttcccggaggcgcctccggccgaggcctgcaccgcccaggaggccaacgagggagaggaggaaggctgatgctgcgggagtacctgcccttttgggaccggctgacggaggggcaacggcggcggctggaggagggcgctgcggtgcggcgctttgcccggggggagatggtgtacggcggcgggacggagtgcgcggggcttatcctgcccaccgagggacagctccgcgcctatatgctcaccgacgaggggcgggagctgaccctctaccggctctttccccgggatatgtgccttttttccgcctcctgcgtactgcggggcatccagttcgacgtgctggtggaggcggagcgggataccactgccctctttctgccggcggaggtgtatcaagggctgatggaggagagcgcggcagtggccaactacaccagcgagctgatggccgaccgcttctccgaggtgatgtggcgaatggaccagattctgagcaagaagctggacggccgcctggctgccctgctggtggaggagagccgcctggcggagagcgcctccctccgcctcacccatgaccaactggcccgccacctgggttccgcccgggaggtggtgagccgcctgctcaaggacttccagaacgacggtctggtgcggctgggccggggcggggtggagctactggaccttccggcgctggaggctctggcatcggacagcctacggtgattttgtcacggaaggggcgggctgtttctggtatcctgggtacagacagagcgtccaggacggcccgcccgtccgtgagaaaaaggagtgctgaatgtatgggactgtttgacctctttgcccgccgccccgcgctgagcgagggcctggaacaataccgcaacacctcgggcgccgtcctgctggacgtgcgcaccccggaggaataccgggacggccacctgcccggagcgaaaaacctgcccctggatcggctggataccatcgccgagcctgccgggagcccactgtttgtctactgccgcagcggggcgcggagcgcccaggccaaagcccggctggcgcgggcggggtattccgttacggatttggggggcctgctgggctaccgcgggccgctggaagcatagggaggggagcagcatgaaggttgtcatcatcggcggcgtggccggaggggccactgcggcggcccgtctgcgccgcctggacgagcgcgcggagatcatcatcctggagcgcacgggctacgtgtcctatgccaactgcggcctgccctactatgtgggcggtgtgatcaccgaccgagaggagctgaccttgcagaccccggagggcttccggaaccgcttcggaattgacgtgcgggtggggcaggaggcggtggagcttcacccggagcagcataccgtcaccgtccgccgcctggaggatgggagcacctacgccctccattatgacaagctgatcctctcgcccggggcgcggcccgtgcggcccaacctgcccggcgaggacgacccccgtgtgttcaccctgcgcacggtggaggacaccctgcgcatccgggcctacctggacgagcatcccgtccggcgggccgtggtggtgggcggcggcttcatcggcctggagatggcggagaacctggtgcacgcgggggtgcacaccaccttgctccagcggggcgcgcaggtgctgccgcccctggacgccgacatggcggcggagatccacgcctatctccggggccagggggtggagctgcgcctgggcgcacgggtgtccggcttctctccccaggggaacgggctggatgtagagctggagggcggggagcggttcccggccgacctggtgctgctgggcatcggcgtggcccccgacacggagctggcccgccgggcgggcctggccctgggcgtcaagggggcgatctcggtggacgggcagatgcgcaccagcgccccggacgtctacgccgtgggcgacgcggtggaggtgcggcattttgtcaccggagccaaaagccacattgcgctggccggcccggccaacaagcaggggcgcattgccgccgaccacatctgcgggcggcggagcgcctacactggggcgctgggcacctcggtgctcaagctctttgacctgacggcggcctccacggggctgaacgaaaaacaggcgcgggctgcgggcgtggcctatgacaaggtggtgacctactccacctcccacgcctcctactaccccggcgcccgcaacatgacggtcaagaccctcttcgatcccgcctccggccgcattcttggggcgcagattgtggggttcgatggggtggacaagcgcatggacgtgctggccgccgccatccgggcgggcctcaccgccgaacagctcaccgagctggatctggcctacgcgcccccctacggctcggccaaggatccggtgaatatggctggctatgtgattgagaatgtccgggcggggctggtggagcagcaccactgggacgcggtggcggagctgccggcggacggctcggtgatcctgctggatgtgcgcacgccgggcgaggtcagaaagcagggactgctccgctccgacgcgcttcacatccccctggacgagctgcgggggcggctgggtgaactggacaaagggaagaaggtttatgtcaactgctacagcggcctgcggagctatctggcctgccgcatcctgtcccagcatggcttccagtgctccaacctgtccggcggctggcgcttctggtcctacaacgccaccgaccgggcccacgatgccgcgccgacccacctgtgcggtgtccccactggaaaggattaaaaaattccggctgctttccttggaaagcagccggttttatatgctatggccgagcagccgccgctccagggggagcgccagcaggccgcctgccagataggccagcagatcccacgggtcgcacacggaggagggcttatacagcaggggggccagctccagaaagaggccgcaggccagcagatacccggcggcggccggaacggagcgtatgggggacagccgccccagaacgagaagaagctccaccagggccagcagcagggccccggccagaaggtcgctgaaataccaggccaggaagaggcggagcgggccggaggcagcggggagaaaccatagcttattgcaggcgtagagcaggacggcggccccgatcacccccgcggagagggtgaactggcgctttagaacagggagaggaggagaagcgccgcgatcacgcccacgatcaccgcggccaccgtcccgccgaaacccatgccgcccctcccctcgtcggcgggcgggtccccggcgggcggcggagggggagaggagggctccagctgtgcgggatctaccacccgggcataagcccccacgtcacgcagggcgaatgtcagcgcctgggccgcgtcctgtgtcatcccctcccgcaggacgatagagggaaccaccgtgcagttgtccacgtaggcctcggcctcggcgcgggagatgcccagctcggccatgagcagctccaccaccttgctctgggtctccggcccgtccgggcaggcggtgagcaccacggagaagcggtccggggaagggggagcggccggggctgtgggctgcttgggcagagggtagccgcagtggatgcaggcggaggcctggtcggagatctgttttccgcactcgggacaggaaatgagcgccatggggagaacctccttttcgccggaaggggcggagtggtgggctaggagaggagcaaggccagggggaggaggatcagctgcgcggccaggacgccaaggatcactgcggccacggttttgccgaagtccatggcgcggcacccctcgaagggatggggctgggggacatcgggtatggtggagtcgagcacctgcacctcggcccccgccccgcggagggtgtcggccagcgcccaggcgtccttttgggtcagatgggtctggagggtggagggggcgcgttcggccgcgggctgggagagaaacgcgtagacggcttcccagacgctctcctccaggtggatggcgagctttcggacgcggtaacgcccctcggagtcctcggggcaggcggtgagcaccacggagaagcggtttggatcgaggggagcccttggagcgaggggacagccgcagtggatgcaggcgggggcctggttggagatctcttttccgcactccgggcaagcgatgagggccatacagagcctcctttcggcggaaaccgccgtttttcttccagtgtaccagagggcgggggccctcgtcaatactccttgtgatcctcggcaatggcgccgctgcggtaggccagcaggagggccatcagatcgtcgatctgctcctggagctggcggcccacgtcggtgccggcgattttcagccgggactccagccgctcgaacaccacggaggtggaggcgatgtcctggctggtgcggatggcctccgcccggcccacgaagggctcgtgggacaccaggcggtagcaggcggagttgtagatgagggtatagcccgcgatgccggtggtctgctgataggccttgcagaagccgccgtcgatgaccagcagcctgccgccccccttcatggggctctcccctttcttggacttgacggggacgtggccgttgatgatgtggcagtgggggccctccaggccgaactcccgcagcagcgcctcgcagatctccgggtcgttgtagagctggtagtagacgtttttgggctcggtccaggtggactcgtcggcgagaaaacgccgctcaaaggtggtcatgcggtcgcggccgaagatggggctgttgcggcccgcccacaggaaccacaggaagtccatgccggcggcccgctccgccgagccgggggcggagtagtaggcccggcgggcggccaaatccgcatagtccagaaaggccttgccggagagacgccccccgttcaccgggaaggagaggagggagccgtcggccgccatggggatgcagccgtggaagagcaggttgccgttgaagatcttatacaggctgcccttggagtagaggaagcggacgtgccgctggagcttctcgctgtggaggaaggagagggtgagctggtggatcaggatctcctcctcgggggtgagggcgtaggggtcggcggggttgacggtggggaagtcggtgtccagcatgggataggccctgccgtccaccgtcacagtcctgctttcgtagtcgatcttgtccagcaggagccggtcggccatgccgaagtcggggttgcgcaggatcttctgcccctccagcttgaagaggatcatggtgatggccttatacatccgggcggagagcagcttgtccttttcggtgtaccgctccgcctcctcgccggtgagcttgacggagaagcgcgtcacgtcggtgtcccggtagacctcgttggcaaagacggacagggggcgcagagagatgccgtagccggtctcgatgacctccaggttgttgtagcgcagggagttggccagcacggtggccaccagggtgcgggagccggaggccgcccccatccacagcacgtcgtggttgccccactgtatgtccacgctgtggtagtccagcagggagtccagaatgatgtccgcccgggggcctcggtcgaagatgtcccccaccacgtggaggtggtccaccgccaggcgcttgatgagctcgcagagctgcaccaggaagttggaggcccggccgatgtcgatgatggtggagatgatgttctcgtagtagtcccgcttgtcgttgtcttcgtagtgggtgtgcagcatctcatcgatgatgtaggcgtactccctgggcatggccttgcgcaccttggagcgggtgtacttggagctgaccaggcggcagatctcaatgagccggtggaaggtgatgcggtaccactcccgcatgtcgggggtctcccgctggatctcctccagcttctccttggggtaatagatcagggtggccaactgatcccgctccgccttggagacggtggcggcaaacagatcgtccagcttttcccgcacgaccccggacgcggagttgaggatgtgcagaaaggcctcgtattccccgtggacgtcggagacaaagtgctccgtgcccttgggcaggttcaggatggcctgcaggttgatgatttccgtactggcggcctggaccgtggggtactgacgggccagcattttcagatagtgcaggttttcagggcggcaggcttgggtgggcttcatgcgggaacctcctttgattaaacgggtgatttcagtttattatcgcacgttccggtggaggatgcaaggggataggggaattgcgcccggcttttcccgcgccccgccggaatggggcttgccaggggagggacgccctgttataataaaaacagattttataaattatatttattttgcgagggggatggatatggagagcctggtactgtcaccgcaggatgtggaaaacctggaggccatgagcgacggctccacagggtacttttacaagatgctggactacctggagaagcgggtggaggacggcgtgcgccgggggcgcttctccgaggaggcggcaaaggccgacctggagacggccctctggtactcctacgcctgcaacaacctggacgaatatgagtcgtactgccgggcggcgcagtggatggccgcgtcggaggggagcgcggaggccgcccgctgcggcatgtggtactaccgctactcctgcgccctgctgtactgcgggcggctggaggaggccctggcctacgcggaaaagggagtggcggtagagccggactatgtgtggggctggctacaactgggcaagctgcgcagccacttcggcgacacggccggggccctggccgcggtggagcgggggctggccctggagccgggggactatgagttcaccaccctggcccgggagatccgggagggcaggagtctggaggagatggagtaccactggatcgacccggagcaggaccggcggcttcaggccggagaggcggaggagggggagatggcggacaaacgcctggccatcgcctgtatcctctgcgaccgggccaatctggaggccgtcaaggcggccctgggcgtgacggagtgggaggccgacgccccctactgcaccttcaccatgccctacggagaggggacggtacagggccgctttttcggcaacgaggccgccctgtccaagctgtctgcggagtgggcggcggcgctggcggcccgcctgcccgagctggaccgaaggggcagaaccttcctggagctgagggcggagctgcagaccgacgggctggagctggcgtggttcaccatccagcgggaccaggggctccggctgtgcttccaggggggcgggcacagccagatggtgctgttcggggccgacttctctttgcgggaggaggggcagcccgctctggagcagcccggctccgcggggaattttctggccttcgtgctgctggaggagccggagtgggaccccgaggccttcaagcgggcgctgcgggaccactggggcattccctgcatgaccgagccggaggatggggaggacggggagagcaccctggtctttgaggtggaggggatgctggcggccctgagcctctaccccttcccggtgccccacggcgaggcggaggaggccgccgggcggtgctacctgtggccggaggccgaggcggctgcccggcggcacaaggggcagctcctggtgtcggtgttgggccgggaggccgggccatggaaggccgccgccctccaggtgaagctggtgtgcgccgcctgcgggcaggcggggactctgggtgtgtacgccaacggtacggtctatccgccggagctctatcaggaggcggccgccccgctggacgagggagagctgcccctgctcaatctggtgtgggtgggcctctaccggacggaggaggggatgggcgcctataccgacggcctgcgcagcttcggcaaggacgaactggaggtgctggacgccagagccgagcccgccgaggtgcggaatttcctcctgaacatcgcggattatctgctggaggaggacgtgaccctccgggatggcgagaccatcggcttctcggaggagcagcgcctgcccatcacccgcagcgcgggtgtgggacaggagggtatgaccctgaaaatcggctggcctggtgaggtataaagtaagcggcggcggtcggtaaacccttcggccgaaggatttggagggaaggatagcgtgaaagggaaccgtcaggggttccctttcacgttggatcaaaggactttttgaagcatcaaaaggtccttcagcctgtcgaaaagaagctttcgacaggctgaaacagcggcggaacggagcatccgttccgccgctgtttgcggtatcagggggtggtgtccagcaccaggtcacaccctccgggcagaccggtggactggaaataggcctcctccaggggaatccaacgctctaaaaaggcggggagccgtttcgggccctcacgggccagaaggcgaagccgctgctcgccgggggagcaggtcaggaagacggtgcggtcataccagccacgcagggcggggtggagggcgtagctgccctccaccagtgccaggccggtgagctcggcccggatgggggcggaaaagtccatggagcggcagtcgaaggggcggaagcaggccgcaccggtctcccgcagggggcgcagcagctctgcctccacccgctcatagtggacgttgccgccaggagcggcataacgctccggtgtacgcagggcaggcggaaggaaaaaatcgtccatgtggaacagggggcaccccagcctgtgggccgccagtccggccagggtgctcttgccgctgccgcagcggccgtcgatggcggcaagtgcggggcggcccagccgggccaggggggtgagcagttccaaaagggcctccagggattccaagcgcgggccctcctctcgtcgtttttttcagtataccacaacggcgggacggaaaaaagccagactgtcgctaaatccttctacaggaggggggcgggggaaaggtcatgtaacagggaaccgtcagggtttcctgtcacattcattgggtcaaacgacgttccgcctgttgaaaaccttttttcgggaggaaagccctgcaagcttctgcctgcagggctttcctgtctgatatgttttacttgcccaggctgaggatctcgcgggcctcggcgggggtggcgacctgcttgccgtactcctcgatgacgcggcgggcgcgctccacgaactgc

SEQ ID NO: 4251 - DNA, 11106 bp, Unknown
  gut microbiota DNA sequence
tccatccgggcccggccgaaaaatcggccgggcccggatggattttgcgcgaaaagagaatatagagagttgaggtggagtgcaaaaaattagaagacaatgccgtttttctttttataggccacgtgggagatgaactcctgcatgaggcccgccgcggcaatggaggtaatgccggtgggatcatacgggggagagacctccaccacatcatagcccacgatattcagatctgccagaccgcgcaccagctccagggcctgggcggtggtgaagccgccgggtacgggcgtaccggttcccggcgcataggcgggatccaggaagtcgatgtcgaaggtcaggaaggccttggcgctgcccacccgcgcgcggatggccttcagaacggcctccatgcccatcttgtggcactcgtcggcgcgcagcacctggtagcccagatcggtggagttggtcagatcctccgggccgtacagcccctcgcggatgcccacctggatggatttggaggtgtccaccagcccctccttcgccgcgtgatagaagggggtgccgtggttgtacggcttgccgaagtactcgtgaatggtgtcgtagtgggcgtcaaagtggatcagcgccacagggccgtttaccttggcgcaggcccgcagctcgggcagggtgacgctgtggtcgccgcccatggccactggcacaatccccttctcaaagaagggcagcattccctctgtgatgagctcaaaggactcctcgatatagccgggcacagaccccagatcgccgtaatccacaccggagcaccagtcaaaaatacccacattcagcgggccgttaaagggcttggccgccagggcggaggcgtcgcggatcgcggcaggccccaggcgcgtgcccacccggaaggaggcgcaggtgtcgtaggggatgccgaccacggcaaagtcgatgtcgtcggtggtgaccacgtgctccatgcgcatgaaggtctttacaccggcaaaccggggagacttcaaggaattctttgctttgtacttaatcatagccctttgctccttcttcaattgagatcgtgcgaggcccgccgggagcgccctccgcgcggaaactggactgcggcacccgttccgctccgtggggcgctcctgcggccctcttccccctgtatgccccattctatacccttgtgttacacaaaagtcaacccctgtttttctttcttataaaaaagcgtctgagacggcagtagggcggcggaagttccgccgccctactgccgtttaatagagctcagtatagattttcagcacccgcgccgcatccagagggacgaagttgttgcccatcagccggccctgggtctccatcacgctcctggtgaactcctccagatccgcctccgtcaccccgtaggcgtgcagcggcttcttgggcagaatctggttcaggaggtcctccagccggtcatatacctccggaaccccgcagcccagcagctccgccagatagcggttcatcaccgcaagctcgccgtcctgcttgatctccatgtagttcttcaacacgccggtaaacatcgcgtagttgctctccccgtggggcacgtggtattttccccccagcgggtagctcatggcgtgcaccgccgcgcacccagccgtaccgaatgcaaagcccgcatagttcgacgcaatcaggaagtcctccagcaggggcaggcgggcctcccgcccctcccgggcgatcgtctgatatccccggatgagcatctcaatggccttatacccgaacagcttggtatacggcgtcgccttcggcgacaggctggactccaccgcgtgcaccagcgcgtcgatcgagctcgtcgcaaataccccgaagggcagcccctccaggagctgcgggatgagcaccgccgcgtccgcatacatggccggccccaccagccccatcttcgtccccaggcgggtccggttcagaattgagatgttggtcacctcgctgcccgtgccgcaggtggtggggatgaggaccagctcccgccgcttgggcagctccggcgccatgccgtacagctcgtcaatgctctccccgccgcccaccgccagcaccttggcgatgtcgatgaccgtgccgccgccgatggccacaacccggttgcagcccgtggcggccgcatcacgcaggatggcctccgccatcacgtcggtgggctcacccatgccgtactgctcctggtacagcacggcacactccaggttcatcgccccgaagtagggctggtagatgtactcgttggtcaggatcaggtcggacgcacccagccggaattcctccacgaactccttgcagctcgaaaagcggtgcagctccggcttccatatgatttctttcatggcatatttccccttttcatatccagctgcctttactttcgctttttctgctccgcgctctcccggatataggccacagcctttggatcatccgtaaacttacatgcttccgtttccgctgtggtgatgtcgatgaccactggcccttccagctccagtgccgtcttcagctcttcccgaagggtcctggggtcccgaatggatatgcctttacaattgagccccctagctaccgcggcgtagtcgatggtttcggtgtccacctcggtaaagcggccgtcccacatggccgcctcgtaccacttaatccaacccaggatgctgttgttgagaaccaccaccttgacatccatgttttgctcatggagcactgccatttctcctaagcagtagttcagccctccgtcaccggtgagcaccaccaccttgttccccggccgcgccgccgctgcgccgatgccggcaggaagtccatagcccaggccgccggcgccccggggaagaatggtacgacgggcaccatatacgtcaaagaagctgcccgcccagccgcaggagaaactggcgtcgcaggccaggattgtatcgtcgccgcacaattcattcaataaggagacgaccctctgcggagtaatacaatcatcagcctccaccgccggccggtttttttcccgccaagcgcggtacaacttcgcgatttctttttctacagcagtgggatctctctgcgcatccagccgatccagcagaagctgcagggtggccttggcatcgcctaccagccctacatctgtagtatgcagtttattcatttcagtctcgtcaatgtcaatgcggatctccttctggcccttcctgggaattgtccagccataggtggagttttgactgaacttaaagccgatggcgagaatcacgtcggcctcctccaccatttttctggagacatcattgccgcccagacttcctaccacacccagggacagtgggtggttctcaggcagcacaccttttccggtcagggaggcggctgcgggcatagccatgcgctctgccagcgccgtgatctccgctctggcgccggaacgccaagcaccgccgcccagcagcataaccggcctcttggcctccttcagtacctggatcgcctcgtcgatttcgtcgcgggacggggtaggacggtgggcgggcaggctggccagttttcggttgctctcatagtccggcccggtatattcctcccggaagggccgccatggacactcgataaatacgggtccgggacggccactgaccgccatctgggcggcagtctgcaccaactccggcattttgttcacatggggcaggcacgcctgccacttggtcactggcttgagcacctccttggagtctaccacttgggagcccgtaccgcggtaccgggcggccagccaatccccctccatctcagaaccgatggcgatgacggggatggaggtgttgtacgcctccgccaagcccgaaataaacttgatggcaccgcagccggcggtggcgtcgcatactccgataccgccgctgatacgggcgtaggcgtccgcggcaaaggtggcatcaatctcatccttcatgagaatatgcctgatacggttcccctcatccaaaattccgtagtagagcggcaaagtctgcccgccgggcacaccaaataccgccgtcacaccatagtcggccagcaggccggccattacatttcctccatgctttttcatccgcttgtccatacctttctgatttagacttagtaaatggttctatcagacacgtttgcctgcggcaattgcagccttcatctcttttctggcctctttataaagctggtagctgtcggagcgctcaccggacctggtagtgaccagcgtgacaatgatctgggtcgccagtgcgacaataccgccggcataggtaatctgaataccgaatggactcgtaccgaagacgtagccgtagacgatccagacaacacatacgatgatacccaacaccatgctgtagaaaatggacttctcgttaggccgcttccagagcagaaacagggtaaaggtcaaaccgcataccgcgcgcactgtcagcgcgttggacaggatgtccaccacatcgctggagagcaggccgagcaactggaacaggattccgaataccacaatgagcagcttggtcagaaacattttctgcttctcactcatagggctcttacgcaggggagtatagagctccattgcagtactggacattaccatgatgtaggtcggcgccgtagacatactggccgccagcacgccgcaactggccagcgccgccatggcgggaccgtaatgaccggcaatggtgtaccaggcagtccccggatccatgtcgggccacaggaacttgccacagcaggcagctatgatgaccaatccaaaaaagaaaattgcaaaaataggcatgatggattgagccttctgtgcggtcttggcgtccttggcgccgatcgccgcagagatggacaatgcatttacaaccgtaacaaagggctgaatggcaagcgtaccgatgatgtaggaattgcttctggagcctccaatgagcttaaaggtaccctggggctccagcgcacggtaaacttgtccgaagtcccatcccacagaggtcattaccgcaataaaaattgccacaacggacacgctaagtacaaccacatgcaccatattgatgcgggccagacccttcatgccgccctgaagtgccagcaggatcatggccgcaatggtgacggtcatggtaacctcgctgcggatgcccagcagggactgaagcagattggagacgatgaccgtctgtgcgctgaccgcactggcaaaagatacgaagatcatgactgacacacagacggatacccgcttgctgaacagctttccaaagatttcccccaaggaggaacagccatatttatagcagatggagcgataaatggggatataggcacaggtcagcgcccagccgatgatatagccgtagaaggtccactgataggcgatatcatgctcaataactgcagatgagttgccaataatgtagctggaactgatcaggttgccgcacatcagcgagaaagccataaacaaccccatgctgtttttaccggtagagtactccactgcggtttcattcagttttctttttttggttctgtagtccagaaaaaaggccatgcccacgcaaaacaggaagtaccctaccaccagtatgattgtcaacatgttttccacctcacaaaaacgtcttttgctctcttttccattgctctgccgcctgttttagcctccttttcttttattctccttcgctttatgcgatataaccacccagcacatccacgcaggagccggatacatagctggcctgctctgatgccagaaatgaaattacggaggctacttctgacggctctccaatacgccccagaggtatctgactgcagatttcgttctggactttctgcggcagcaccctcgtaagttccgtattaatgcggccgggcgatacgcagtttacagtgatattgtacggccccagtgtctttgccaaacttagagtcatcccaacgattcccgccttggtagcggcgtagtgcgctccggacttatttgccccaaaacgtcccgccattgaggccagactgataatgcgtccccagcgtttttctttcatctgcgccgcagcctcctgtgcacagagaaatgcccccattaggtttacccgcagaacctgttcaagctgctccagcgggatatcttcaaatggaactttgggggagatcgctgcattattaattaaaatatccacgcttcccaaccgctctgcagccgtccgaaagaggtgcttgatctcctccggcacccccacatccgcatgaatatagattccagttccccccctctcacagatttcctccactgtttcttttccgcggctgtcattgatgtcacttacacagaccacggcaccctcctgggctaagaccagagcagtttcccggccgataccctgaccagccccagtaactaccgctctctttcccttgattcccaactccattttctgcctttcctttcctcatactttgttgcctattaacctgctgtacgctggcagctctccgaggtccctcagacgctattatcaaaagcaattttaattccatatcgctgcaaatgaatcctttttaaactttttttattttttagccaaaatactttgcagatatttggagtaatctcacaaatttgttttatccttttcttctcatacatctgtttgtatctcatatctggatatcttaaatcattttaataatgtccaaattgcattgacgggccatgctctgtctgttatccttttaagaggcaatgtttcacccatgcgcttcaaggagggacaccctatggccaaacaaactcttggtgtttttacggaaaacgagctggaccgtaactatatgtgtaaaattctctcacaggttttttcctcgtctctggatattgtccctgttacccttgccaccgtacacacgcttgcggcagaacccgccgctattttggtcaatattacctcccttgcgtacgccgacaaatattttccaaacagccaaatcatatttgcccggcgttttttggacagcaatcacttacatcggcttttggaactgcccgaaggtacgccagtgctggttgcaaacaagcccagacggattgcggaggatttggtagaaaacctgcaacagctcgggatcaatcatctgaactatatcccttattggcccggctgtgacatagacactactccctatgacaccgttgtttatgccggttttcgcagctattgtccagaaaacaaaaaggtctacatcaacctgggataccgaaatatcactccctctactcttgctgaaattgtcaaaatatataatctgccgcctgactttttgaaccagttccatataccggtgatgcagcaactggtatctgagctgtaccaccgacaggatatccacacccagaaccaactactcaaaagccagttatcccagacactcgctcttacaggcactgctctgttccacctggatgagaaccaacagatcgtggagctgaacgaggccgccgcccgtctcctgcccgccggacagaagggattgcctggccacccgcttctcccgtgttttccagagttggcccacctcgccgcctccctgtccgaaggtcgtgaggaaaaggaagtcgtatatttagggaaaaagccctatacactgcacctccacttcgagtcccccctccagcaccgccactgtttcatcctgctcaccccaatcgccgcgtcctcctccgaaaaacggtgctctcatggtgtaaaaaagaactccttgccagccaagtaccacttttcagacattttaggacactcccccgctgttcaaaaggcaattcgcctggcacagtactattctggtacagatgagaccatcctcatctttggggagagcggcacaggcaaggagttgtttgcccagtccatccacaatgcctcgcgtcgccgtcaaagcccctttgtggccgtaaactgtgccgccattccagataccctaattgaaagcgaactttttggttatgaagagggggcttttactggggcacgcaaagggggaaagcagggcctctttcaaaccgccgataacggcaccatttttcttgatgaaattggcgacattcccctctctcttcaaagtcgccttctacgggttctggaagagcgggaagtgatgccggttggctccaccagtgtgatccctattgacgtacgggttatctgcgcaaccaaccggaatttgaacgagatggtccggcagggtaccttccgtgaggatctctattatcgactcaagatcctgcccctagttatccctccgctccgcgaacgcgtggaggatatcccggaacttctccattccatggccgagggtgcgcgacttccagcacaattagagcacagacttttacattatacatggcccgggaacgtccgcgagctgcgggctttttctagtaacctgactattttttatcagcaggatattgcccctgatcagcagcaatcgcttttaaatgatttaattcgcaacttttttggccaccgaatttctgcgttcaccgactgttctgaaccactgtcccaggaagaccgcctccttttgaactccattcaggagcttaccgccgccgggcgccctgcaggccgcggttccctgcttcgcctttcgcctttgttggcggcgggttttaccgaggccaagctgaaattaagaattcgccgactggcggagtccggctacatatcagtagggaaaacccggcagggactccgccttaccctattgggcaccgaagcactcgcacagggtgaagtatagcaggcctctccggtccactgtaaaaaccgtctgtctcaacggcaggaaaaagcctgtagtcgtttgactacaggctttttccttttatccttttttttccccttgggtcagtttatctccggcactgtccacgccggactccagcgctgcaatagccttggacagccatgcaggcaaaggggctcccagccgcccggcattttccacgatactccccagctcggtcaggatataccagaccagcaccagcaccgtgagaaataccgtataatcgaagggcagggtcagggcgggaatatgatccaggatcaagcccagcaccccgtccaagatggcggccaccaggacggcggccatggctcccaccttgtgccagaggccctcccgggccgccttgcaggaccacttccccgccttgagggcggcggcggtgccggtggcgtagtccagcagcatacaggccacccacgccaccaccagccagccgaaccatccccacagggcggtcaggcagcccaggacagcggccacggcggccttgaagccgttgatgtggtccatcaggccccgcccccgtccagcaggcccaggttgcggagcatctgaaggttaaccaggttgtcgtcggtcaggcggagtccgccgccctggtctccccgcagcactccctcgtcaacggccttctgcaccgtctccctggcccacgcggggcagttctccacactggtgtagaccggcggccgggcggccgtcacggtcgcgtcgatcatggcctgaatgtcctctttcgtcatgtcggtgtcctcctctcgatatgggggcatggcgggcgggtagtcccccgcccggatcatactgctggtgtattttccgccgtcgctccactggagatggggccggtcagggaagctcttccaccggccgccccactcaaagcccacctgctcccccagctctccggcccgctgaaagaatgtggaatccgaatactcctgtcccttgatgttctggcagaagtcgaaggccagccccgcctgctccccgtgaaagctgggtacaggcgtggcggccgtgccgttttcaaaacagtattgctggtactcctcatcccgcacggttccggtgaccagcaccagaagccccgccgcgcggcacagctccagccaggcgcggcagttggccgccacatcggggcgcagccggtcaatgtcccggctattcagcattgctgttccctccgttcgctcgctccatggctctcatcctttctcctgtggttcaaaagggggcggcaaatccgcccccttcatcttatgcctgcacttcctcccactgccacatgccgggggtgtcggggggccaggtgcaggggatcatgtccccgccctcggccacccggtagaccttgtcgttgtagcggtagcacttgcccgcatggcaatccatgccgtacacccaggggatggggtcgtccgccgtaccggcgtgctcccggtcgatgggccggtagacggccagcatcccctcgtcgtggggggcctggtgggcctggggtgtcaccgcctgcaccacccggtagagctggccgccgtcgttgaggacccgcccctcaggcagctcctcgccgtctgccagtaccgccgcccaggtgggaaacagatcggacatgtccagggcatagctgtccgggatggctgtgctggtggccgcataggacagcatggctgtgcggaactggggcgtcaggtccggctccggctccggcttgggcggctgctcccggggcgtcaggcccaccagcttgccgtcctgtatgtccaggtcgcagtagcccgcacagtcccaggccgtctgctccagctccggcggtacggcaagccacccctccagccagcactccgtccggtggctctggctctgcaggccgtggccgccgtcctcccgggccttaatctcgatgattgtcagcatgcaattccctcctgatccattcaaacagtttgagcagcaggcggcccagcctctgccgccttccctccttttccctgccccggctgggcaggcgttccacccatgcctccagagcggccagcagcctgccgctcccccagcgcccgccctccgtccggcgcaggccctctcccagctccgccgtgcgggcctccccgccccgcaccagccgcaccaccagccccctcagggtgagcttccgcg

SEQ ID NO: 4252 - DNA, 18876 bp, Unknown
  gut microbiota DNA sequence
gcgcctcctccggcggctccaactggttgaagtgggccatcagccgctcctccagctcctccagcccacgcacctccgccctggttcccaccgccagcgttcccagccgctccagcccgcaccggatggagcggagcaccgaggcgtggtctacccgcagcagccttccgatctcccgcaggctcagccactccccatagtatagatagagatagagctgctgccgcggcgtcagcagggagagcaccgcctccagcacccggccgtccgccagatccaccaccagcggccccggcccctgctgggcctggagtacctcatacagcgcctttgcctccttggcaatctttgtacggccccggcccacggtgcggctcactgtcccccggtggcgccccgcctcccgggccacctgggcggcctttttccctccctctacctgggccagatactccccctgcttgtccgtcaccgcccgctcccgggccagccggacggccaggcgcatgcggtccagctccgtggggccgtcctgctccccggcgccctccagctcggcccaggtctgatactgaaacctgtcccactgccatccgtccacccccgcccaagtggtgcggcagcgtaccttgtggcttggcatcagctccttcagccgccgggcgcagtccaccagctcctcctttacccgggccagctccagccgcagggggcgcgcacccggccccgcagcccccgccagggccttctccagctcctcccggcgctcccgcagcgccttggcccgggcacgcacctcctgggcctcagtcatcctccacaccccctcactgcttcgtgctgtccacccggggcgcgtagatctgggacatgctgtaggtcccgtcccggggcctggtataatacccctcggccagttggcgcaaatcccgcatctccttcagcatctgccggagcagcttggccctcccctccagcgcccgccgccgaccgtcctcggcggtctccaactccgccctgacctcctccaaccccatccgcagccgcaccgccgcgtccatgtagccgtctgccagctctgccagtctggccacgcctgtccccccctctctatgcggcatcctacatccgcttcgccggctctgccaccgcctccccggatcggaccccccgtccctgggtgggatcggcggttttgagggacactcccgtacaccgggacaaaaaaatcagcctcccggctgaatcggaggctgatcaaagcatattttaccggaacagggccggcccaatgggccggccctgttccggtgtgtgtgtaaacagagaggtaagagagatgagaggaggttgatgtcacttcttcctgacgctgttgatcttacgccgatttttccctggattggtgaacggactatgaacgatccataaaggtatccttaagaatatgatcttccacagaagaaagcgccaaaaagaagacacatgtcctttttttagaggcagtggcttgttataatgggggcagaattggaacgggaggtgcggccctatgaccatacgggagctgcttgcggaggagtctcccacgctgcgccggcggctggcatcccttttttccggcctgccggatgaaacaccggccagtccgctctcctgcgccgccggagaggtggtggtgcggcaggacgccccctgccgctgcgtctatgtgctggtggagggccgggccgacgcctccgggctccagcccggaggcccctcccacacctactccgagttcggccccctcaccctcttcggggagtacgaggccctgtgcggggcaaattgctttctggccgaggtgcgtgccagaaccgcctgccggttttgggtgctcgcccgggaggactacttctcctggttcttctccggccgggacaccaccctctcccgggtacgggaggtggtgcgcagcctgtgggagcaggcccgccgggagcggggttacctgtctctggacagcgacagccgccttctctccttcctggtctcctggtatgaggccaacgccggaggcgggacggcctgcatccccatgactcgcccggccatcggtgacgagaccggggtctgctcccgcacggtcaaccgcggggtgcgcgccctccgggagcggggatttctcgatatccagagcggaaaaattcagctcagccacacccaatacctccggctccgcgcggagctggagcggcgcctggccgacggccgggccatacactgatggagggattttcatgtttcattctgacagcgcctttgccaccctgacctcgcaggcccttacccacgagcagaagctgatgaacctggccaaggaggcggaaaatgctttcgacgtgctggacatcccgccccgcacccgccatttctttgagaccggcgccatcaacgacctctttgaggggcacgccccctaccgcccccggtacatcctgcccgactacggagcgtttgtccgccagggcagcgccttcctccgcctgccgccgccccaggatctggacgagctgctcttttccctgatgacgctctaccgccatgtgccgtccatcaccaacttcccggtgtacctgggcaatctggacaccctcatcgaccccttcctggacggctggagcgacgaggaggcgcgcaggaagctgcgcctcttcctcaactatctggaccgcaccatcaccgactccttctgccacgccaacctgggcccggcggccacccgggcgggccgcctgctgctggaggtgctctccgaggtgcagaacaccgtccccaacttcacgctgaagtacgaccccaaggtcacccccgacgacttcgcggaggcggccatccgctgttccctggcctgctccaacccggccctgtgcagccatcccgccaaccgggacacctttgacgactacggcgtgtccagctgctacaacatcctgcccatccggggcggcgcctacaccctcacccgggtcaccctcacccgcctggtggacgacgcccggggtgtggagcactttgtggaggagctgctcccggagtgtctgcgcctgacggccgactacatgaacgagcgcatccgcttcctggtggagcagtccggcttcttcccctccagcttcctggtccaggagggccttatctccgccgaccgctttctgcccatgttcggcgtcaccggtctggccgaggcggtcaaccacctgctccgggacaaggggctggtgtacggccgcgacggggaggccgacgcgctgggcgtgcgcatcatggagaagatcgacgccgtggtgaagaccctccccgccgcccactcccccctgaccgggaaccacttcctgctccacgcccaggtgggcctggactccgacgtgggcatcacctccggcgtgcgtatccccgtggggagtgagccggagtcctttgccgaccacctgcgccactgcgcccggttccacccctatttccccgcgggggtgggggacatcttccccatcgcctccaatgtggagcagaaccccgccgccctgctggacgtggtgaagggggccttcgcccttggggtacactacatgagcttctattccgcggacaccgacctggtgcgcatcaccggctatctggtcaagcgcagcgagatggagaagttccgctcccaccaggtggtgctccagaacaccacccacctgggcacggccaactacgacgtcaaccgcctggcccagcgaaaggtgcggatggtatgagcgccgccgcgccagtcaaccggattctccccctctccaccgtggacggccccggctgccgcgcggccgtctttctccagggctgcaacctggcctgcgcctactgccacaacccggagacccagaacctgtgcaccgggtgcggcgcctgcgtgcccgcctgcccggcgggggccctgtccctggagagcggccgggtgcgctgggtggcggagcgctgcgccgggtgcgatgcctgcatccgcctgtgcccccggttcgcctcccccaaggtcaccgtcatgaccgcttcggaggtgctctccgcccttgcccccagccggccctttatccgcggcctcaccgtctccggcggggagtgtaccctctacccggactttctcaccgagctgttcaccctggcccgggccggcggcctgggctgcctgctggacagcaacggcatggttcccctggcccccctggccgggctgatggcggtgtgcgacggggtgatgctggacgtgaaggcatgggagcccgccgtccaccgggccctgaccggggcggacaacgccccggtgaaggagaatctggcctttctgtccgcctgcggcaagctggcggaagtgcgggtggtgtgcgctccggacgcggtggatgtggaggccgtgctggacggagtggccgccgcgctgggccccagggccccctccacccccgtcaagctgatcaccttccgccctaacggggtgcgcggcgctctggccggccgcccctcccccacgccggagcagatgactgcctggcgggcgtacgccctgagcgccggactgggcgccgtcctcctgcgctgaccgtgcccccgccctccccggcgggggcttttcattctgcggccaacgttgcgcgccggggggcaatgtggtagaataaatcagatatatctcccttttcgggtgaactggatgggaaatcagtctttagggggggcgcggggatgcaccgacgcaaaagctttctgttccgcctgtttgcgctgctgtttgccctgctgctgctgatcaccgcctccgtggagctggctctttaccactacgcccgccaggtggtggggcaggagtacatccgcctcaaccaggcgggcctgcggcagatcagctacacccttggccagggcatgaccgatacccagaccctggccaagcgcatcgctgagagcacacagctcattgaactgctctccggccccgccggagagcgggcggacgaggccgcccacgatctgctctacagcctgagcagcgactatgtgtggcagcggggcatcaaaatgctgatggactcctatgtggtgggcttcaacggcgtgaccgctgccacttacagctccaggcagttcaactatgacgccgtcctggccgacccccggtatgagcccctgttcagcggaacccaggacgccctgctgctgcccaccaccacccatccggaggccacaggcatctttgtccactccttccagtacgcccagcttatccgggaccacctgactcaggagccgcttggggtggtcatcctcaacatcagcgaggtcagcctgtactcccaatatctgcggcaccagagcgccgacaaccgattttttctgaccgacgggtcgggcaccattgtctcagcccgggacaagcagctcattggttccatctatgcctataccccggaggaactggacgccctggcggcggagacgtccctctcccgccgcattgacggcgggcagatccgcctgtatgaacgcataccggggacggactggtatctggtggaggagatgagtgcctcggcggccttcggcacgctgaatctggtacgcaatggcgctttcctggccaccggcctgtgcgccgccctgattctggcggtgcttctctacgcctaccggcagattctccgccccatcacccagctccaggccagcctgggccgggtcatggagggccgcctggacgagcgcatcgacgtgcgccgaaaggacgaattcggtcgtatccaggaggccttcaacggtatggtggagcagatctccacccttctggagtcggtcaaacgggaggagcgggagaagcatctggcggagctggattttctccaggcccagatcaacccccacttcatctacaataccctcagttccatccgcttcctgctggagatggacaaggtacaggaggcgggggagatggtgttctacttctccaagctgctgcgccagactctctcccgctcggtggagttcatccccctgggggaggagctggacacgctgaagtgctatgtggagctccagcacctgcgctatcccgatacctttgactactcctgcgaggtggatgaggccctgcgggacaacacgctgcccaagctgctgcttcagccggtagtggagaattccatcttccacggcgtgggccggcacaaaatccacatccgcctgcggggctggctggagggggacaccctgatcctccgggtggaggacgatggagtgggcatttccaaagacaagatcgaccaggtgatgaacaaggacttgcagattaaccgggtggggctgaagaatgtgcaggagcgcatccgcctcaactacggccccggctacgggctgacggtcaccggcggcccggcgggcggcacggtggtcaccttccgcctgccccgcacccgatagagaaaggaggagctccatgcttcatattatggtagtggacgacgaggcccccatccgggactggctggtgtactgcatccagaagtgtgaggcggccagctccgtcacctccgcggtcaacggagaggaggcctaccgcaggattttggagcagaagcccaacgtggtctttaccgacatccgcatgccgggaatggacgggctggagctgatgagtaaagtccgggatatcctcccctttacagtgttcatcatcctgaccaactacgccgagttctcctacgccaagcaggccatctccctgggcgcccgggagtacatcctcaagtcggagatgcgctcctccgacattcagcgcatcgtagcggagattgcggccactacggctaagatccgctcggaaaaggtgcatgatgtcctccaggacggggtggtggacctctacgagatgtaccgcaatttcgaacagcccggcgctgtggccgccttctggcagcggcaggggctgcggcccggccagccctatctggccttttgcgtggccaacgacagcagcctggacctgcggcggcagatggtggccctggcctccgcctcccgcgcccccttctctgcggccgccatggtgcaggagcacctctacctgctcctccagtgcccggaggcggaggccctgcggggctatgccctggacacggaggccgccctgggggagtgccgcctgcccgccggcgtgtccgccctgtgcaccgacatcggccagctcatccgtgtgctgggggaggcggcatcggctcaagaggcctgcttcttcaccggcggaggggtggtgccctactccgccatttgcggcctgccccccattgaccgggaggccgcccacgccagaaagcaggaggtgctgcgcctcctggcccgccgccaggtggaggaggcccgcggggcgctccgggcctggttcgccctgttcggcatggtgggagccgatgacgtgcgctgggcggtggacacggtcaaccgcatggtgatctccatggaggactggtactatcagttcgtcacgccccccgccgacggctgggagccgccccagtcctttaccgcctgccgcagccgctgctcggccatgctggagcaggtgctccgggaacggcgcagccgccactcccggcccattgagaccgccctgagctatatccacgcccactacgcccagcccatctccatggcggaggtggccgcccagctctaccgctcgccggagcacttttcccgccagttcaaggaggaggtgggggagaacttcagctcctacctcacccgctaccggctggagcgggcccaggagctgctccagaccaccgatctgcccgtcgccagcgtggcggtacagacgggctataccacccccggatacttttcccggctttacaaaaagtataaaggcgtgtccccggaggcggagcgccgggggtcaaaatcgtgacaaaaaaatcaaaattgtgacatttcccgccccgtgcggaaaaagatatcatattcgtcccaaaaacggtcaagcctatggctcgaccgtttttgttttctttgttaaactcaacttgtaagcttgggccgggcacgcccaaagtgtccctgctgtgccgaatgaattgaaggaggaaccctgtcatgaacgcaaagaaactgctcgcgctctctctggcctgtaccctcaccctcggcctgtccgcctgcggcggcggccaggacgccccatcttccggctcccccagcggcgcctctgacggcgacgccctgaaggtgggcatcatcctgtccaccggcggcctgggcgacaagaacttcaacgatatgacctacgccggcgcccagcaggcggaaaaagacttcggcatcgagtttgactatgtggaaacccagagcgccagcgacttcctgcccaactaccgcatgttcgccgagagcggcgagtacgacctgatcatcggcctggcggccgaccagaccgaggccatcaacgagatctccatcgacttccccgagcagaagatctcccacatcgactcctccaccgacctgcccaacgtcagcgccgtctataccaagtggcaggagcagaccttcctgaccggcgtggtggccggcctgggcaccctgtccggcatggacaaggccaacagcgaaaacgtggtgggcgtcatcctgggccaggatcagcccaccctgcgcatgggcgtagtgggctttgaggccggcgtgcgctacgtcaaccccgactgcgaggtgctggaggccgtcgtgggcgacttcaacgaccccgccaaagccaaggagatcgccctgtccatgtacaaccgcggcgcggacttcgtccagcacatcgccggcgcctccggcatgggcgtcttcaccgccgccaaggaggccgaccgctatgccttcggcgtgggcggcaaccagaactacatcgagcccgactacatcgtggccaccgccctgcgcgacgtgaacaccatcgtctacaacgagatcaaggccctggtggagggcacctgggagcccggcgtgcacatcagcggcattgccgagggctccgtaggctttgacaacaccgactccaacgtggttctgcccgacgacatcgccgccgccgtggaggacatcaaggccaagatcaccgccggcgagctggtgccctgcgagaccgccgaggagctggacgcctgggtggccgccaaccagtaccagcccgcggagtaagcgggacaccccggccccagcggccgataatctgccgggaggcgatgacgtttgaacgcagttgaaatgcgcgggattgtcaagcagtatcccctcgtccgcgcgattgacggcgccgacttcaccgtcgagcagggagagatccactccctgctcggcgagaacggcgccggcaagtccaccctcatgaaaattctgtacggcatgaccacccccaccgccggagaggtgcgcgtcttcggcaagccggtcgccatcacccgccccgcccaggccatcgccctgggcatcggcatggtgcaccagcacttcatgctcaccccggtcatgaccgtggcggaaaacgtggtcatcggcagcgagccggtgcgcggcgttttctttgaccggaagaaggcggaggcccaggtggccgccatgatcgacgagtataacttccacatctccgccaccgccaaggtggagaccctctccgtgggcgagcagcagcgggtggagatcctgaaggccctctaccggggggccgatctgctgatcctggacgagcccaccgcggtgctcaccccccaggaggtggaggatctcttccgggtcatgcggcagctcaaggccgcgggcaagagcatcattatcatcacccacaagctcaaggagaccatggagatcgccgaccgggtgtcggtgctgcgccagggcaaaatgatcgagagcggcgtccccgtggcgggaaccaacatgaacgagctggcacagatgatggtgggccgcgacgtggagctctccgtcacccgccgggccgagcaggtgggcgaggaaaacttttccgtgcgcggcctctccctcaccgagcggggcgtgcccctcctgcgcgacgtgtgcctctccctgcgcaagggggagattctgggcatcgccggcatcgagggcaacggccagaccgagctcatcgaggtactcacaggcctgcgccgccccgaccatatggagctgttcaaggacggcaagcccctcagcggcaacgccgccgccttcctggccgccggcgtgggccatgtgcccgaggaccgcatgacccgcggcctggtgctggagatgagcatcgaggacaacctgattctgggctaccaccgccgccccgccttcgcccgccgcggcctgcggctggcctccgccatccgcagatttgccgagcaggagcgcaccgagtttgccatcaaggcccccaacgtgcaggagcggtgcagcgccctctccggcggcaaccagcagaaggtggtcatcgcccgggtgttcagcgaaaaccccgacgtcatcatcgtggcccagcccacccgtggcgtggacgtgggcgccatggagtacattcaccaccgcctgttggatctgcgggacggcggcaagtccattctgctcatctccgccgatctggacgaggtgcgcagcctgtccgaccgtctggcggtcatctacggcggccggatcgtggccgagggcaagccggacacctggagcgacatggagatcggcctgctgatgaccggcggcagccttgcgccggaaaaggagggaaccgcatgaaaaagcgtgctctgagcggtctgctcaagctggacggcccgctgctgtccattctctccctgcttatcgccattgtcatcagcggcgtcatcatggcggtgtgcggctacaaccccattgaggccttcggcgccatcctggccggctccttcggcagccagcgcgccattgtccagaccctgacccaggccacccctctgattttcaccggcctagccttcgccttcgccaagaaggccagcctcatcaacctgggtgccgagggccagctctacatgggcgccctggcctccgctgcggtgggcatgctggatctgggcctgcccatggcgctccacctgcccctggcggtggcggccggcatggccgccggcggcctctacgccggcctggtgggcgtgctcaaggtcaagttcggctccaacgaggtcatcgccaccgtcatgctcaactccatcgccacctatctggtggactacctgctcaacgggcccatgctggcggagaacagctcggtggcccagacggagcgggtgctggagacggcgcagctcccccgcatcttccagcagtaccagctcaccatcgccatccttctggcggtggccgcctgtatcctggtcaagctgttcatggaccgcaccgccctgggctatgagatccgcgcggtgggcctcaacccggacgcggcggagaccgccggcatcagcaaggccaaggtcaccatcgtggccctgtgcatcagcggctgcatcgcgggcctggccggcgccagccatgtgctgggcgtggaccgccgcctgatcaacggcttctccaacgactacggcttctccggcatctccgtggccgccctggcggcggacagccccgtgggcgttatcttcgccggcatcgtgttcggcgcgctgcgggcgggcaccatggagctcaaccgcaccaccagcattccggtggagttcgtcaacgtcatccaggccatggtggtcattctggtggccgccccgctgctggtgaaggagctcaagcggctcaaccccgcgggctggtcccgcaagaccaagaaggaggtggcctgacatgggcgtgattctcaacaacctgattcccatcatcggctcctccatcgccatgtccatccccctggtgctggcctcggtgggcggcgccttctcggtgcgcagcggcatcatggccctgggcctggagagcatgatgatgatgggcgccttcttcggcgttctcggctcctacttcaccgggagcgtgctcttcggcttcctgctgggcatggtgggcggcatggtcatcggcctgttccacggcatcctgtccgtgcgctacaaggtcaaccaggtcatcagcggcatcggactgaacctgctggctctggccgtcaccaccctgctgatgcagctcatctggagtaacaagggctccaccccccaggtggcctccatctccaccaccctggacttctttgcccccatccccgtcatcggccccattctggcccagcagtccgtcagcttccttgtgatggtcgctgtggtcatcgtgggttggattgtcctcttcaaaacccgcttcggcctgcgcctgcgcatggtgggcgagaacccaaaggccgcggccaccatgggcctgcgggttcacggcatcaagtactgcggcgtgctcatctgcggcgctctggccggcgtgggcggcgcctacctgtccctggatcagttggacatgttcgtgcgcaacatgaccgccggccgcggctacatcgcggtggccatcgccatcctgggccggtacaaccccgcgcagatcgtgccctgcgccctgctgttcggcttctgtgacgcggtgcagatctaccttcagggcgaggccttcccgccccagatcgtgcagatgctcccctacattgtgaccctgctggtgctggccttcggtgtcaagcacatcaagcccccggccggtgtcggtaagtacgacgacgaatagaaagctgaggttgaggtattatggaacagattcagaacaaccgagtcattaccgatctctatcgggagaacgcccagttccccggcatcgcgctggatggttccgacgtctatctgtgctggcagcgctttgtggaccgccacgacagcctgatggcctcctgccgccgcggggatgaggtggtttgggagcgggagatctccgacggcggcgaggtgctccaccccgtcattctggcccacggcggcgccatctggtacgcctggagcgagtacgcccgggagaactggcgcatcctggcccgctgctatcgggacggccggtggggcgaggtgctcaccgtcgcctccggcgaggccctgttcttcccccgcctgttcacctggcagggcaagctgcacgtcatctggacggagcagcacaagggcagcgcggccgccgtgctgtgccccctgaccgaggccggccccggcgcggccgagaccgtgtccgcggtgggcgaggcctaccgggccggcgcggccgagggcggcgacggcaacctctatgtggcctacgacggctttgacggcaagcagtacaagctctttgcccgggcgcgcaccgccgcgggctggagcggggagattgtggtcagccagggcgaggactgggcctccaccccgtggatcgccgccaagcccgacggcgccgtggtgggctggtacgactacggctatatggccgtctactccgtccgctccgccgacctcaccgtccgggacggcgccctggccgcggtcaatccccagtgcctcaaggagggcgtggactggtatctggatctccacgtggcctccaacgcctccggcctccaggccatggcctacacccgcagcaagtacgacgtgctggtgtgcacccgccggggcagcgagccctggagccgtccggtgctgatgtcctacggcgacggccactgcggcgtccaccccaagctgctggtggacgaggacgacaccatccatctgatgtggcagttcggcttcaagaacggccacatggagcgcaacgcccaggtgatctacaaccacctcacccccgccgagctggcccagcagcccgactatgtggcgccccccagcgacttcacccagcccatccccgccaacgccgacaagcgcctggacgagcaccccgccgacgtggtgcgcgcctggctggacaagaacggctacgggaacctgtccgtctacttcggcgacatccacggccagagcggcctgtccgacggcatgggcgaggtggaccagtactatcaccgggcccaggacaaggcccgtctggacttcaccgccctcaccgaccacgactgctaccccgactggacgacccagtccgagtgggagctgctgcgcaccaactgccgcctgatgaacaaggacggcgagctggcctgccttctggcctacgagtggactcccaacgagtacaagtacgactacggccacaagaacgtgtactaccggggcgacgagggcgagatcttccgctccggcgacaagggcggcatgacccccaccgacctctacaacagcatccgtgcctacaaggccctctgcatcccccaccaccccgccgcggactgggtgatggtgagcgccgccaccgactggaacttccacgatcccgaggtgcagcgcgccgtggagatctactcccgccacgcccccttcgagacctttgaggcccgctccaagttcaccaagaacatcaagaagatggagcggtgcagcgtgcaggacgccctggcccggggctaccggatgggcttcaccgccggcagcgactcccaccagaccgagcacggcgtggagggcggcattgtggccgccttcgtccccgccctcaagcgggagtacgtgtgggacgccatctatgaccgcctgacctacggcaccaccggcgcccgcattctggtctccctgaagatcaactctgcccccatgggcagcgaggtcaaggccatcggcgacgcccccgtcaccatcgagggcagcgttctgggcaccgacaccgtcaccgtggagctgctgcgggacaatcaggtcatccagacctgggcctgcgcgggcaatgcctgcgacttcaccctggaggacactgccgggagcgacgcctgctactacctgcgcgtcacccagaaggacgagcacatggcctggtccagccccatctgggtggaccgcgcctgaccccctttccagcaaacgaaaagcggaacggcatagccgttccgctttttcaatttgccgaagcagcgtttcggcaggactccggacattatgccattccggttctgcgccggcgcgttcggcggcgcggggactccggccgccgcttggggagagccgggggccgcagggccacgctcccgccgtccttggcggctgagaccaggtagccgtagacccgcagcttctgttcgtcatagaggtccagcgcctgatagagctgcttgtaggcggcgaacatggtgcgcttcatctccaccgtccgggccagggtggcctgggtggccaccaggctgcccggccgcttcacatagcagtagaccggctgggcggtggcggcgatcagccgggcccggcggatgtactccaggttgaagaggaaatcctcgcaccagctcacctccggatcgcaccgcaggcggccctcctccacaatggagcgtcggtagagcttgttccacagcacgccgtagtagaagttggccggggccttgagcatctcctccgcgaattcccggcgggtgaacaccccgtcccggcggatgtggccctggagggccttacgggtgccggccacccgccagaagcggccgatcaccagatcggccccggtggccccggcggtgcgtgccagccgctcggtggcggcggagggcaggtagtcgtccccgtccacaaactggaggtactgccccgtagcccgctccagggcggtattgcgggcggcggataccccggcgttggcctggtggagcacgtgaaagcgggagtcggcggcggcccgggcgtcacagagagcggggctggcgtcggtggagccgtcatccaccagccacacctccaggttcccccacgtctgggcggcgatggagtccaggcagttgtccagatagggctccgcgttgtagaccggcacaataatgctgatgaggggctgctccacagttcacgctccttccggccggggcgtcagcagccagcctgtcatgggagggagcgtctgctccccctgttccagggccgccccggtcatccagtcccgggcgggccagggcagatcaatgggctccggccggtcgccggcgttgacggcggccaatacgctcccctcggccccagtgcggaggaaagagagtacccgtccccgggtgagcgtccaggccagctccccccggcgcagggcgggcagcgcccggcgggccttccccagggcggtgtaccattccagcagctcgccgtcctcccttccccaggggtaggtgcggcggttgaaggggtcttcaaagccctccatccccgcctcgtctccgtaatagaccatgggggagccggggaaggcgaaaatcaccagggcccccagcttcagccgggctttccccagggcgtactggccggaggacatgcggaaggcggcccgccagtccttgtcgtggtccttgccgtcgccccccgtgcccagcagggtgaggatgcggggggtgtcgtgggtgcccaggaagttcatggccgagcgccaggcgaagggcgggtagttctcccgcagggtctccatggcctgccggaagcggaaggcgtcctcgcccagcaggaaggagagcagggcgtttcggaaggggtagttcatcagcccgtcgcagtgtccccccaggatgtgccggcggcgcacgccgtaggcgatcttgttggagccgtcctcccacacctcgccgatgattaccgcctccggcttggcctgccgggcggcggcgtggatgccgtggataaagtcgtcgggcagctcgtcggccacgtccagccgccagccgtccgccccggcggccagccagtggcagatgatgctgtccgcgccgccgaagatataccggcggtaggacggctcggcctcgttgacggcggggagggagtagattccccaccaggagtcgtatttgtccggccagtgtgagaagtggtaccaggggtaataagggctgtcctgggactggacggcccctacgctctcataggagccgtcgccgttgaaatagcggctgacaaagccctggtggttgaacacgccgtccagcaccacccgcatgcccagggcgtgggcctcggcgcacagggcgcggaagtcggcctcggtgcccagcatggggtcgatcttctcatagtccccggtgccgtagcggtggttctccggggcctcgaagatggggcagaagtagagggtatccacccccaggccccgcaggtagcccagcttctcccgcacgccggccagatcgccgccgaagaagtcccggttgcgcacctcgccgttcgagtcggggcggtaggccggctcctcctcccagccggtgtggacgctgcgccctcccaccatgccggtgggatcgggaacccgggtgcggcggaagcggtcagggaagatctgataggtgacgccctctccgaaccaggcgggcacctcctccgccccgtcgtataccgtgagctggaagggccccagctcctccctgcggccgtccaggccctccaggcggaaggagtaccacaccaggcccacatagtccccggtctccaaggttacggcaaacacatcccggtccccctccaggccccgccagggcatgggcagctcccggcgctcctcgtcccggtgctcaaagtaggcgatgagtgtggcggcagaaaatcccccggcccggggcgggcggagggccagctctacccgggtgccggagggtacggcgccataggggcgcttataccggctgtcccggctgtcaaaggtctggggatcacacacaaggaacggctcccttcagcggagcagggtgttctcggcgtccaccgattccaccgtatgctccgcgctgaaatagtagttgacaatctcgccggcggcctgggccagatttccgcccgaggcaccgccctccaccacgatggagatgacgatctccgggtcgtcatagggggcgaacagggtgaagacggcgtcggcctccttgtccgccgagcccacctgggcggagccggtcttggcgcccacctccaccgccaggttgctcaggtactggtctacggtgctcttggggtcgttggccacctcccacatgccccgcttcaccgcctccacgttggcggggtcgagagcaatgtggtttttcacctctggctgctgctcatacaccgtctccgagtagtcgctggacttgacggacttgagcaggtggggcacgaagtggttgccgccgttgagcagggtgacgatatagttggccagctgaaggggggtaacctgggtgttgtcctggccgatggctgcgttgagcaggttgccgccgtaccactccacccccagggcctcgctggtggccggtccggccacatagcccttcacctcgggcagttcgataccagtgtactctcccaggccgaacagggaagcgtactcgtcaatcttgtcaatgcccagccggtggcccatggtgtaaaagtagatgttgcaggagtcccgcagggcgtcggccagatcctcccacccgtggttgcctccgtactggcggtagatccagcactggggatggaaatcgccgtaggggtagtgctcctcctcggggagctggaggcggccggtgtcctgaattttctccgtgggcgtggtcagtccctcctccagcgcggcgatggccaccagcggcttgaaggtggaaccgggatagtaaaactcctgggtggctcggttggtaaagggcctcagcgggttatccctggcctcgtt

SEQ ID NO: 4253 - DNA, 11493 bp, Unknown
  gut microbiota DNA sequence
cttgacgctctccaccacaaccgcgccgcccccggtatcctccgactccagagtctcgatggtgttggccagaatctcctccaccttctcctggaggcggaggtccagagtgagcagaacgttgtcccccggcttggggatctgctcctctccggtctcggggtcgatgcgccagtactcgcttaccacctttccgctggtggacagctcctggatctgaacccctgactccccacgcagatactcctcaaaggcgttctccgccccgtcgatgcccaccttgtcgttcatgctgtagccctgctcccggtagtagtcccagttgctggactggatgtctcccacatggcccagcaggtgggctgcggctacagtgttgtactgacggacggtggtggtttcgatggtaacgccggtaagccggcgctctttcaccgcagagatgacatcaatattcacatcctgggcaaagatgtacgcctgctggttgatgctgtaggtgcgcagattggtctcgtagagcacaccgatcagggcccgggcgtcggcgtccgaccaggacgggtcaatctcaaagtaggtgcgcagggcggcgatcagctcctccgccgtgggcccggcggggatatcgtccagggtcttggcggcctctacctgctcggtggtgggcaggttcaggctgcttttcagctcctttttcatagggagggcgttgagcagccgtcccagccgggtcagggccacgccgcccccctccttctcgtaggccagaggggtgtcgctggtataggtgaagggggctgccgttgagacggccagagtgtcggtccaggtcaggccgttgtcccggcagatgttgagcagctccagcaggttggcgttgcgcaccgcctcctcccccatcacaccggtattcagcgtgagctggtaggtggcacggttggtcaccatgctccggccgtagcggtccagcagctccccacgggcggcctccaccgtcttccggttggcaatcttgaccacgctctgggcccggtagtcgtccacatggagcacctgcaggttgtagagcaccccaaaaaacagcagcagcagtgccgtaagcaccaccaggatggcgagggtgcggcggttgaattgtctgccctccatggcgggccccctttttcagtctatgaggccaccccgcgttcgacagcggggcggcctgtctttacagcacggtttttttcggcacccggcggaacacccacaggaacagggcgtacaccgggaacacaaagaccagggaccagagaatctcccgtccggccaggccgagcatggcggccagctccccccgcccggccagcaggcgggcggcgatgcgcaccccgtcgatgagcgccagcgccgcgaaggagcacaacaggcagcccaccaggttctggcgcagcacatactgggccagggcgccggcccccacgccgatgaggcacaaccccaccgtcatggctccgtcggtgttgaagtaggtcgcgtcgcacaggatgcccacgaacaggccgaagcccgcccccgccgtggtgccctccagcaccgccacgcacacggcagccaggggcaggagcataggggccaccccaaagaggggaaagcggttgagcacaaacagctccaggaaccatacgggcaccagagccagggcgtatacgccccatttaatgagaaaatcctgtctggtcaccggcgcttcccccctttccggccacgtcccatttattcgttgacggtaaagtcggtgatcacaaagacctgctggaggccgtccagatcggtctccggcgcaataacggcgtagcgggtcatgccggaggcgtcggtgcgcacctcctccacgtgcccggccaccagcccggcggggtataccccgccccggccggaggtggtcaccagatccccggcgatgagctcgctgttctccggcagataagtcagcttgagcctgccctcccccatgagggcaaagtctccctccaggatggccgcgccgccggttcgggcgagctggccgcccatctcggtgtccgagtcaacgagggtacgcacggtggcccagttctcccccacctccgccaccacgcccaccaggttccagtactcgtccaccacgcagtcatccacggcaatccccgcagcgctgcccttgccaatggtgagggtggactcccagttggaggtggagcgggcggtgaccatggcggcggccttgtcgcaggaccactccttgggctggagctccagcaggttgcgcaggcgctcgttctcctggagggcggcctccgcctcccgggcctgggcctccagctcggcgttgcgctgtttcagcccggccagctcctccttcatctgctccagctcgaaggcatcgttgtacttctcctccgcccagttggtcactgcggtaataccgttgcgcaccggcgtggtgacgattcccaccaggttggacagggggtcagccacaccgccgaacagcatcgacaccaccgccgtcaccagggccagcagaatggctgcgattaaaatcaggattccgttgtgccggaaaaaatccttcacgtctgtccgttccctctctctcagtcgctgtcccgctcgcccgccgccaagcgcaggcagtccacgccgagctggcgcaggatgccgcccaggcggcacacgggcaggcccatgacattgtagtaatccccctggatgccttcaatgagcagagccccaaagccctggataccgtaggcccccgccttgtccatgggctctccggtctggatgtagcaggagatctcctcctcgctcagctcccggaaggcgacggtggtctcctcgctgacggtgtgccgctcctctccccgcaggacggtgaggccggtatagacctggtggcggcagccggagagggtggagagcatcttaaaggcctccagctcatccgcgggcttgcccagcaccgccccgtccagagccaccaccgtatcggcggcgatcaccaccgcatccatgcctgcctgctcccgcacggcccgggccttctccgccgagatgcggcgcaccagctcctccgggggcagctcccgctccatgtgctcgtcaatatcgggggtgacgatgcgaaagttctttacccccatgcgctccaaaagctcccgccgccggggcgactgggaggccagaatgatctccatacttctgttcctttcctgattggccggaggggtgcggcagccgcggcgctccgcccggttccatgatctttcgcgggcgggtgtgggcgcccgcccctacacatcccggcggcctgcatcggttcgctgtgtctgcccttactttccggtggagccgaagccgccggtcccccgcccggtttcgtccaggctgtccacccgctccagctcggcctgcaccacgggcatgacggccagctgggcgatgcggtcgccgggctggacggtgtagggggtgtcggacaggttggtcagtcccacccggatctccccccggtagtcgctgtcaatgacgcccaccccgttggagagagcaattccgtgcttgatgcccaggccggagcgtgcaaacaccagggccacatactccgccgagggcagggcgatggcgatgccggtggggatgctcaccagggcgcggggggccacttccaccggttcatccacgcaggcgcacagatccatggccgccgcgccggcggtggcgtagaaggggtaggggatgtccttgccgatcttgtccgatacggccttgatcttcagcttcatggggttcactccacatctcgatagtatagcccgcgggtgtactcgttgggggcccagctcccctgctccagatagcgctgggccacctgcacgcactcccggggattttcggtggtaaagagcagccgctgggcccacaggccgatgcggcggtagtcggcggccttgtccgccaggaagagcttctgggagttgagcagctcgttgcggcagccgggggcgctcaccaccgggaagcgggcgcccttccggtcggtgaggatgttggtgttctggcagccgcaggagccggtgcggtttttgatgatacagttctccatcagcatcaggggcaggcggccgtaggtgatcagctcggtgtccaggcatttggagaggtcgcggatctgggccagcttcagctcaaaggagagggtggccgactggaggcccagccgcttgtactccttgagggcctgggcgttgtagatctccaggccgaagtccccccgcagggtgaagcccagctcccgggcgatggggaacataccaaggttgcccagcagggcgtcttttacccccaaagcgcgcacctgctccagcttttcccgcaggccggggtactcccggtcccaggccacccggggcaggctcaccccgatggaggtgtgctccgtgccggcggccttctccgggtgggcggccagctcgtccagggggacgtacaccagggcgggcctgaggcggagcagctcgtcggtgagctgttccgccctccgcacggagatggtcagcaccggctcctcccgccggttctcatagcgggcgccggcgtggtactccccggcgcggcggcggggcggctcctgcctctggacggagagcttctccagggcctcccgccgcagggcgttgagggcggccagggggagggacaggttctcctccaccagggcgcgcacctgcccgcagcggtagggggtgccgccggtgcgggagagctgggtggtaaccgcctccgccgtcagggggcgggtgcgggcggcctcgggcaccgggccctccaccgtcgccacccggccgtccggatcctccacccccacgcgggcgggctcgccggggcggagcatggcgtagaaggtgacgggcacccgctgggcctccccgctctggtaggtattgcgggcggcggcgaagagctccttcggctctctggtctcctcccgcacgccgaacatgtccggcccctgctgatccaggtagtagccctgggtgaagccctggcgggagaaggcggcccggagctgctccagctcctcctccgtcggctcccggtcctccttgatggcccgggcgtagatgccggtgaccacggccacgtactccggccgcttcatgcggccctccagcttgacgcaggccacccccatcctgcgcagctcccgcaggtgccccgccagggacagatccttgagggagagggggtaggcgtcggccttgtccatccagccgtacttgaggcggcagggctgggcgcacaggccccggttgccgctgcgcccgccgatgacggaggagaggaagcactgccccgagtagcacatgcacaaggctccgtgggcgaagacctcgatttcgatgggggcgcgctggcagatggattcaatctgatcccggctcagctcccgggagagcaccgcccgggtgagccccagatcggcggccatcttcaccccgtccagattgtggagggtcatctgggtggaggcgtggacgggcagatcgggggcgacctggcggagcatccgcagcacgcccagatcctgaatgagcaccgcgtcggcgccgatggcgctggcctgggcggccacctccgccgccttgggcagctcccggtcggtgagcagggtgttgagggtcaggtagacctttgccccccgcaggtggcaataagaaaccgccgccgcaaactcctcctccgagaaatttttcgcgttgcggcgggcgttaaagtccccgtatcccagatagacggcgtcggcgccgttctgaacagccgccgccacggcctccatggacccggcgggggcgagcaattccagcatagacggaatcctccctggcgggggcggccaaagccgcccgctccgctctcttacttcttgttctgcagcttgaagatctcccgcttggcctcggacagctccagcttcatcttggtggcctcctccaggtactccttgagctggcggcgcaggttctcggcggcctccacctccttgaagtactcgtcggcaatgttgaccgccgccaggatggccccatccaccagcgacacatgggctccgctcaaaacctcctccaccttggcgtccacgtgggcggccaccttctcggtgtagctcgcctcctcggtgcccaccagcgtatactcctgtccggcgatggtgacggtgacacggtttttcatggaaacccctcctgaccatagtgatttaggattcggacattataccaggaagcatcagcggaatggtataatgcgctctgtttttcggttgccccgcaaggggcgggaaaaacggctgaaatgcaagtgtaatagccgctttgcggctattataccatagttccgcccggatgagaaatgaaatcttcatgaattttcattttcccgcccggacggctgaatgtgccgcggctcacgacggctccgcgctttctgtcacgctctgcctgttcgcgacgcggtcactattccccgctccgccggaaatgccgccgggcttcggccggcctgttttccggcctgcgcggctcactgtgccgcggctcacgacggctccgcgcttctgtgttgtcacgctgcgcgccctccgcgacgggcaactgctcgtccctccgcaaaaaacaccttgcgcctgcggcgcaactgctttttcgcctgcgggtctcgctgtttccctgctcccgggcgctccgcgcttctgtgtaggggcggcccttgtggccgcccgcgggcgggtgtgggcacccagcctgcattttctcccttcccatatggccgcggccccgcttgcccctacgccgcacgccacgcagggggccgatatccacagtatacaccgcgcgtagttttatgctataataggcgggaaaccagagaggaacgggggattcacatggccgagctgctgctgcccggtgacattctatccatgacggcccgggcggccgaccggctgatgggcgcgggaaacggggacgcagcgctgctgtacctgtggttgctgcgccggggcggacggctggagccggaggcggcccgccgggcgctgaagtgggacgtgccccggctggaggcggccctgtccgccctggtcgggctgggcctggcggacggcacggccgcgccggaggcccccgcccggatggagccggagggcccgccggagtacaccgccgccgacatcacgcgggagctggaggacggcgcctcctccttccccggcctggtgaacgaggtgcagcggcgtctgggcaagatcctgtccacgtcggacttgaagagcctgtacaccctctacgactacctggccctgccggcggaggtgatctgcctgctggtgagctggtgcgtggaggagtttcagcggaaatacggccccggccgcaagccccgcatgagccagattcagaaggagggcttcgtgtggcggcggctgggggtggacacggcccaggccgccgaggcccacctgaagaagcaggccctctaccgcagccgggagggggagattctccgcctgctggatcagccgccccgccccctggtggagaaggagcggaagaaggtggcggcctggacggacatgggctttgccgacgaggtgctccgcctggcctacgaaaagacggtctacaaaaagcagaagatggactgggactacatgaacggcattctgtgcggctggcaccggaagaacctgcacaccctggcggaggtggaggcgggcgaccggcagcgccgcccggcggcccagcccgccatgcagggccgccccgccgcccccggcgaggccgaccagcgggtgcgggaggatttggagcggatgcgggagttcctgcgccgccagcaggagacggagggagagtaagccatgggatacgagcagagcgtcctgcgccgggccaccgcccggctggaggcccagcggaaggcccgggaggaggcgcaggagcgcctgcgctccgagatttacgccaagctgccccgggtggcggccatcgaccgggaactgcggcgcaccatcacccagatcatcgccgcctccctgcgggacggcagcgatccggtgcccgccatcggtgtaatccgggataaaaacctgagcctccaggcggagaaggcggcgctgctgaccgagcacggctatcccgccgacgccctggacgacaagcccgcctgccccaagtgcagcgacaccggctgggtgggggccaatatgtgcgcctgccttaaggcgctgtgcaccgaggagcagatcagggagctgtccaagctgctggatctgggggagcagtcctttgactccttctccctggactactactcccccctgccctggccgggggagtccctctccccccgggagaacatggagtttatcttcgacgtgtgctccagctatgcccggaagttcggccggttctacttccgcaacctgttcctcaccggcgcgccggggctgggcaagaccttcctctcggcctgcatcgcccgcaccgtgtcggagagcggcttctccgtggtgtacgacacggcggtaaacatcttcacccgcttcgaggagcagaagttcgcccgggaccggctggaggctggggaggccaaggacgagacccgccgctacctgggctgcgatctgctgattctggacgatctgggcagcgagctttccaccccctttgtccagtccgccctctacaccctcatcaacacccgcctgacggcggacaagcggacggtgatctcctccaacctgaccatggatcaggtgcgcgcccgttataccccccagatcgcctcccgcctggagggagagtaccgcgtgctccccttctatggggaggatatccggctgttgagaaaacagacgctataaaatcaggcagaggagtgtcaacactcctctgcctgattattgcctccgaagcaacttattttgttttaaaagatctcgcaaagataatggcacctgtaataccaagcacaagtgcgattgcacgatacatctgcaatcgctcaaacagctccggtacgtagcggaattccgggaggtacagcgtcgtagctatcagattgccgccggtcaataggatgattccgacaatcctctgtgccagcttctttggatttctgtgtttcattggccaaattcctcaagtcgggatcctaattgtgatgccgcttggataagtacctaaactgtatgttgagctacgtccatctggcaaagtaactaatatctttctgcttattccactatttgtaggaatatagcttacttgatattttagtcctagtctaggtaccatatcaagttcatattgggtaggactttctgtagagggcactcctccatctccaataaacgaccacccaatattaagtgcagtcccaatcgtttcagctcctttcaatagggcccctatttcaattgatacaaattctaatgtggcaaatgtcacagcccaactaattgtcttacccgcattatatttatcaagttccgcctgagtccaaacaaatggtttcgaggtaatttgttttaccaacttactagctactttttcctcatcttcatagaccgttttaattctggaattacctgttgtatagtttgctgttataacatagttaggagagaaatgctttacatccacagtgattgtctttgtaactgtcctattagagctattgtaataagatgcatttttaggtgtttcaatagcgcctgcccgtttgctaggaattaactctaccttatagtacagtgtttggtttgctggaatcttaatagtaaatgagagtttcccgttactaggatttttgatatttgttattaggctcgaatctttaacgtgattaatttgtacccccttttgctccagatcagttaacatttcctgtgacgggtcttcatgcgctggatattcctgctcgacaggcgccactgcggcagccactacagacgaaccgatgctcaataaaatgctaaaggtcaatagatatgcagtaattcttttgattaatttcatattttccccttctttcattgaatgcctcggttgacgtttgccggctaaatcctccctctacgcgcaggctgaggcctctttgtgttttgtgttacaaggaaaaccacgcatattctctgcaagtccgataagaagccgtctgagggggaatctctggaacctcctctcccgcattgctatcgtagtataaccgcacaaaaacttccttacatttcccttaagtttggtttaagattgccagttctcccctcatccgcccctccggggcaccttcccccaggggaaggcagggtgggaacagaaaagccgcccgccccaaagcgcggggcgggcggcgatgatggcgtcctcgtccagcacctcgccccggcccaggctgctcatgtgggactgggcggactccagccccatgagcacgttggccttggactgctcccgggcccggtccaactcggcctgggtgacgccgtgctcggtcggctcccggatcacggccaaaatggtgtccagcgcctgtccctcggtctcccgccccagggcggtgtagacgccgaagtagccggtattgtcatggcaggtgccgtaagagtagatggagtagcaaagccccttctgctcccgcacctgctgaaactcaatcacaacccggacgagacggtggacatcacctggtcggcgctccaataccgtctggatgaatccgtaggctatccaaagattggataaaacgattgcaaacggaggagacggttcacccgtctcctccatttttgtgttcctgttcccattgctccgccaacggctccagcgccgccagcaggtcggcgttcagcgggcggaagcgtagctttcccgcatacagcagcccgtcggaacccaggcagaaggtggccgcaggaatccgctcctccgtgtaaatctccagccggaaggggtggtcctccctgtccttcatggggattgagttggagaccccccaccagagcacccaggtatcgtccagaacggcgcgcagctcctccaccccttcctcggtggggtcataggccccgtcgacggaaaagagtttatacatggcatagcccgttaccgcctcatccggccccggcaccagccagcccagcttcttggggccgaacaccagcaccaggaccgccagaaccgccacaacgatcagccgtgttctccatctcctcttctccatatcgccatcctcctcccgtgaacccccgttggttttccctcctgtttttcacatcctatcacggttttgtggaaacttcaatttaaatccgccctttctcttcccaaggctcttcccaaggcgtgcaaaaacggaggacggcaaaaggccgtcctccgttttgagcttgatttcagt

SEQ ID NO: 4254 - DNA, 31430 bp, Unknown
  gut microbiota DNA sequence
aggcgtcggcgctccccacccgccccacggcggagagggaggcgttttcaaaccggaacagctctccggccagggcctgcacgtccgcccgcgtcaccgcgtcgtaggcagcgatgatggcgtcctcgtccagcacctcgccctggagcagctcgccccggcccaagctgctcatgtgggactgggtggactccagccccatgagcacgttggccttggactgctcccgggcccggtccagctcggcctgggtgacaccgtgctcggtcagctcccggatcacggccaaaatggtatccagcgcctgtccctcggtctcccgccccagggcggtgtagacgccgaagtagccggtatcgtcgtggcaggtgccgtaggagtagatggagtagcaaagccccttctgctcccgcacctgctggaacaggcgggaggacatgccgccccccaggatggaggacaggagctggagctggaaccgccgggggtcggcgaaggacaggccggggaaagccagggtcaggtggttctgctcgatggccttcttcttcaccaccaccccgggcacataggcggcggccctcgcagcggtgtggggccgcgcctccaggccggcaaagcgcccggccagttccgcggcgtcggcgtcggtaaagctgcccgccagggccaccacgatgcggtcgggccggtagtgggcgcgctggtacgcccgcagccacgccccgtccatcttgtccagtgtggcctttcgtcccaggatgggccgggccaggggggagcccttgaataccgccccggccagccgctcagcgcagagatcctccgggttgtcctcgtacatgccgatctcctccaggatcaccccccgctcggtctccacgtcggcgtcgtcgaaccgggagtggaagaacatgtcgcacaggatgtccgccgcccgggccaggtgggtgtccagcacccgggcatagaagcaggtgcactccttggtggtgaaggcgttgatctggccgcccacggcgtccatctcctccgccaactgggcggcggtgcggctccgggttcccttgaagagcatgtgctcgatgaaatgggccgccccgttctcccccgcgctctcatggcgggagccagtccccacccagatgcccagggaaaccgatcgcacccccggcacatgttccgtcaggatacgcaccccgttggggagcgtctttttttcatacatcaaaccattgtaacctcgcacttctctatattttcgcgcttagtatggacaaataccgtgccgtttacgccccgcgcagggcaatcaggagcagtaccaccgccgtgatggccaggatcagcgccaggtagcccaccaccttctttttcatggccgcgctctcctttcctgttctcgtttgggttacaacactatatcacattccgtcccacttgtcagccggaaaatccgcgggaaaaacagcaggccgggcgggggctctcctccgtccggcctgtatgcagaatgtcctcccgccgggctggactgcccggcttcagcaccaggcagccagcagctccttcagctcctcctgcgtgcggatacaggcatcccaaaggccctcatcatccgctgggtatggagaaacccgcagggtgcgcgctccggcccgcaggccggcgtacaggtcgccgtatccctggtcccccacaaacagcatcgcgtcagatggtatcccccagcgggcgctccacccttccatacgtttcggagtggcgtggggcttctccgcgtcaaaaatctgctcgtcaaagcaccccagcagccccagccgggccagaagcgcctctcctccctcccgcctggaatttgagcacagcacaagccggatgccgcggtcccgcaggcggagaagccgcccggccagcaccggatccggttgggggcccaccccgtcggtcagcagatcccgccgggccaactggaaccgctcccagaacgcctcaccgtcccagccgatacgccgggccaggtacatggccaggctccagccgtcggagatataggaccagcatctccggtccagccagggcgaggggtccggacgcaggagtgcagcctcggtgggcacagccagcagcgcggcggccgggccaggacacaccccccattccttgggggcaaaccggccgcagcggaaggccggattgcctcccgccagcacccggctcatctccgcctttacagacccgatctccttctcccatggagtaccggcaaagtagtagtcgatcattcgcaggtagatacggtcgtcgtggtagagcgtgccgtccagatcaaaacagacaagccccggggcagcctgtaaccctcttcccatcagggccgcaccagggcatccaccggatgcccgtccattcctatgggttccagccccagcagacggaggatggtgggcgcgtggtcaatgagcctcccgccgtggattatcctgccggatacagcattgggcccggcaacgatgaaggggggcttgtcccccttccagggcaggtggccgtgggtggagaccgatggcttgtattcctttatgtcgttgacactggtgataagctgctccccatccagggcccttccaaagcacacccggtcgccggcttcaatgacaaagtcaaaatcgccggtcaggtgcatctgcgcggcctcctctttggtaaagatccgctccaggtatttggggtacttcttctgttgctccagcaggacgcaatacaccatttcccggtccacctccggccggagatagatgtgtgcgctgagcgaacagttggcggcataaacctgataatctgccagggaaccgtcctccgcggtctggagccagcccagccggtggaacagggcgttcagatggaacatctcgtcgcagtagagctgaccgtggtcgcccagcagcacaatatttgtgttctccacgccgccggtctcctccagcgcatccagcacaagccccatctgtccgtcaataaagcggaaggcgtgctccagatctccgtgcacgcccaggcggtggcgctggtggtcaacgtaggacaggtggagcagcatcaggtcggggcggtgggcccggatgatgtcggcggcgcacttggcggcgaactcgtccatctgtggcgtcttcatccagcggagcatgtgcttattggcctcaaaaatctcctccaccgcagggctgttggccctggtaaaccacggtgtcgggtcatcctcctcctgcggggcccagatctcgccaatattgtactccgctcctgaggcgcacatgacgggccaggtgacggtagaggcagtcagccccgcctgtcttgcaaaatccaccacggtaggcacctgaatggcctcccgccaccaataccagtccatccgtccctttgcaaaaaaatctggaatctcattattgttgatgccagtccggtccggccagcagccggtggcgatggtggcatggcagggataggttaaggtgggatagatacattcgatatccgtaatccaggaggcatgctccatcacgcgccccaggttgggaagctgcttcagcacggggatatccgctgtgatcagcgcatcaatggagaccactagggtgcgatttgtcatggggtccttcctttcttaagtacggtcctgttgggcctcttcctctttcatcagcgcaacgagctcccgctcccagcgctcggtctcctccagctcctccgccgtagcccggacccccggccggacacaggcggcctcggccaggaagtggtcgatgttccgcccccgctcctggccggtcagcgtgtgcatgtcatacacataatcaggcaggggaaaggggtctccccgccgtatgcgccgcttaaccacactggcaagcacgctggagccccgctccttccggcaggcgcacagatagcgcaccgcgtggacgaagagcagttgataatcggagctgtcccgggagagctcccggctgcttcggtgaagggcatccaccaccactggggccatgggctcccccaggcccacgtcctcggcactgatcaccaacaaccgtctccacaggtaggcggtcagctcctccccggtcaggtagagctcataggcagcccgcaccgccagctccgtctccccccggcgaataaatttctggagggcggatatgacctcgtcccccgggtgtccgctgggagttacgatgtcatggtaaaaaattggtatcatgtcaggtttcctttctgcgcgcccgggccgggacacggggccgcggcagggcggaggcggatgctccgtctccgccctgcccaagtccgcttcagttggtgccgacggtctgcttcaggttggccagggccagctccggctccatgccgttgtcggccacctcctgcatcatggtcttgacggcgctgttgacggcgctggaggtggtggtagcattggtaaacacgggctcatagaaataacggtcactctgctctacaccggcccgcatgtactcgtggccgtcggccacataggcctcataggccgggtcctccgccacggactggcgtatgggcagatagccggtgtttccggcagctaccgccaggttggcgtcatgggaggtcataaacttgataaattcataggccgcatacattctgtcctgattcccgtcctgattcaaggcgataatgacatggccggcggacaggttggcggcggtatcctcgctcacctgaggaacaggggcggttccccagtccagctcgggatttttgtctgggatatagctggcctccacgctgtcgccgatatacatggggatcatctcattggcaaagggcccggagaagaactgatcctcccccgcagtacgccagataccctcattcacgttatcctgccacatctgaagcaccttcagggtaatgtcgctgtcctcggtggcaaagtacagattgccgttctggtcggtgtagcggccgccgttttggagcagcagggtcataaagctgcctgccaggttgtcccagccaaaggcgggcgcgccggtaatgtctcggatggcgcggcaggtttccaccagctcatcccaggtggtgggaacactgagtccgtgctcggcaaaaaacgtcttgttgtaatagagcacctcggagtaggagtggatcggcagggaatagataccctccttggcatagctggagttcgcctcccgcagcccttcaaagatgtcctcgtagtcggtcatgcccacattgggatctgtaatatagggctccaggttaaccacatagtcggtctggaggtagtcagccacataggggcgcagggccagggtcacatcaggggcgctgcccgccttgatcgcgcccaccacgctggaatagagctcactgctgctgccgttaaaggttgggaccacggtaatacccttctcggctcctatcgtttcattgaactcctccaccagcccctccagaaccttcaggtggttctgattggagatggagtgccagaactggagttccacagggccggaaagggtacccagttccccggcgggggtttcggccccgctgggggccggtttgctgccgcaggccgccagggaaaggcccagggccagggcaaggcttacgctgatgagcttctgtttcatcgaaaattcctccttcttttctttcgtgccacatgctttcattgtgttattcaaagcccggcaggccgggcaggatcttaacccttgatgccgccccgcgccacgccggcgatgatctgctttcggaagaccaggaagaaaatcagcatgggtacaatgacgatcgtagcgccggccatctgcagattcacctgggagctcaccgcatcccggaagtggagcagaccgatgggcataacccggtgggcatcgctcttggtgaccataaggggccagacaaaggaattccattggctgataaaggccagaattccaatggtggcaatggcattcttgttcatggggatcatgactttccagaggtagcgccagtcgctgcagccgtccaccttggccgctttgtagaggatggaggggatctgcataaaatactcccgcatcatatagatatagaaaccgctggccaccgttggcagaataatgccctgaaaggtgtccatccagcccagcttggagatcgtgatgaagttctggatgatgagcagctctgcggggatcatcatggtggacaggcaaagcagaaacagcagctttttgccccgaaattcgtaaatggtaaagccgtaggcagacagcacggtaagcatcagggtaaggagggtaccgccgcccgccacaataatggagttgcgcaaataaaggccaaagggggcgacggcaagagcctccgtgtaattttcaaactggggcaccgcagggaacagggttggcgggatggagatggactccggcagtgttttcagggaggtaaagagcatccacaaaaacgggaagatcatgacaaaggctccaacagtcagaacggcgatcttgaccgccttgcccacgttctgtttcatatccgaccctcccttatacatagtatacaaaccgcttggagacccacttctgaatcaccgtcagggccagtacgatggccagaaagatgatggccgccgccgaggcgtagtgaacctgtccccggttgaaaaacatgtcataaatatagtagaccatagtgatggcgctgtttccaggcccagcgctctcccggctgaacatggcatagacctcgttgtaggtcttaaaggcatgaatgaccgaaacgatggtgaccatccaaaacgtgggggagagcaggggcatggtgatgcggaagaatatccggtgcgctggagtgccgtcgatccgggcggccttgtagtactgctggtcgatcttttgcaatccggccaggaacaggacaatcttaaacgccataccgctccagatggtaaaaatggtcaccgccacaatggtcaggttgggatcggacagccacttctgtggctccagccccaaaaactccagaaaaaagttgatgtagccgtattccgagtggaagagccagcggaacaccaggccgatggccagggtggaggtgacataagggagaaaatagagtgtctgaaacagtcccttggtccgaagcagggaattgatgagcagggctgcccccagggagagcacaatcgtgataggtacgcccaccagaacaataaacatggtgttgcgcacggccagcccgaaagcgggatcctgaagcacgtaccggaatgaattgaggccgaagcccgtgccggtgtcggtaaggtacacgtaactctggtaaaaccccatccgaagcgtcatgaggatggggtagaccacaaagaccgccaaaaccgcaaaggcagggagcagatacagatatgccttggcgctgcgccgggtgttgcccagcggattttctgcgcgggccggcttggggctcctcatcccgccacctccgcatccagccgtgcgccggtctccgggtcaaagatatagaccaggcgaggctccagggtcagctccacggcgtcgcctgccgccacaccggcggtgatgtccagaatggcgcgggcccgctcccctgccagtgagaaggtaaccagcagatccttgccccgcatctccacagcctcagccgcagtccgaagcccctgccccagacgccacgcctcaggccggatgcccaccaggaccggcccatccgccgcgccgtgcacccggagcatgtagtcctctgccagacacaccgttccgccgcacacgtccaaccgaaagaaattgatggggggattccccagaaagcctgccacaaagcggttggcgggattcaaatacatctgttggggtggacactgctgctgcaccacgccggtcctcatcagcacgatctcatctgtgatactcatggcctcctcttgatcatgggtgacgaacacggtggtgacgcccgtctcagtctggatgcggcgaatctcttcccgcatctccaatcgcaggcgggcgtccagattggaaaggggttcgtccagcaagaggatatcaggccgcttgaccagcgcccgtgcaatggccacccgctgctgctggccgccggagagctggcccggcttgcgcttgaggagatcctcgatctgcaccagtctggccatctccagggtacggcggcggatctcctccttcccctccttgtggttgaccagagggaaggcgatgttttgctccaccgtcagatggggatagagggcatagttctgaaacaccagaccaatgccccgcttttctgggggcagggccgtcacatccctgtctccaaagaaaatccttccggaagtaggcgactccagccctgagatgaggtagagtgtcgtggactttccgcagccgctggggcccagcaatccggtcagcttgccgtcctgaatcgtaatgctgacatcattcaccgccttggttccggaaaaatccttgaccagatgctccaatcgcagttccatggcgcagctcctttcatttattttgctttttattgtctccattgtattctatatcatttttcttgtcaacaaatgttcaaaattacagttttcagtctgctttttaagctttaatttcatataatctctttatttgatagtatattatcaataatcttctccgaaagagataaaaggcattgaattatcattttttaaaatttggctttacaaaaaatgtacagaatatccaactaatttttgctttattcttgccagagttccggttttatgatattctctccctagtatttaattaagtatgggaggattgcaccatatgagtctcaaaaagatgacacgtattgataaaatctcccagcttttgatcgccaagacgggcgtatcgattcgcgaactggcggtggagctgggggtatctgaaattacaatccgccgggatctgaagcagctcgagcagcaggggacggtaaagctgatcaacggcgtggccattcatcgcgccgcccagaacccccacagtacccttcccgagtacaatctggattacgaggttctccactttggagaccggaaggcccgcatcggcaaaaaagccgcctccctcattgaacccaacgatgtcattgccattgataccggctccacctgctcctacctcacacaaaatctgcccagcggcgtccacctgaccgtgctcacctactgcatgaacaccctggcccagttgaccacgcatccgaactacgacgtgatctgcgcgggcggctacctctatcccaacacccggatgttttatagtccagagggtatcagccttattaaccgcacctgtgtaaacaaggccttcctctccaccgccggcatcagtggcaagctgaacgtcacctgtgtggctccccatgagatgaacgccaagagcgccctgatggagagcagccagaccaagatcctgctgctggactcctccaagttcagcaaaatctgtcccacgactttcgcctacctctccgattttgacatcatcgttacggatgacgagctctcagccgaatggcagggctatattgccgacctgggcattcagcttttgctggcctgagcgggcagccgcatcatttgcatgaacctccatgcgtacaggacgcgccgcgaaactatgcaaaggcttaggcgcatgaagtgttcgcgcatgtgggccgtaccggcctacgcgctgtcatcttatggccgtgccgctgcaagcggcgcatgggcaagtttgctatgctcttgcagagcaaaagggccggacggaatggttccgtccggccctttttatgccgtatgcgctctttacttgataggctcgccggcctctttcttggccttgatctccttcagggcgtcccggtaggagaggttgacgcggcccttctcgtcgatatcggtgaccttgacccagatcatgtcgccgatgttgaccacgtcctccaccttctccacccggcggtcggccagcttggagatgtgcaccatgccgtccttgccgggggccagctcgacgaaggcgccgaactggaggatgcggaccaccttgccgtagtagagctggcccacctcgggcacgaacacgatggtctcgatggtcttcttggcggcgtcgcaggaggccttgtcggtaccggcaatgtagatggtgccgtcgtcctcgatgtcgatcttggcgccggtgtcggcacagatcttctggatcaccttgccgccggagccgatgacctcgcggatcttgtccacgtcgatcttcatcttcaccatcttgggggcggtgtcggccacgtcggggcggggcttggagatgcaggggagcatgatctcgtccaggatggcatagcgggcgtcgcgggtgatctccagggcctccttgatgatctcgtgggacaggccgtcgttcttgatgtccatctggatggcggtgataccggccttggtgccggccaccttgaagtccatctcgccgtggaagtcctccacgccctggatgtcgatgaaggtggtgaagccgccgtcgtcgtcctggatcaggccgcaggaaatgccggccacgggggcggagatgggcacgccggcgtccatcagggccagggtggagccgcagatggagccctgggaggtggagccgttggaggagagcacctcgctcaccacgcggatggcgtaggggaagtcctccacggaggggatcaccggctccagggcgcgctcggccagggcgccgtggcccttctcgcggcggttggtggagcgggcggcccgggcctcgccggtggagtaggcggggaagttgtagtggtgcatataccgcttctcctcctcctcccagatggtgtccagcttctgggcggcggagagggtgttcagggtgcagacggagagcacctgggtctggccgcgggtgaacaggccagagccgtggacgcggggcagcacgcccacctcggcggccaggggacggatctcgttcttggcgcggccgtccacccggtggccctccagcagccaggccttgacgatcttcttctggaacttgtaggtgatctcctccaggtacttgtccatctcggaatagtcctccaggaagagctcatgccagtgctcgatgagcttgttccaccgctcctcgcgcacgttcttgtcgtcggtgtccatggcggcgcgggcctcatccatggtggcctccacgatcttgtcgaacagttcctggtcgaagtcggcgtggtcgtaggtcatcttgtcccggccgatctcggccacgatctggttgatgaaggctacctgcttcttgatgtcctcgtgggcggccacgatggcgtcgtacatgatgtcgtcgggcagctccttggcgccggcctcaatcatgatcaccttcttgtcggtggcggccacggtcagatcgagctgggaggcgtgcttctgctcgttggtggggttgaggacgatctggccgtccacatagcccacctccaggcagccgatggggccggcccaggggatgcaggagtaggccaggcaggcggacacgccgatcatggcggtcacctcgggggagcagtcccggtccacgctcatgacggtggcggtgaccaccacgtcgttgcggaagtcgtaggggaacagggggcggatggagcggtcgatcacgcggctggccagcacggcgggcagggagggctggccctcgcggcgcatgaaggagccggggatccggcccacggcgtacagcttctcctcaaagtccacggagagggggaagaagtccacgccgtcccgggggcggggggacacggtgacggccaccagcacggtggtctcgccgtaggtgaccatggcggaagcggtggccagctcggccaccttgcccacgtcgatggtcagggggcggcccgccacctcggtcttgtagaccttgtggttggtgaattccttgtgcttgataatggttgacatgcgggtattcctccttttcattggtgtctcccacacatcagagcccggtcccttttagcacttgaagccgggtccggccctccgggcccaggttcaactgctaaaaagcaagctccgacggatgggaagaaggggtggcacggagcccgcgccacccctcttgattcgttgttgtcacgctgcggcggctgcacaacggacaactgttcaacactccgcgaaaaatgccgttggcgttccgccaacctgttttttcgtctgcgtgtttcgctgttgtcctgctccgcacgcctccgcgcttcttcttactttcggatgccgagcttggcgataatggcgcggtagcgctcgatgtccttggccatcagatagtccagcatcttgcggcgcttaccgaccatcttgagcaggccgcggcggctgtggttgtcgtggatgtgcaccttcaggtgctcggtcagctcctggatgcgggcggtcagaatggcgatctgcacctcgggggagccggtgtcagtggcgtgggtacggttggcctcgatcacggccgtcttctcgtccttacggatcatggttgggttccacctttcatacaatgtgccctgggctgcgtgaccggccggtgagagcctggggacgaagccgggggtaaattctgcctgtaaattacaggctgtagtagtttatcatattctccccgccttgtaaagaggtcattcccgattttgcggcgaattttcccgcgccgccgccgtcctctggcgccggcgcaggcgcgggggtatgatacaaaaaacagcaaggaggaatggttatgatccgtctgctgaccgggagcacgcacacgggaaagaccctgctggcccagcgcctgctggagcggcacggcgcgccctatctgtccatcgaccacctgaagatgggcctcatccgcagcgggatgtgtcccctgacgccggagagccccgacgaggccctcaccgccgtcctctggcccgtggtgcgggagatcgtcaaaaccgcggtggaaaacggccagtcgctgacggtggagggctgctacatccccttcaactggcgggaggactttgatgcgtcctgcctcccccacatacgctttctctgtctggtgttcagtgaggcgtacatccgcacccggtttgacaccattcagacccacgccaacgccatagagcggcggaaggacgactccttctgcaccatggaattacttttggcggaaaaccggcgcaatctggaggcctgccgccgccgcggactgccctattacctcattgacggcccctatgccccgcccctggactggtgagcgttaccaaatcgtcatttattcttaataaattatctttaaatccccattgacaatcatataattatttagtataatcatgtcaaagcaagaaaaggagtggatgatatggcaaagacgctgccgggaaccaccatcgcggtggactggaaccgaccggaggaggcggagaccctgctgaactccctctttttggccggggggctgatgctctcccaggtggccagcctgaccgggctggagccctatgtcatccagaactgggtccgccggggctttgtggccccgccggagcgcaagcggtactcccgccgccagttttcccgcatcgtcctgatcaatatgctgaaggattccatgcagctggacaaaatctgcgccctgctctcctatgtcaacggggagctggacgatgaatcggacgatctgattgacgatttccagttgtatctctatattgtacgcctggcggccctggtggagcatcagcctcccagcgggccggacgaggcggcccgctggtgccagacagcggcggagaactactgcgagtgtgtcccgggcacccgggaccgggtggcccgctgcctccatgtgatcctgacggcctatctggccggacggctcaagcaggaggcggaggccctcctcgcggccctggcctgacgcgtcccaagacagcggtagggacgcggagtatcccgccgctgttttatgatagatcgcatccccatttcgagaaaggaggaacccattcatggcagcctggtggcaatccctctctgccctggaccacgttctgctctacatcgccatacccgccacgctgatcctgctgattcagaccgttctcctctttgcggggggcgcgtttgacagcgacggcgacgccggtgtgccggacgcggacgggccggacttcgacggccccgacgccgacggcggcccgctccacgaggccgcggcggacccggagacccccgacaccggcctgcacctgttcaccgtgcggggcgtggtggccttcctggtgctcttcggctggggcggcctgtggctccaccaggtaggcctgcccggtttcctggcggtcttcctggccatccccatcggctttgccggcatggtgggcatcgccctggccgtccgccaggcccttcgcctccagtacgacggcaccctggatctccgcaacgccctcgggcggacgggcaccgtgtacctcaccgttccccccggccgctcctcccccggcaaggtcaccctcaccgtgcaggagcagctgacggaatttgaggccctcaccgactcccccgcccccatccccaccggcagccctgtccgtgtcaccggtctggccggccgcggcgccctgctggtggaacccattccatccgaatcagaagagacagaataaggaggaacttatgccaaacatctttggacttatccttacctgcgtcatcgtcgtcatcgtcttctccctgctgctgttcctgatcaagcgctacaagaagtgcccctcggacaaggtcatggtcatctacggcaaggtgggcagcaacaaggacggctccacccgcagtgccaagtgcatccacggcggcgcggcctttatctggccggtcatccagtcctatgagttcctggatctgacccccatgtccatctcggtggatctggaaaacgctctgtcccgccagaacatccgcatcaacgtccccagccgcttcaccgtgggcgtctccaccgagccgggggtcatgcagaacgccgccgagcgcctgctgggcctgaagctccaggagatccaggagctggccaaggacatcatcttcggccagctccgcctggtcatcgccactatggacatcgaggagatcaacaccgaccgggataagttcctggaggccgtctcccgcaacgtggagggcgagctcaagaagatcggcctgcgcctcatcaacgtcaacgtcaccgacatctccgacgagtccggctacattgacgccctgggcaaggaggccgccgccaaggccatcaacgacgccaagaagaacgtggccgagaaggaccgcgacggctccatcggcgaggcccaggcccgccgcgaccagcgcatccaggtggcccaggccgacgcctccgccatccagggcgagaactcctccaaggtggaggtggccatgtccaacgcccagcgccgcgagaaggaggccgaggccacccgcatcgccaccgccgccgagaagatcgccgcggcccaggccctggaggaggcctacgccgccgagcagaaggccgaggccgcccgcgcccagcgtgagaaggccacccaggaggccgacgtcatcgtcaagaccgagatcgacaagcgccgccgggagctggaggccgaggccgaggccgagcagatccgccgccgcgccaagggcgaggccgatgccatcctggccaagatgcaggccgaggcccagggcgcccaggagatcctggtcaagcaggccgacggcctgcggcagatcgtggccgccgcgggcggcgacgccgaccacgccgtgcgcctgatgctggccgacaagatggaggagctcatgcgcatccaggtggacgccgtcaagggcatcaagatcgacaaggtcaccgtctgggacggcggcgagcagaaggacggcaagaccgccacggcgggctttgtctccggcctgatgaagtccattccgcccatgaacgagatgttcgacatggcgggcatggagctgccccgcttcctgggcaagaacaaggaggagcctgccgctccccccgcgcccgccgcagagcccggcgcgcccgcagaagagtcctgataattggaaggcccccggaacctgatgggttccgggggcctttctgctttaaattagagcttcttttcggcaaagcgcatgaggatgacggccacctcggcgcgggtggcggtgccggcggggtcgagccggccgccgtcctttccggtcagcagaccctcgcccacggcccagcacagggcgtccgccgcataaccgctggccgcgtccttgtcggcaaagccgtccaggtcgcctgtgggctccggtgtgcccgcatagcggtacagcatggccgctaattgctcccgggtcaccgcgtcctccggaccgaaggccccggtgtcatacccggccacaatcccctgggccgccgcccagttcaccgcgccggcataccacgcgtccgccgccacgtcggtgaagcccgccccgccgggggcggcaggactgcccgccaggttccagagcacctgcgccgtcatggcgcgggtcagcaccgcgccggggtcaaaggtgacggcgctggtaccgtccatgaggcccttttcatacacataggccaccgcatcatagtaccactcgccgctgctcacgtcggtgaagggcacgaattcgggctgttccggctcggtttcgatcgcggtgaagaccgcctcgacctccaccttggaagcgggcattttgaaggtatatttgccgtcgcccttgtcggtgagcttgatggaatcgccatccttgccggtgacggtcagcttgtccagctcatagccctcgtcgggcttcacggtgatggtcacggtggtgcctctggaggcgcgggtggggcttaccttcacgctgccgttgtccgtgtcctccacgctcaccgtgtaccgggtggagctggaggaggagccgccggaggagctgtttttcgagaatgtcgcatggacggtgcagtcctttgtcacattctgaacggtgtaggtgccgttatcgttctgcaccacgtctgcggcggtgctgtcatcgacggtcacatcagagatggaatatccgctgtcggcggtgacggtgaaggtctgactgccgccattggctacggccaccctgccgctgggagtgatggcgccgccttcgccggcggtggcggtgatggtaaagccctgcgcggggtcttttgttccatcgcctaccaccgcactgccaatgtccgtagtaatatccctggccgagtcatctgtgtaggccagtttgatctttagctgcttgtcttctttggtagtcttgttgtccgcaatggtaacagggaaggagccggtatcatttccgtccttttcgcccgtctttgttgttaccccaagaacaatatcgcctcccaaaattggattcgaattgttaaaagtacaaccggaaatagtcagggacttgacgctggcccgcgcgccggtgatatcatcggcttcagtcccgtcacccgtgccgcgttcagcgactttaatggggccggaagcaccgcaatttccttcaaacctagtgttggtgatcgagatcacggcatcctgtacggcgaccaggttcaggtcgatggcatagttaatgccgccgcagttcgtaaaggtgcagccgtcaatggtcaggtttttcgcgttggtcagataaagtccctgtccaccgctcactcctgccttggagttttgcacggtgcagttggtcatggtcaggttcagaccgctgacaacagttgcgctctgattctgagaggtaatgaggatggatttatccgccgttccatctctgttggtgtcgccgtccacggtcagattattcaaggtgaggttcgtgttggtctggttggcatcgtcgcccgaagctgccacacagttgatggagccgtacagggtcttgccgctgccctcgatggtgagggtgctgcccgccgcaatggatatgtcttttgtcacatcctgcagcagggtgagggtgtgatcttctgcggacagcgcggcggtcaaagcctcatcgatagaggtgtatttcgtctccccgacctgtgccacaaggacgccttcttgcgtcctttcaaaggtgtccccagaggccagggtgatggtggggatgtccgcatccttggcggcctgataggccagctcaaccgcaacctcgctgccattttcggccttcacattggagatggtcaccgggaacgcgccggtggagggcgcggcggcattgttctctcccttcccctgggaacccagttgaatcttggccccctcggagaaggtgcagtccgcaaccacagcggaggcaatggtggcgggttttacttctccgtctcccgacggcttcacatctgttgccacgtcgtcctcgccgttgcgctggttcagcttgatggcattcttctcatagctgcccgtaaaggtacagccccggatctccaccgtggaaccctggatgccgcagaggttccagttgattccgtacttcaggccgtcctctccggcgttgaaggtgcagcctttaatcaccagagactggcagttgggcaaatacataaacgaggagtttgtcttgtctccggcggtattgccggtaaaggtacagtccgtcagggtcaggtgcagtctggggggattggggcgcgtctgcacattggtcagggcaaactgtccctccttaaactccgttctgctgatagtcaggtatacgtccttaccgtcgagagcgtcgcccttcaccgcctcattataggcggctaccgtagtgaagggctcctcctgcgtgccctttccctcctctgtgggcacgggctcctgtggctcgtcgccgggctccgtcctggcgtccgcgcttgtttcctccgtctgttccattccggcgatgggaaggggctgctccgcgtccgccgcaaaggcggacggcatcagcgtcagcagcatgcacgccgtcaggcacaccgacaagatgcgtttctccatgattctgttttcctcctttttgatgtcaggggtcgtggccgcagaaaatgtgtgtcaataccactccgccgtaccggaggttcccgcaggatgccattcggactgcatacaaaacagcttaaaacaggaagcgcgggtctccggccaggtgaaacagcattggccggcaaaccacccccttttggaaaagtgtgccttttaaaatggtggaaatgcaggaaaatatatgttaaaatgtaattgatatcgccgtatttctgtgctatacttcacactaggtagtgcgactatttcatttgtaaacgtacactttttcaaacaaacaaagcgcctctggaatattccagaggcgctttttgcatatagttccgttacagcagggtgaaatccagcagctcgtggccccacgcccgctcgggggcgtccagcccgcggccgtccaccatcagctcgccgcactggttgtcgtaggggtcttgccgccaggcgggcatggggggtgtcaggggggcctggaaggcggaattggctaccatccgccaggggtccaggctgccgaagtagtgggcccggcgggcgtcctccccgctgcggcgggcggaggagccgaaggagcagtccgcccacagccagccgtggggggccaagtagaacatggcccagtcgtgggggcccacccggccgggccgggcggccagcccgctctgccaccgggcggggatgcccgcgatacggcacagggtgatgaagagcagggcgaacaccccgcagtccccccggagggtcttggcgcactggtcggcgatgcagtccagctggaggtaggcgggctgatagcggtagtccacctgtccggtgacgtagtcgtagatggccttcgccttttcagccgggttggcgcacccctcggtcagccgggccgccagcgcccgcaggtagggggtaaagacgatgtggggcggctgctcctccagatcaaagtccggctgcgcctgctccggggggagggacagggggtcggtatactccgcccggaagaggtaacggtaggtgacggagaactcccccacgccgtttgttttccaccacatggtgcgctgcggtgcatactccggcgcggccaccccgccgggggtgcagtccagcagctcaatattgctctgctgggggcaggccgccgggaggggcagccacgcctgcacctcctggcccgcaacaggcaccagcgcccggatgctcgccttcagggtgatgcgggcggtgagggagccttcccgctccatccgggccagcacggcatcccgctccgcgttgtccaccgcctcgtggacaagccccggtgcctccttcgggtagatgcgcagggactccaggaactcccggtgtacccgcagctccccgtccaccatccgccagtcgatgcgcccgccgtccagcagggcgtcgaactgcgcctcggtaaagccgggccactccgcccgtaccagggccaccgcctcggggcgggtgtaggggtagtcgtagggcaggcgggtcagccgcagccgctccgcctccagccggggggccagcaggggctggacgccggaggagagccgggcgtcgatcagccggagcgcccccgccagatcccccatatccctgcggcgggcgatgtcggcgggcagggcgtcgttcaggtggagaaaggcctcattctggttgtgcataaatatccccctttgcgtttcctgtccccagcatagcacaaaccggcgggcaaaacaaccgtgccgggacagcgctgctgtcccggcacggttgatcggtgaggttattcggcggtgaagatggcctcggcccgcaccagcagggcggccagctcggcccgggtggcagtgccctgggggttcagggtgcccgcgccggtgccggtgagcagcccggcgtccaccgcccaggccacggcgtcctgtgcgaaggcggacacggcggaggcgtcggggtagccggacaggtcggcggccgcgctcacgtccaggccctgggcctcggcatagttgcacaacagggtgacggcctgctcccgggtcagggcgctgtcgggggcgaagccggtgctgctggcgccggaggtgattccggcctcataggcccaatccacggcagcggcgcagtaggagccggcggccacgtcggcaaagccggcagaggcggaggcggcgggctcgcccgccatgcggtggaggacggtgaccagcatgccccgggtggtagtcacgtcagggccgaaggccttggaggtgacgccgttcatcaggccctgcccggtgacggcggccacggcctcggcgtaccaggcgttgggggccacgtcggagtagccggtgtcgttcagcacggcggcccaggcggcgttggagatgaagttgtactcatcccgctggttggtcttgttggtcagggtgttggcgaagagcaccacgtccagttgggcgttgtccgcgcccgcgccctggtaggagatggcctggatggagtcgtccaggaagtcgtcgaagtgctcgccgtcggcggggaggaagccctccagcagctccttggagccgtccagctgcaccagcacctgggcgccggcggggatggcggcgaagtagccggcgccgtagccgtagaggaggtcgtcgccctcggccacatagctggcggtgatcaggctgtcggtggggtaggtgacgtaggccagggcgtccatggcgttggggctgacggtctcccgcaccagcgcgccctcgtcaaagagggagacggcggacttcatggccttggagccgtagccgatgtagggggtgccgctcttgacggcggccagggcctgctcgtccagggcggccgcgccgatgatcaggtcggcctgggaggcgtcgtcggtgacggtgaagcccagggtgcgcatggcctgccggtcgtagttgtactcgtaggaaccgctgaccagggtggtcttgacgaagcccttgtcgttgtcggcgggcttgccggaaatgtagaccacgggggccttgggaatggccagggccgcgggggcgtcggtcacgcccacgccggagagcaggtagtcgcccgccacgctctgccagtcggcgtaggacaccaggaagctgccctcgtactggccctcggtgatgagggagacggacttgccggccttcagcagggcgttgacggcggcggtggagtcctcggaggcgttcatgagcaccacctgggcgtccttcacgccggagaaggaggaggtcagggaggccacgtaatccagggtctcctcgtagtccaggacgtcgccgcaggcggcggagatggtcttataggcggcgggctcggcgcacaccaccatgtcgaagccccgcaccttgtcgaaggcggtgatgccctcggagtagaggacgggccagccggtaatcacggtgccgtcgtacagcacgccgttggccacgctccgcttggcctggtacatggacacgatcagggtaccggcggggtactccacgccgttataggtgaagctctggtcggtgaggctgacctggacgccgttgcgggtcaggtactccatcatctcggcggcggcctggaggttggactggtggacgccgtccatgggaatgatatagcactcggggtagaagttgccgttctggccctccccgtcgtactcaggccggaagaggtcggcctccgcgccctccacgtcgtactggtcgcagaaccactggcccaccagctcgtaggcgtcggagttggcgttggtcacgccccgctcgaagatcttggtctggttggtcaggtagccgtccttgtgctcggcgatgtagacggactggcccagctggccgtaggcgacgccctgcaccatgtagtcgtcataggcgggcacctccacagtgtaggagacggtgccgtggagcatggcgtactggggggtgtagctggtggacatgtcgtcccaggggtcgagccactgggtctggtcgtccccgtcggcggtcttcgccccggtgtaggtcaggtagtcccgctgggggatgacgtagctgttgtggccgccgttgttggccaccgcggcgatgcccagggcctcgccgccgcccatcaggtgctcggccagcagatcgtactcaaagttgggctcgtgggggggatcgcagggctcgcactggaaggcctgcacccggccgtggaactcggtgaggctgacagggttccactcggcgatcagcctggccatgttctgggtctcggcctgggtctgaaaggagttgtcccggttgaggtcaaagccgccggaggaggtacgggtcaggtaggtccggccctccacgttctcctcggggacgatgatgaagaacacgtcggagagcagctcgtccacgtccaccgtcacagtgtcaatggtgtagtatttctccagctccacctgggtggagatggaggcggtggtgccgtcggcgttctcgcctttgatgtagcccaggtaggtggcgtcatcggccaccagatcggggacggccacggagcccttctcacccgcagggcccatctgctcggccagctcggccttaccggcggcggtgaagccggtgagcttgtcgtagtcgatggtgccgctctcagaggccgcggtctccaccagcatccaggcaaaggccaggatgccgtcgctggcggccacctcattggcgtgaatattggagtacatgacgggcacctggtagtcgcccagggcgccgctctccagcttcttcagcagggcggtgggatcgctctccgcctccgccttgatctcctgccacttatccaccgcggccttgtccttggccacaatcagataaggcatatccaggctttccaggccgttgtcgccctggctctggcccatggagaactgctccacgtagaggtcagtgtggccggcggcgtagtccaccagcgcgtccagctcgtcatagatctccgacatggtgtggaagttgtcgtagggcgccaccttcagatccacagagcccaggatcttgccgtccagcccggcggacagcgtgaagtagccgcacacatccatataggagccgccgttgctgtggggcacactgagatcgtcaccgaagtagcactggttggcgaaggtgacggtcaggtacacctggccgtccaccgtctcggcggcggtggccacgtcggtaaagaagggggtctcgccgtcctggcacagccaggcgctcaggggaccaccctcggtctggttgggaaactgggtatcgtccaagtaatccggcgcgtccgcatcgggcgtcagggtccaggtcacggaggaggcggcctccttggcctcggcctcggtcatgtccaccgggatgctggcctggaaggtccgctcggcggacagggagatgccgttgctcccgccgtcaccgctggtgttctcaaacacagcggcgggggccgctgcgctgtctgcggccgcagacgggatgacgcacagggacaggagcagcgccgatgccgtcagcatggacagcgcgttgccgagtgttttgtgcttcttcatgctcttcaccttactctttcctcttacagtgtataatattcgtatgttttcgaatatttatgtataaaagataccactgcaagccccatttgtcaagcataaatatgcataaccaggcggctttcttctcccttttcctttggataaaccgctgttttacggtccaatctcatatcctttccaatacaggcctatttttctgcaattttatacacagcgtcttttaccctttctgtgccggcacgcaggaataaaaaatgcgcgggagctgatacagctcccgcgcacggcgctccggcggcccatccggttacccgggcatgggcacctcaaattccggctggcccatgtagccgggggcaatctcatacttctcaaaaatcaataccggattgcccgcctcattgatataaaagcgctggtcatcggcgatggaggtgaagccctccaccccctcctccccgtggaagtagatgttgtcggggctctccgcctcctgggcggcgatgcccgcccgcacggcctcgttggccagttccttatagtccggccccagcatatcccggagggtgagctcccgcccggcctggaggtcaatgttataggtataaagctcggtgtatgcattggcccgggtttccgtctcggtgagcacaaaagacagataatggtcgttctgacacttgatctcgtagtcaacatcgatcatgacggggatgaagtcctcctccgcaccgccggtggccacataggcgtcgcggatggcccgcgcccggtcctcggcctcctgaagcacctggtcgatgcgggtctgaatggccaggttaatacgctgctccaggtcggtgtccccgggcagctccagggcgggcaggcgcacgtcgataaggcgctcccgctcgtcgatgtggtactccgtgacggtgaccacccgggccagaccgcccagcaccggcacgtcggacaccgcccgggcaaaggccggactggcgttgaccagcagcacaaagcaggcgcagccccccagcaccccgctcacgctccggcgaagcgcccggcggccccgcagccgccgctggcccgcccgcaaggcagaggctacggcaaattccagctcctccggcaccggcgtgctctcatggcgcaccctggcccgttcccacatatccggcatatcagcactcctcctctgtcagctcccgcagacggcgcaggctcttatagagcctggatttcacggtgttcaagttggtgttggtcacccgcgcaatctcctccagcttcatgtcctcgaaaaagcgcaggcgcaccacggtctgctccttccagtccaggcgctcgatggcgtcatagagatccagcctctccccggggtcccgggcgggcgccggggtttccagcagggtgtcctccaggggtaccagccgtttggcgcggcggtggtggttcatactctcgttgagcaggatgcggtaaaaccaggttttgagatactccggcctgcgcagtgtatccgacttggccagagccttgacaatgctctcctgcaccacgtccagcgccgcatcccggtttttgacatagctgtacgccaggcggtaaaattcctcctggtgagccacaatatagtcgctcaactgctggcggacagtctgttccaaggtccgggcgctccttcctgcttctgttgcttagacgcggcaccagcccaaaaagtttgaaaaaaagtgccggtacccggcacttttttggggggacgcaggttactccagcccgtccagggcggcccgggctttttcagcatcggcggccacggccagcaggacggagttgccccgctgctccacaatggcgctgtccagcttggagacctcgtcgggctggtagctctccagcacagccttctggtcggctaccctggcctccagcccatccagggcggccgctgccgcgtcctcatcggtgagcaccagcactgcaatctcctccgccccggcggacagggaggtgtagacggcgctgccggtgatggtgtcagcatcaattccgtacagggcggcggcggtgtcctggtctacggtgtccaaggcatcgctgaacgcgccggagtccagcagggcctgggcggccgtctccgggtcatagggggtctggcccaccgccccgccgcctccgcaggcggtgagggccaggcacagcagggccgccggcatcaggcggatcaacagggatttcatgtttcattcgctccttccgcggcggtctggcccgccgcatagcagtccgcatccacggtgtgctccatcaggtaggccagccacttctggtaccatgccttggtaaagtgcaccccgtccacggtggcgtcggcggggagaataccgttttcgtcggtgagggcgtccgccacgtccaggagcactacctggtactcctcagccaactggggaaaaatggcgttgtaggcggccacccggtcgttattcacatagtaaggctgcttgttggcggcgcacttctccgcgttcaccggcaccagattttccagatagaccaccgcgccgggctgactggccttaacctgcttcaggaaatcaccaaaggtctggtggaacgcctcatcattaaaatatcccagttcattgatgcccagggatatgtagattttggcgtattggggccccttctccagggcctgctccaccgtgtacttgccgccgtccagctccaccacggcgcggtcgtccatctcgaacacggtcagtcccttgtagcagtaaaagtccgcccccttaatgccgctgtagaggcgcaggccgtcggtgcgggagtcgcctataaacagtgcatcggcaaagtaatccatctccaccgcctcggcggcaggggcgggctgggtgaaatcaaaggccgcaggggtcggctccggcgtgggtgtgggctccggcgtgggtgcggctgtcggggtgggagtggccgccgcaggcgggctcgctgcggcggtgggctcctctggggcacggcccagagatgggatcaggatcaggccgaggcacaccgccgcggccgccgccagcagaggcagcggattgtgcctgcgcggcctgttttgcgcccgtttgggctgatattgggatggcaactgggacacctcgattaaatattgtttttttcttctttgagaattagcgcttggagcgccgcgtatccgtccacctcccaggtggggacgatggcggggtcgccgggcagccggcccggattgtaccaagccgtgtccagcccggcctggatgcccccctggatatcggccaggaggttgtcccccaccatcagcacccggcgggggtctggattccccagtgtacggagcaccggggcaaaaaaggcggggtctggcttgctggcccccagctcctccgaaataaacagccaggggatgaggccgttcaggggggatgcctcgaagcggcggcgctgggcgcgggccacgccgttggtgacaatggccagggtgcagcggggggccagggcgcggcacagcgcctgagcccccggcaggaggtaggagccctcccccaggtggtccaggtaggcccggttgagggccgcggcatctcccgtccggcccaaggcccgcagcagggcggcaaaccgctctaccaccagccactcccggcgcacctcgccccggtccagccggttccagagcgcccggttgatggataagtagcgcgcctcggtctccccgtcggcgggcagtcccgcctcctccagcgtctggcggagggcctcacgctcggcccggtcaaagtcaaacagagtatgatccgcgtcaaacaggacaacctcatagcggggcatggtatctctcctctctcagccccggcggcgggactggtaggtggtgaacaggcggactacggaggccaccagcagcacgcccacggccagcgcgcccgctaggcccagtgtatgcatcagtgtgtccagaaacagctcggtgtcgccgttcagggcgtgttccatggtgtagtagatgccgccgcctggcaccaggggaaagagggccaccagcaggtagctggtcaccgggcacttgcgcagccgggccatcacctccgaccaggccgagatgaccagggcggcaaaaaaggactggataatatcgttgcccaccagcggcccggtgagcaggtagcacagccagcccagggccccgccgccggcgcagatgagcatgccggcgccgtggatgttgaacagcatggaaaagccgatgcaggccaggaaggcgtagacacagggcaggagataaagaaggacctctctcatagcgcgcctcccgtcaccatccgggtcaggcccagggccagggcggtgcccagagcgatggccgcgccgatgagcagcgcctccgccgccttgctgatgcccgccaccatatcgccggccatgatgtcccgcatggcgttggtcatggcgatgccgggcaccagggccatcagcgcgccgatgatgatgaggtcctggttctgccccaccccaagccgggtgagcgccacggccgccagggcggaggccgcgccgccagcgatggtacggaagaacaggttggcgcccagccgggtcatcagcgccatacaaaggccgatgaccatgccgcacagccctccgcacagcccgtcggccggggttccgccgtagaacagggagaacatgccgcagcccaggaagtgggcagccagttgggtgggcagggagtagacccggtgggtgcgggtaatggcctccatctgctccagcgcctcttcaaaggcgggggtctcccggcacaggcggcggcacaggccgttgtacttctccagcaggtagatgtcggtgccgtgggttggcatccggcggatctgggtcacgggccggccgtcgggggaggtcaggctgaccatcaggcagttgggaatggcaaagacctccccccgtggggcaccgtaggcctggagaagccgctgaatggactcctccacccggtagatctccgcaccgctcttcatgagccggtagcccatctcactgaccatgtccagcagcttgttgtagtcgagctccaatgtgggatacacccgccttttcaggtttgaaataaatgggtcagcggcatcacgcagatgccgcacagcgtggcccacagggccggccggtcgtggccgtactgccgggaggaggggatgagctcttccaccgcgatatagaccatgatcccggccaccgcgccgaacagcacccccagcagcagcccgttgagaaagggacgcagcagcgcaaaggccagcaccgcccccaccggctccgtcaggccggagagcagggtgcagcggaaggcccgccgccggcttccggtggcgtaccacacgggcatggccaccgaaataccctccgggatgttgtgcagggcgatggccagggtgatgctcacccccagggtcagatcctcataccccgccagaaaggtggccacgccctccgggaagttgtgcagggccatggccagcgccgacacaaagcccacccggaacaggttcttgtggggggcctcgccggtatcggcgtcaaaggtgtcgtggggaaccaggtggtccagggcggcggcgcagccgatgccagcggccagggacagcaccgccgccagcgcccccgggcggccgcccagggatgcggtcaggtgctcccgcgccgtggggaacaggtcggtgaaggacaccgccagcatcacacccccggcaaagccgagggagaccgccagcagcttttcactccttctccgggcggcaaagaccaccagcgcccccagcagggtggacagcccggcggccagggacagcaacagcgcgcggacagcggcggattccagcatagcagcataccccaattccttgtgtggtacagctactattccacacaggcggggatttagccgcgccaagttcctccggcggccggttcagccgtttccggcggagcacttggccgcgtcgatggccagtacgatcatcaggcacagcagggcgtcctccggccgggcgatgtccagcacataggtgtcggtccagtggagcagctccttggacgcggccatcactgtgcgccccgccgggtcggtgacggcgtagtcccactccaggaagctgccctccacctcccagccgttgcagtccagtgtaaaccgggggtgaaatagggcaaattccttgcggatacaccccaggtattcctcccctgcatagagggcgaaccggggcaggagggtcagcacttcttcctttaccgtccccaggtggtctccggccgggccgtagatctccagccggtgtccccaggacagcttgccctccacggtataggcggcgcgcccctcctcgtcatagatgtcatagctgtcaaaccaggagagaaaccgctgcttgaacaacaggcgcatttgggcctcctttccgtgccaacgtacagacgcgggcagcccgtaaaaagttgcggcccggccgacaaaattcgggcggaatgttcttttatgtaatcctaacacgaaatacgcagcctgtccagaagaggatgcgcaaacgccccaagacgcgcaaacgggccgcgccattggcgcggccctcag

SEQ ID NO: 4255 - DNA, 21863 bp, Unknown
  gut microbiota DNA sequence
gtggtcatagacccgccccccggcgcgtcgccggagccgccctactggatgtaacagaggtgttgacatgatacaattgcaagtgtgtttctgcctgctggggctggcgctggccgcgctgggcgtggcgatgctcctccggccccagaggctgcggcgcttcctgcggcggctggacgcccggctgtggaagtggacggggcggcggctggcctggagccggctggccggcagcggcctgctgctgctgggcagcgtcctgttcctggtgctgctggcggccctgctgctgcgggcgctctactgaggggggcggagggatgaactacaggctgattcccatggagcgggcccatctgccccaggcggcggagctggagcggcagtgcttctccgatccctggacggaggcgcagctggcgggtgagctggacaacgagctgctctccctgtcggcggccgtgggggaggacgggacggtgctgggctacgccgaggtgcgggtgatcctggacgagggaaccctggagcgcatcgccgtggccccccgataccgccgccagggcatcgcggaggccctcctggacgcatacatacagtacggccgggagcacctggccttcctcaccctggaggtgcgggcgggcaacgcccccgccatcgccctctatgagaagctgggcttccgggaggtgggccgccggaagaactactaccgtgccgagcacgaggacgccctgctgatgacggtggagtttgaccgccatggctgagctgcgtctgctcaccgcccggcagctccggcaggtgtaccgggagcgggtacggtccgattttccgcccagcgagcggcggcctcttgcctctatggagcgcctgcgggcggcgggggtatacgacacctgggggatgtacgagggagaggagctgctggcgtacgctttcctgtggcggtcggaggcgtacggcgtggcgttgctggactatctggccgtgtgccgggagggccgggggcggggaaccggcaccctggcgctttccctgctccaggcccgctatgggggctgctccctgctggtggaggcggaggcccaggaggagggggtgccgccggaggaaaacgccctgcgggccaggcggctgtccttctatgagcgctccggcttccggcggctggactaccagacccggatttttggagtgcaatacgccatgctggtgtggccggaggaggccgcagcagagccggagcggctccaggacgcccaccggggtctgtatcggagccagctcccgaacccgctgttccggcgggtgatccacattccggcagacgagcactgaggcggagccggctttttccgccgcctgatatgtacctgacgatcccgcaagaaaggactgattcggatgaatatcctggcctttgaatcctcgtgtgacgagaccgcggcggcggtggtgcgggacggccgcaccgtgctgtccgacgtcattgcctcccaggcggatatgcacgccgtctacggcggcgtggtgccggagatcgcctcccgcaagcacgtggaggccatcgccggcctggccgaccaggccctggcccgggcggggctgacccgggcggacatcgacgccgtggcggtcacctacgcccccggcctcatcggtgcgctgctggtgggggtcaacttcgccaaagcggcggcctatggactgggggtgccgctgatcccggtgcaccatgtccggggccacatcgccgccaactacatcactcaccccgagctggagccccccttcgtctgcctgtgcgtctccggcggaaacaccatgctggtagacgtgagggactacacggacatggcgattttgggcgctacccgggacgacgcggcgggggagtgctttgacaaggtggcacgggtgctgggcatcggctaccccggcggcgcgcccatggacgctctggcccaggggggggacgaccggcgctatgagctcccccgcgcccacgtggccgacgcgccgctggacatgtccttttcgggcctcaagacggcggtgctcaatctggcccacaacgccgcccagaagggggagacgctggatctccccggtctggccgcctcctttgccgccgcggtgagcgataccctggtgccccgcaccatggaggccgcccgccggacgggctatggcaaggtggccgtggcggggggggtggcggccaacagccgcatccgggccgatctggagcgggcctgccgggccagcggccacaggctctacctgcccgccctgtctctgtgcggggacaacggggccatgatcggctgccaggcctactacgagtatcaggcgggccgccggggggatctagccctcaacgcctatgccacccgctccatcgagcagggctgagagaaaatgcaccgccccggaaaccaaggtttccggggcggtgcatttttgacagagggcggcaacgggatgcaaaattgtgttatgtctactatgactccaaagcggccaaaagtggggacttcggttgaagcatgtggataactgggtggataagtgcataactgactgggacgctaaggaggagagggggtggaaaacccggtggacaatgtgaataactctctgtagaggcgctgagatgggtgaattatgtcaaataaatggagaaaaaatccagggggaaatgggggcgaaacagaaaaaacagggcggtgactgactggtttttcgtctgattgggccttgacaggcgggcagagcaggggacacacccggcccgcccggcaggaaatttgcagcttttccgccgcggggcagaggcgtatacaatgggtattgaacaggaataaaacttcatgcgccacgggcgcaccacgaacacaggcaaaagccggggcgtatgaagtttttgcgcatgtgggccgtcccggcccccgcgcttttaatttcatggccgtgccgctgaaagcggcacatggccaattttgctatgcttttgcatagcaaaaaagcggccgcagcgtacgctgcggccggtagaacgtgggagtagttcaggccagcttggacttggccagctcggtcagggtggtgaaagcggccttgtcgttgacggccagctccgccagcatcttgcggttgatctccacaccggccttcttcaggccgttcatgaaggtagagtagttcatcccgttcatcttgcaggcggcggaaatgcgggtgatccacagggagcggaagtcgcgcttcttcaggcggcggccggtgtaggcgtaggacagggacttcatcacctgctcgttggccatcttgaagtgcttgctcttggcgccccagtagcccttggccagcttgaggaccttatttcttctcttgcgcgtcatcatcgcgcctttgactctagccattgtaaaaagcctcctatgttaaggtaaaaatcagtcttatcttatttgtaggggatcatgcgcttgatggcgggctcgttggtcttgtccgcataagcgccggcgcggaggcctctcttgcgcttggtgtccttgtcgtgaccgttgagcaggtgacgcttgttggcgtgggcgcgcttgaccttgccggacttggtcaggctgaatctctttttcgcaccgctgtgagtcttgagcttaggcatggtggtaaaactccttttctttcaattcaaaacgtgcggggttcaggacttcttggcttccttggcaaccttgggggagaggaagatggacatgtgccgtccgtccagcttggggtccttgtccaacgtggcgacctcgccgcactgctcggcaaacttgagcagcaggcccttgccgatgtcggtgtgagccatctcgcggccgcggaagcggaccgtgaccttcacccggttgccctcggccaggaacttctgggcgttgcggagcttcacattgaagtcgtttacgtcgatactgggagacatgcggacttccttgatctccacgacgtgctggtttttccgcgcctccttctcccgcttggtctgctcgaacttgtacttgccgtagtccataagcttgcagacggggggattcgcggtgggagagatcttcaccaggtccagattcgcgtccatggcgcgctccagcgcctcccgggcggacatgatgcccagctgctctccggtgtcggagaccaggcgaacctccttgtcgcggatctcttcgttgatttgatgaccctgtttgctgatacgaaagcacctccaattctcagatacatacaaaaaaacggctaccagtccggtacccgcatccaacctgaacacgcacgcgccgcatcgggcgcgcacgggaaacctgattgacctctttgccgtgggctggaggtgaggatgggggcaccgatcctgctttgttttgctctgatagtatagcagaccgttggcgtagtgtcaagagaaatttcaaaggcccggttggggcttccctttttcggagaaatgtggcaaactaggggcagaggagggaatgagatgcatcatccgattcgcatacgcgcgcttcggctgggcctggcggcctgtctgctggccggggcgctggccggactggcctctgctaacgcgcccacttatgaaacgacgattctgttcacccatgacacccacgaccacttcctccccatgccggatgaggagggcggggaatacggcggctatacccgcctggccaccctgatccaacaggagcgggcagcccacccggacgccctggttctggacgccggagacttttccatgggcagtttgttccagaccatctacgccacggaggccccggagctgcgggccctgggcgcgatggggtacgacgccacgacgctgggcaaccatgagtttgactaccgcgcccgcggcctggcggagatgctcaacgccgccgtggacagcggcgatccggtgccccccattgtccaggccaactacaagcccccggaggaggacgcggacacctgggcggcgtgggaccgctacggcatcggggactacctgattctggagcggggcggcgtcaactacggcattttcggcctgatgggggaggaggcggacagcaacgcccccatgtcgggcatggagttcgagcccgccgccgacgcggcggagcgcaccgtggcctccctggaggaagagctgttgtcccggaacgctccctattttatcatctgcctgtcccacagcggcaccgacggcaggggaaagggcgaggactacgagctggccaggcgggtggacggcatcgacgtgatcctctccggccacacccacaccaccctggacgagcccctgcgtgtgggggacaccctgattgtgtcctgcggggagtacaccgccaacctgggcgtcctcaccgtggagtggaagccaaacggggagaaaaccgtgaccgactaccgattgctccccgtggacgagacggtggcggaggatccggacatggtggccctggcggcgtccttccgccccctggtggaggagcagtatctggacgactacggcgtaggcttcgatgaggtgctggcgacctcccccttcgcctttacccccatcggtcagttcggcgcggagcaccgggaggacaccctgggcagcctgattgccgactcctacgtatacgccgtgcagcaggcggagggggcggactacgtgccggtggacttcgcggtggtggccgcgggggtgatccgcggctccttccccgctggggagatcaccacctccgacgtgttcaatgtctcctccctgggctccggggcggacgggacgccgggctatcccctcatctcggtgtggctgacggggaaagagctgaaggacgcctttgaggtggacgcctcggtgaccgctctcatgccggaggcccagatctacggcgctggcatgacctggacatggaacccccaccggatgatgttcaataaggtgaccgactgcgcccaggtgctgcccgacggctccgctgttcccatcgacgacgaccggctctaccgggtggtgaccggactctacaccggacagatgctgggcaccgtcaacgaccagtccttcggcatcctggccatcacccccaaggacgcccagggcaatgtgatcaccgactatgaggagcacattatttacaaccccaacggctccgaggtgaaggaatggtacgccctggcctcttacctccagtccatgggagaggtggacggccgctatgccgcccccgaggggcgcaaggtagagcacgccacctggaaccccctgaacctgctgaaaaacctcaacctgtttggctggctggccgtgctcgcggcggtgctggtgctggccgcagtcgtgttcctggtgtggcggctctgctttcatcaccgccggggccgctacggcggcaggcggcggggcggcggctaccggccctaccggggataaaggaagagagaatatatgaaggagaacaactacgacaacccggggttttttagccagtaccggcgcttcccccggtcggtggagggcctctccgccgccggggagtggcacgcgctgcaaaagctgttccccgacttttccggcaagcgggtgctggatctgggctgcggcttcggctggcactgccgctacgccgccgaccacggcgcggcggcggtgatcggggtggatctgtcggagaagatgctggagaaggcgcgggcggataccttcgacggccgcatccactatgtgcggggggccatggaggaggtggacttcccgcccgcctcctttgaggcggtgctcagctcccttgcccttcactatgtggaggagctggggccggtgttccgcagggtgtgggactggctggcccccggcggggactttgtgttctcctgcgagcacccggtctttaccgccgagggctcccaggagtggtacccaggccccggcggtgcgcccctccattggcctgtggaccgatacttcaccgagggccgccgcaccgcccgcttcctgggctgcgatgtggtcaaataccaccacaccctgaccacctatgtccagaccctgctggagaccgggtttgtcctcaaggccctggtggagcccaagcccgatccccggctgatggacgtgcccggcatggccgacgagctgcgccggcccatgatgttgctcctgtctgcccataagccggaataaaacgacgagagccgtttcagacagagaacatgtgctgctggtgccctgtttggagggagtgcaacccggagttgcggatttgagtgcaggtggtaggtggtatgcagccgctgaaacatgcatgatttaagtacggccggtcacggctgaacttaaggaggattcaaaccgtaagtgtatcaaagcagctcattcatctgagaagcatataggggatctcccaggaggagttggcctctttgatgaatggaaccagataggcggtaccgaaatgggagaccgacctttcacatactttaaaatatagatacagaaaccgctcccacacttgggaagttctaacagttgcccgacaataaacgatattcggcctccgtcctgctccatgagagaggcaggacagggaccgggcccagaaagtgaaaaaagggcttgtcaattttgctctgactgggtaatataggagccaagaggtacagaaatattgcgtcggatcccaggtgtagcgagcgcctgaggccctatgtgggtgacacgaccacccatacaacggaaaatccgtactacgctgttgttataacctttcctgccccattctggcaagagggttttagcggctgtgttgcagactgatatgctgtgtggggatatacataccccgcacagcattttttgcctcttgcggaagggccaacagggggcagccgccccccaagggtcccgacgcaagagaagcaaaagcacaggaggccgctgatatgaagaaaaaagtcaccgacttatcccaggcgctggccgtgggcttgcctgtcccggccagcgccgcaggggagaccttttccgacgtccccgccccgccctgggccgtccccgcagctccggagtggaagaacggggggaaggctgctccgtccgatccgtatctcgttccacccctttgaaagtgcgtattcaaccagattgccccccggcatagtgttccactcgtactgtccgcagaggacacaggtaaggccgtgggcctccgctatggccttgaatttcccggcgcctccgtcctgtagtaattgcgtcagcaagtctcgcttgcgagcttgcttgattaccatacgacacaggcgaaacaggccgtcaagactggtgtagccacttgcgaaaaaactgccccgactcttacgaaaccgggacagacttttttcggtcctgaccgcctgaggcggctgtggcacggtgggcattccctacactgtgtaatccctcagtacggaggctttctgctcagcgtccaaacaatacttaaacaggagcagtaagttcagctcctcccggcgataaatagggcttttcgggatgccatcccctgtgatatgtgtgacaacggcgaacatggattgaaagctatcctcattccattccagctcccttgcctgcttctccgcaagctgggatatgcgttccgcggactttgaaattttagatcgtcccctgttccaaattgccagccattgaaacaggtccggggaaaaaagtttatgattgagttctcctactaaaaaagacagcttgcgctggttgattgcttctgttatgtgtcttatgcggtcatcctcaaaggtactgatagccttcctgaaagcaatatcatagctgtcaaggcttttacaggcggccagattatcaagcaatatttgtgcgattgtgggctccatatggagcatggaagccctcagagtttctacggaaatttcctgtgtataggtatcgagataagctttcctttcgtattcccgataaagccgctcaatctcgcttttgacctgttgctgtccctttctgatggcattctcattcgttctgtcggatagaatggcgctttcaaatgcggctgtcactatgtctatacaagtctggcactccatatcgggccaagtccggtcatacagatagccgccgatggtttcctctccatactccacgttttcatctgcccatcctttacggcggtcgttgaacgactccgcaagtgcggatttaaggtttgtgaccgataatccgtggcggtttccgatttcccggattgtaggtcacaaacgcctgccaagcgtgtcctttttcttcatcggagaacactcctaaaattataataaaaatatctaatttcgatatagtgataagttaaaatatccctggttttcacagtgtgatcgatgcgagaatcaaaatgtgcgtttttagtatattacaaagcaaagtgcgtgtgaattttctgcttttgtctgctttcctggtcctgcatagagcctttctccagaggtgggaaatagtagaataattgcatatctagagcggagcaagcgtccggtcagtgcggcatggaagaagattgaagcccaccctctgacggacagccgcgatctggaaaatgaaatttaggcatcgactataattgtcttttggagcggttatggcggcgcggagagcggcatcccatcggcagccgacggcaggccatgatcgccggcaaatacggcggcgtgttttgcaatctcccggatgggaccgtgtgcatgtgtattactcctaccagcatgaggactccgatttcctggtaggagacaccgtgattctggtagtccagcggtatgcggaggagaaaaagcagatgtacggcaaaatcctctcgaagtggtgatccaaaagcgaacaggcccgcccctttatagggggcgggcctgtcacctttactaactcaaaggtccatacccatattattttgtgaaggaaggtcagattgacatatgaaagtgagacgactcgttgccttgtgtacggcaatgttcctcagcctacagatggcggggctccccgcctccgccgcgggcagattttccgatgtccccgccggttctcccttttatgagagcgtgacctatctggcggagtgtgggatcacagccggtacgggcggacacagcttcagcccggagcgtcccatcacagtccgggagtgggctaccgtgctgttccaggctttcgatggaagtaccttgtcctgcgattccccaaaggagcggtccgagctcagtatccagcggtgctatcaaaacggctggctgggcgtgagtgctgccatatcccctgatgggactctctgccgcggagaactgctgctcagtgccttccatacggccggactgccggtatacaacgcctctctctatggctatgaggaggcaggatgtctccgcaggaaaacgcggtacgcattggaaaggaacttggactgtgccccgaagcggccgcaccatttggagtgcagttgcttccgtctctcaatagaaaaatctttcaatcgacgatctatggaagaaaaaacagcagcaggatgctccatacgagcagtattatggcacaagtccgtaggttctactgatagtaggtctgggagagcgtgcaataaactacgaatgcgattagcaattatgatttatttggggcgataaaaattttggaagccccttcagcaatctgaacttcatatcgctgcccacgataataaaagtgaaactgcatggatacaaggccattggggagatgaggggacaactttggaacgccgttctcgatatgcagtccggcaaagccaaagataactgtattccaagtctcaccgagacaggccagatggagcccttccttgcccgtgttgcccataacctcctccaggtctagatagagggccttccgccagtaggcttcagcggcctctgccaggccattctgggccgcaaagagggcgtggctggcaaagctgagggtggagtcatggatacacaggggctcaaagtcctcccaggcggccagcttttcctcttcggtaaactgctctggcagacgggttataaggagcagcgtatccgcctgcttgatcacctgatagcgttggagccggtcgaagcagacctggtgatagctggcctcgtcgccggatttgagctccgccggctcaacgcgctccagcaggtggaacgtatcgtcctggcggtagtgaccggtgattggatccctgggaagctggatggcatcgcgtagtatctcccaagcagcgcactccgctttggacaggctcagggccgcatactgctccggcgcctctttcttcagccgtgcggcggcggtcagcgccagagagagattgtgctttaccatggcattggtgaaaagattgttgctggtaatgccgcagtattcatccgggcccttgcagaacagcagattgaccttcccggcttcgggggcgggagagtaacggctgacccagaagcgggctgtctccaccaacacctgtgcgcccccctggaagaacaggcggtcatcgccggtccaatccaggtattggcccagagcataggccacgtcagcggtgacgtggacctcgctgcacccgatgtcccagctttcacactgctcggtgccgtcataagacaccatccaggggtagcgggccccggcgccattcatccgcgccgcatgcgctctggcctggggaagcgtgccgacccggaagcccgccagactgcgggcagcctttggatcggtcaggtcataaaagggcgtcagaaagagatctgtgtcccaaaaatagcagcctttgtaccgcgtgtgggtgagccctctagccccgatgctcacggtgtggtcccgaggagagcagttggccgccaactggtagatcacataacgcagcgccgtctgcgcgtcgtcatccccctccatgacaatgtcgcagtccgcccacttttgctcccatgcggcctgattctccgccagcgcacttacaaagtcccagcctggctccacatccagctggagcaggggatccacatcgcggctggaagtcagccgggcggcgatctccaaggcgatgggagcatcggaagcgtcactggtgcagcgcactcccacgccgtcaccggtatccgcaacaaaagcgggggatgaaaagccctctgtgcggcaggaaaccgtctgagccagttccagccttgtatgatttgtcttatagcgggcggtgaatccggcgtcggtcgcctcgccggagcagaaacgggtcatctggatgatctgggtgttctccttcacctgatcgtctgggatagggctgttgcagctctggtggtcgatcccggccaaaagctccacctgcccgcggccctggaattcaagccgctggaacagaaagctaggcttggccaaggagaaaaaacgctgttcctgcacatccacccagtcatccgcaatactcagccggtaacggaaggtgagcagacctgtacggagatccagcgcgcgggacaaatgggagggaatggccggtatgcggccattcaatcggatctggtaccagataggggtgggcagattgacaaaatccgtcagctctgtgctgtcggagatccggtcataaaagccagccaagaaaagtccggcgtccaacggccggcggatcggccggtaagcggggtaaccccgggcccccatgcggccgttgccggtaaagaagacgctctccaggaagcggtcggcaagatcgttcccctccgctgaaattgtccagccccggcgcttcacgtcagttctcataggacacgcctcctaacgcataccgcagggcgtggcacacaaaccccgcgcaagtggcaaaggcgtctcccgtcgcggatcggcccgtgtgctcatcgatgctctcacagacgatgccgttgtccatcaccgcccgacgcagaagatccaacgaccgctccgcctccccgctgagcaggctgttggccacactcaacatccagggatggggggcgtgggcgcagccgatttccgcaaaggcgcacccggcgaagctgtaaggatactccggggcgcggatctgacgcactgtattctgatatgcggggtcatccggcgcgcagaagcccaggtagggcaggagcagcaggcttcctggcggctcgtcatatacatctgtatggccctccagatccgtggaccaggcatagtatgggccgttcgggccctggacaacacagtgctccaggatcgaccggcggagctcctccgcctccccggcaaggtcgccgtatgtttcaggatacagggaggacagcgcgcgaagcgccttccataccagcacattgtcataggtcaggtaggggtagctgcgcacgtcatcggtgggctgaaggaaggtctcgtacagtgggatcgacctgtgccgtttggtgcgcaaggtgcgcagaatatccgtaagcccggagcggaccgcgttgtcctccagacagtcccggtcgcctgtggcagccgcatagcgctccagggccagcaccggggccatcagttcatccagctcaaaaccaggctccaggactgtgccgtcgatgtaccgcgagtggacgcccaggttgcgccgctggcggccgaatacatagtccagcatccggcgggccagtgccgggtcggcgtccactaccgtaggaaagctccacagcaggctgtcccggtcccagtaagccgcgctcacatagtagcgcgggctgcggctggtgaccagaaccagctcctcggtatccaaggtgatcccggcggagtagaacaggcagaagaacagattggtattgtagaggcgctccaactgggcatccggaatgggccagcggcgggcgtccagccagtctgtggtcacctgtaacccgtgctgccagccttggcgcagcatctccttggcgctggtggcggccgccacctcctcaaagccgaccccccagtagaaggtcacagtaacagcttgtccgggttccagcgtgcagtcgtgggccagacggtagacgataccggcatccgtctcctgaaaggtggatgagcagggctgatccatcatgggcgcaaaagcaaaaaggggcagtccgcagcgcatatcaaagatcaggctgtcgttccaaaggctggtgtagcatcggcgcgccccgtcgatctccttgtcttcgttgacgcagtgccatgcggaggcccagcacccttccagaccgaaagtagaggacagcggcttatccgatgtggagcgtactgtcagttgatagagaaaaccgcgttccccaaccggagccagaagcattccctccaccgctagggagccggccgtgccgcagaaggtcggaatccagtcggattcccgtccccaggtcagagactgaagcgaggccctttctccttccgtctcaaaaaaaggcgtcatcagcgggagagaagcgccgcccctctgctcgatcaggcccttatgtcccatgtgtaggaaggaaaaggactccagcgccccggtgcgggcctggagagtgggaagagagacccactcgttgccggtaggcaaataacactcttgcatagagatccctcactgttggatttaatcggttaaaccgttggcaatctaactataacatattttgggcgcaagtcaataattgttttgtgaaaaatgttaatttatatcttgacaatagagctggtattggctattatttgcttatagaatagtttaaacgcttaaattaaacgaggtggtatagcatgtcggccaatcgggtcaccatgagggatgtcgccaaagaggctggcgtcaccagcgcggccgtctcttatgcattgagtgggaagcgcccgatttctgaggagacacgccggagggtcgagcaggccatcgagcggttgggttatacaccaaacatggcagcccgtaccctgggcagcgccagacaggattccaggctgatcggcgtagtggtccctcagaccgaggctggaagccgactcatgtttcagaaccagttttactctgagatattgggaagcattgaactgtgcgccagacagaaaggctaccatgtgatcatctctgctacggatgccaacgagagctatctgaccctggcaaaggagcgcaatctggacgggatcattgtgatcggcatgtatccggattccttctaccagcagatgaaggagagccggatccctatcgtattgatcgacagctattgcaatgaccactattaccataatgtacgcatcgacgatgcttacggcagctatctggcgaccaagtacattttggactgcggtcaccgtgccgtcgcctttttcagcggccgcatcaaggaaaacggcgtcatgaagaaacgcctggccggctatcgggacgctctggcagagtatgagcttcccttccaagaggagttggtctttgaagggaacattgactacaaagacggcatcgcgtctgcccaaaggctcatggacgcgggactccctgccacagcggtggtagctgcggcagatattctggcaatcggagcggcaaaagctttctatgagcgcggtgtcaaggtaccggacgagatctcccttatggggtttgacgatttggagattgcgcagtacatgaccccgggactgactaccgtaaagcagcagatctcagcgaagggggaaaaagcggtggagctgttgatccgcaatatcaatgagccggagttgaccaagcaggagttgatcctgccggtgtccctggtggagcggggctctgtccgcaagatcaaaacggagacaacctgaaaaggtctcaatatagggtaagaatggaacaacacatgtcttaattttgaaaaggaggaaccatgcaatgaaaaagcggtctctggcgatcctggccggcggaatgtcgctggcgctcctgctctcatcatgcggcccgtccagtgctccgaccgaaagcccatcttctgcccctgctgatgaaaccggacagcagacggctgaggagcctgtgaccatcacctactgcaacttcaacgcgtccggcggcaatgaggaaaccctgcagaaaatgtacgaggccttccatgaggagcatcctaacatcacggttgagatcgaaaccatcgccatggatgactatttcacccaaatgcaaacccgcgtggccggcggcacggcgcctgactgctatgagctgaacatcgagaatttcgcctcctatgccaataagggcgtgctggccgagatcagcggtgtggacctcagccgcctggacgagactgcactgagcgcgttcaacgtggacggcaagcagtacggcctgcccggcaacttctccaatgtggtgctggtctacaacaaggacctgtttgaccaggccggcattgattatcccaccgcagactggacgcaggatgatgtgcagacggcggctgaggccatccgcgccttgggcgatgatatttacggctactaccagccccttacttacaacgagttctacaaggtttgcgcccagttcggcggcagcctgctgaatgaggacaagacggagtttaccatcaactcccccgagaacgtggccgccgctcagatgatggccgaccgcgtgctggtcagcaacgtccagcccacggacgtgcagatgggcggcatgggtgactgggatctgttcatgagcggccgtctgggcatgatccccaccggtatttgggcattccagtcctttgccgatggctgtgactttaattgggatatcacgattgagcctggtcaggagcaaaaggccacgcacttcttctccaacggcctggtgatcaatgccgacagcgagcacaaggatgccgcggctacttggatcacctggctggcctccagccccgccgccgctgagatccgcattgaggcgggctgggatctgcctgccgtcagtgacgaggataccctggcctcctatctggacatgacgccgcccgataaccgccaggctgtgtttgactccttggactatctggtggtaccgccagtgatcgaggactatgccctgatgagcgatatcattggtcagaagctgtccgccgccgccaatggctccataaccgtacaggaagccctggatcaggcgcagagcgaatgcgaggcgcagatttcccttagctgataaggggcaggggaggggcttgtgcccctcccctgttcgattttctgaggaggtgtttcccaaccatgttagtcaaacggaagcggcgaaagggacccgggcaggaggggctgatcaccgcgtctccctttttgatgcccagcctcattggcttgctggtattttccctgctgcccttgctcatatccgcctttatcagcctgactgactggaacggcttggatcagttgacggcccccggcttctttcaggagcattttatcgggttggataattataaagccattctctccagccccgagttctggggggtgctgtggaacaccttccgctatatcatcatgtacattccgctgatgctggtggcgtctctgggggtggcctatctgctcagccgccagcgccccggcgtaacagccttccgtatcatctactatatcccggtgctcacctcctgggtggcagcctccatgatctggaagtctatgctatccccggagtatggcgcggtcaacaacatcctggccgttttcggaatacaggggccgggctggctgctggacgaggcttgggccatgccggctatcgtactggtgtcggtatggaaggatatggggttctttggcctcatcctcttgtccggtatggtgggcatcaacaagtcctactatgaggcggcatcgctggacggcgcaggctcttggcagaagttctggaagatcaccttgccgctgatgaccccagctatcttctatgtgctgatcgtcagcctgatcaacgcattccagctcttcccgcaaatcatgatcatgaccgacggcggccccaatggcgccacacaggtcatggtggagcgcatctacaagtatggcttccgctactaccgcatgggctatgcggcggccttctcctggatcctgttcgccatcattatggtgtgcaccgccatccagatgaagggccaagagaggtgggtcaactatgacagctaaacgcagactgggcaccacaggctattatgtggtctccatcctcattgccgtggtggccatgatccccttcctgtggatgatctccacctctctcaagagccggggtgctctcatgtccatccccattgagtggattccggcagagccctcgttggatgcctatggtgaggtattttcccgttttccattcctaaagacgattggaaacagcctctttatttccgtgtcctacactgtcatcaccctgatttctgcctcgatggcagccttcgcttttgccaaaatccgtttccgctgcgcgaacctactgctcaagctctacctggccaccatgatgatccccacacaggtgactatgatcccgctctttgtgatcatgaatcggctgggcctgatcgacagctatgccagtgtgatcctcccctccatcttccgcccctttgcagttttcatgctggttcagcagatgcgtaccgtaccggtggactatttggacgccgcacgggtggatggggcaaacattttccaggtctattcccgggtggccctgccgctgtgcgcgccgaccctggcaacgctggcggtgaccacttttatggagtcctggaacgactatctctggcctctgctgatgttgactgaccgggccaagatgaccctgcccatcgccctgtccacactgaacggccagtacaataccgagtacaatgtgctgatggcaggcagcctgatctccatgattccaattatcatcatctacctgttcgcgcagaagcacttcaaaaacggcctgatggcaggcggcatcaaggggtgaaccgatgagagagattttgtgttccggccaggcgcggtccctggaatttccctatccgggcggtatggccgccctctgctggagccctgcgggggagcggggggagttgacggtctccctgcactatgacggggcctatggcatgggagagaagtacaatgccgtgaatcagaagggacatacggcggtcaatgaggtggaggagaagttctgctttcagggagagaaaacctactgcccggcgcctttcttctggacaaatacgggcttcgggctatatgcggccacggatgagcgcaccagcttccgatttggtgagaaagcggtttgcgcggagctgcctgtggattgccgcgtcgtgctgttttcggggatgcccggagagatcattcgggattacatggatctgttcggcccggcaaagctgccgcccaaatgggcctttgggccgtggatctccgccaaccactgggacagccaggagaaagtggagcgggcggtggcgcaggcggaggaacacggctttccagtctgcgccttggtggccgaggcgtggagcgatgaggctaccttttatgttttccggggcgcaaggtatgttcctaagccgaatggcggcgcattccggctggaggacttcgatttttccgattccccctggccggatcccgctggtatggtacagcggcttcacgagaaggggatccgtttcctgctgtggcagatccccgtctacaaaaagcaggggccggatgagccgctcaatgcgcaaaatgagctggaccaggcggatgccgtcgcccggggcctctgcgtccacaacgcagatgggagtccctataccatcccggagggatactggttcgccggctccatgatccccgacttcaccaaccctgccgcagaggagacctggttttccaagcgaaactatctcacagagatggggatagacgggttcaagaccgatggaggcgagttcatctaccgggaagatgtgcgctttgcggatggaagctccggccgggccggaaagaaccgctatgcccaggagtatacggcggcttacaccaaacatctgggttcggctcaggcgctgttcagccgggcgggctacgctggtcagcataccacgcctatccattgggctggagatcagcagtcccagaacagcgagttggccagcgccctgcgggcggggctgtctgctgccctgaccggcatcccgttctggggcttcgacatcgggggctttgcagggccgctccccacattggacttgtaccgcagggctacacagctggcctgctttgtgccggtgatgcaatggcactccgagccggatggagggcagttccgcgagttgatgcctgggggagaggggaacaatgagcggagcccgtggaatctggcggcggcttacggtaagccggagttcgtggacgagatgcggttctggcataatctgcggatggaacttctgccctacctgtacagtgtcgcgctggactgtgcggaagcttccaagcctatgatgcggccgctggtctatcagtggccggaagatccgctggtatgggactgcgaagatgaattccttctgggtgacagtctgctggtggcgccgctgctggaagaaaacgccgagaagcgcgcggtctaccttccggaaggacagtggatcggcctgttcgaccgccgcgcggcggccggagggcagaccatcgtagcgggcggagaccggaggctgccggtctttctgcgggcgggctatggtctggcgctccgttctgatgcgaactcggcccccggcgctccggcgggagagcgggcagacggaaatgctcctctgcacctgctgttggctggggaatgcgggcgtttccgcttccgggacgagctgggcaccgacttggatatcacctggtctgatggagccgtccacatagagggcgactaccgattcccgctgacttgggaagtgctccctgtggaggaatgctgatatggggatgtgcggtatcatttttgatttggacggcgtgctgtgctataccgaccactaccattatcttgcgtggaaggcggtggccgataggctgagcctgccttttgacgaacaggtaaacaaccgcctccgaggtgtcagccggatggagagcctggagattattctgagccttggcagtaagacctactcccaggaggagaaggagcagatggcagccgagaaaaaccggctctatcgcagctatctggaacgtatggggccagaggcactggcccctggggcagtcgatgtgctccgcactttgcgggagaacggctggaaaacaggcatcggctcctccagcaaaaacgcccccctcattttggaacgaaccggactggacggattctttgacgcggtggcagatggcagtcagattaccaagtcgaaacctgatccggaagtgttccggctggcggcgcggaaattacgcctttcccctgatgagtgtgctgtggtggaggacgcctccgccggaatcctggccgcaaatgcaggcggcttttttcccatcggcctgggggacgccgcccaggcccccggctgccgcgccgtcctaaacgctctgtatgaattgcccgaactctgccggcgcttatacagccgcgccccaaaattcaagccttccgaccctactccattttcatagggcggaggagcggtcaaaaaggaggaacgcccgccgggccggcggtgcggcagtgtggagacctgccgtaacgtccgcagagtgacgctctctgcgggcaaga

SEQ ID NO: 4256 - DNA, 283 bp, Unknown
  gut microbiota DNA sequence
tgtcggcggtcagggtctggaacgccatctgggcggcctgctcacgggtcatggcgtcggccagcacgatgcccttgggggcgatgcccgcgttcaccgcgtcggcggccacgttgatggcccagtcgttgcccacatagttagcaaccttcgcgtcatagcccagggccaccagcatcatcttcgcaaaggccaggccggtcagctcgccctcggggtcgaagttgccgttgccggtgcccgccaggatgccctgctgcacgcagtagccgatgtagcccgc

SEQ ID NO: 4257 - DNA, 303 bp, Unknown
  gut microbiota DNA sequence
gtcatacgcccctctggctcaaaattcagaaggaggaaatccaaatgagaaacctcaagcggactctcagcctggtaatggccatggccctgattgtgggcatgatggtcgtctccgccagcgctgtgagcagtgatttcaacgactctgctgaaatcaccaacactgaggcggttgatgtgatgaccgccatcggtgtgttcgagggcaccgacaagggcgccttcaaccccaccggcatcctgacccgtgagcaggccgccaagatcgtggctgtcatgctcctgggcgaggaggacgcca

SEQ ID NO: 4258 - DNA, 1127 bp, Unknown
  gut microbiota DNA sequence
atgccttgtcccgctccacgatgcaggggatgctggcccatcggtccccgctcccctctgtgctgcgcaggagcttgagtgccgaccatcgccggtgaccggagacgatgacgtaccgcccgtcctccgtcggccttacccggatgggttgctggagcccgcaaagctcaatgttggccgccaggtcctccaggccggtcaggctgtaaaaattgcccgggtcagcctccaatttgttcaggccgatgtactcgatggtctccctcgatgtgtccgacttggacacatttccggcggcgcccactgcggcctgaaaagccgccgtgatgtcaaacttggccattactttgccgccccctcttccaggaactctgccacgaaggcccggtaatcctgggccgccgcggagcggggcgaccaactcaccaccggctcccccgtccaggtggactcgtccaccttggggctgcgccggatgtggctggcaaagacatggaccggggcctgctcctggagcagccgctccccctgctccaccgtgtccgagcggtaccacatggtgggcaggcagcccgccacatgcacgtccgggtagatgctccgcaggcggtcaatctgggctgtcagctcattcatccctcggaccgagtaagcgtctaccttgatggggatgaccacgtccgtggaggcggcgatggccgccgcgcaggccggggacagtgcgggtgggcagtcaatcacgatgcagtcgtatgcgtcatcctccgccaccgcgtcccgcaggtcacggatggcccgcaggttgggccgctccccctggagcagatccacgtccaggttgcgcagctcgtcgtcggccggcaatacgtccagaccccggatgctgctgtgatacaacagagcgccatagtaggcgtccggcatagccagcagcctagccaaggtgtcgtactcccccggcgggagcagggactgggtggcgttggcctggggatctgcgtcaatgagcagcacccgctggccgtactcggtggccaggatggcggccacattgacggcggtgacggtcttcccgacgccgcccttaaggttcacaatagcgatagtacgcatagctctatctcctt

SEQ ID NO: 4259 - DNA, 634 bp, Unknown
  gut microbiota DNA sequence
tgttcaaatcaaagtagattaccatcagttcgtcggtaatctccgggttaaaggacagatccagaatgaaaacttgctggttcatctcgctatccaccagactgccgaaccgcttgagcttcaaaaagtcaaccatctcagcaaaggacagtttggctgggtcggttcccggaaaaagttccgccacaatatccgggcctacatcgtcccgatggaactccatgaaaaatgtcacaacgctatggtagcggctgtcctcgtctgccagcgccgctttgatggcggctttggccttctccgccaatttctccgcctcatccagcatttcgcccaccgcgtccatggcagaaggattgtcggtcagttcctcatctacatcaaagagaaagggcagtcccgtgtcctcgggaaaagtaaagatttcctcgtcgggcgtgtattcaaaatcaatgcgtttactgtttagtttcatcaggctatcctccttatcctgcaaggttggcataggtaatgcccttcttcaaagagccgctaacctctaccgaatggccccagaacatatcgtcatcgttataataggcggtaaaacggccgccgggagaaacggaaacctcggtgagcaggatgcgctggg

SEQ ID NO: 4260 - DNA, 792 bp, Unknown
  gut microbiota DNA sequence
catatagagggatgaggagaatgatctatgtttgaagaattttatgagatgtacgagtccgaggagcaggaagtggtcgctttgatcaatcgctgcattgggggcggatttaactggaaaggtaacttttgggaaatgaccattgtgacgctgggcatagtgttctgtgacaccggcaaggtcagcaccaaagaggagcggctggattggccggtcaccgaggaggagcgtaacggcgaaaagggctggggacgctttggcaaggagcagatctgccgcctgaagatccgccggatgaaagaagaacgggcgcaaaatctggtggcgcggccctggtgcatctccgaagtggtcagagctcatgaggactgcccggagcttcaggccattctggacgagtaccacaagccggtggtgatccaggacgaagtgctgggtgagctgacgctggataaggactatgatgcctttgagggtgagatccagtggtgcggaaaggatgtacgcctttctctggaggtcaatgctgagagcaagccctcatggactcgcgcccgcaacgccgccaagaggctggttacagatcaggaaacctgggacaaggccatgcgggactttgcggccaaaaacctgactgggcttgccaacaactggctttcccaggatgaggaaagcgcccgtgacccggaaacagcccccatcacggaggaggagtttacccagcgcatcctgctcaccgaggtttccgtttctcccggcggccgttttaccgcctattataacgatgacgat

SEQ ID NO: 4261 - DNA, 1962 bp, Unknown
  gut microbiota DNA sequence
gttctgatctgtccgacgatcgcatctacagatgcaccgtgcagcgcactttctgtaatttatacagaagaaggtgtgtttgaggagtatttgttcctgccgtccaatccggatatggtcatgatggatacagagattattgcagaatcaccggttcgccttaccgttgccggaatgggagatgctcttgcaacttattttgaagcaagagcatgtcagagatcagatgccgcatcctgtgcaggcggaaagattaccggggcagctatggctcttgcaaaattgtgttttgatacgctgatggaggaaggcgtgaaggcgaagcttgcactggaagcagatgcctgtacagaagcagtggaaaaagtgatcgaggcaaatacactgctgtccggaattggctttgaaagtggtggtcttgcaggagcacatgcgattcacaatggtctgacagtactcgaagaatgtcatcatatgtaccatggagagaaagtggcatttggaacgatcacgcagctggtgcttgagaacattccgtcagaagagctgcagcaggtgatcgacttctgcatcgaatgtggacttccggttacactggaacagctgggagcaggtaagattacggaagaacagttgatgaaagtggcagaggcagcctgtgccgagacagatactctgcacaatatgccgtttgaagtgacaccgaagaaagtggcagatgcgatcaaggcggcagatgcatacggacattattttctcggagagtaagcttgtatctagtacaacatagcagaaacttagtattcgttgtactggtcagaaaaaatgacggcggatgcagtccatggcgaaagtcaggatggcattcgcctttttctgtgctataataaaagttcagaaatacaacaggagaatagtgactgttcatacagtaacggagaatggcaatttatgaatcaggtaatacagacagttctggcagcattttcaaaccagaatattgagataaatacagccagaaaactggcaaatctaaaaaaattagatccgcttcatctctgggtggagaaagaagatattgtgataaaaacagagtgtgggaagattcctttgagattatatttcccatcagaagagacaaaaaggcagaaagaagagatttcctccgcgattttttttatccatggaggaggatggtctacagagagtgtagaaacatatgacagaatctgcagtatgctatcaaaatctgttgacaagaccatcatatctgtagaatatcgcctggcaccggagtatccgtttccggcagggcttgaggattgttatctggctgcaagggcactgtatcaggggaaaatctttccaaagattgagccgggacagatttctgttatgggagacagctccggaggaaatctggcggcggcgttgtgtctgctggcaagagaccgcggggaattttcaattcataagcaaattttggtctacccggcagtaaacaactgctacacactggattctgcatatgattcgattcgggagaacggagaaggatatctgcttaccagaggaaagatgcatgactatctgcagctttatatcgggaagcaggaggatttaaaaagtccgtatgtggcgcctgttcttgcagaagatttgacaaatatgccggaaacgctggtgctgagtgcagagtttgatccgcttagagatgagggcgaggattatgccaaaagactgaaagaagccggaaataaggtgacatgctatcgaatcgcaggggcatttcacgggtattttgcacttggagtttcaagacttcatgtggaagagagttttgcgtatattgaccattttttacgggaggggtaacgatgcagaaaaagaaacgttcacagtggagaaagctggataatgcagcacaggcatttccggcagcaaccgggaagaaagatacca

SEQ ID NO: 4262 - DNA, 2645 bp, Unknown
  gut microbiota DNA sequence
acttgcaacaataacaaatggtgcaatcattgttgaatcaccagttttaacacttgtagatgttgatggttgagttgctggtttttcagtatcgttaggagtatcactaggattatcagtaggagtatctggctcttgtagatccaaacgaattgtttcaccagtttctaaatcacgagcatatttactcataaattcccacattaatttagcatctggagtatagttccaatgtccccaaccataaatacgagccatgctgatttctacacctttggcattttcaattgcaccaacatcgattttagcaatattttcagcggttggctcaattgtatagcgttttgtccaaggaacaccatatagatatgcatcttcatctttgatgtcttcaacttgagtaacttccatatcatttaattcttgataaagttgagctacttgtaatcctgcatttaattctgttgtatcaaatgcatctttacaatattcatcaccatcaccagtgaagaaaataattggcatatcatatttatctttattagcagcaacagcttctttatttaagtcacttgcaccgaatggcccggaatgaccagctccagcagcaaagtatttagcatctgatagaccggcatttgttgtatttctacttccggcagataatccagaaatataaattcttgattgatcgatctgtggatatttctcttcaatgatctttaacattgtaataacatctgaatcaggagtttcattagaatcatcagtcattggatcgtatgtatatccttgatatgtatgaccttgccattcaggacaaattaagattacgccttcttcacttgctatttgtgcccatcctgaagtatcatattgagttctaggatcatttgtattaccgtggaatagaataactactgggacacttcctggttgagcatctttagattgttcaggaatatattcataccataatgaatcagtaccatctttatctaaatcttgagtaactacatgacgctcaatattatcgattgcatcaacagaatcaaaatattggtattttcttgcttgatcagcttctttatcaccagaaagtaatggtctagagtaccaagttgctgtttgtttatagacttcactatagttaccaattcttccaaatttttctaaaacagtattccatgcatcttttgttgcatcagcagcacttgtttttgtatcgctattaacaacaacgatttcataatgactttctgggttttcataatatccatcttttaccttaccagcattatttgcttttacataactattgataacagcttgatcatcagttactaagtaagtaggaacagatactttaacttcttgcccttgagctggattaattaaagcaagtccagatacaaagttcatataagatgttaagttttgattaatgaaagttgctccatcaccaatcccaattaatttaaagttatttgaaacaccaattttacctacgatcgtttcaaaacctataacatcatcatcagtaaaagaaatgccattagcaggtctagcaacataaactttgcttgccgcccgatcaacaatatcttttattcctgattcattaatatatttttgtgcttcttcatctgttaaatttccatcaggataaacaacgaaagttgcagcagcggcagcattgactgattcaatacttaatttatcgctaccactgtaaacataggcttcgctcatttcattaactgaggccttgtaagcttcaacatactttggtaatgtatctattttagcctttgcaccattgcttgaaagctcaattgcatcaggcgcccaggcaacttctggataaggttgtgaaatagttgtaccatctaatagaccgctaataacttgtgccatatcgttgaaatattgaattgacatttcgttaggtctttgggcattgtcttcccaaaattgttgccagcgatgaccagctaaaatagatagagaaggattttcatttaaaatagttctagctaaagcacatccttcgtttaaagcagcaattgggtttccaccatttgtttcaaaaagtgcccaaataaatccactgccaaatgtatcaccagtaaataatgctccatgagtggtatctgtaatcataagagagccttcggtatgagcactgacaacattgaatacatatggggcaccataaatgttaacagtatcaccatgattaacttttgtgattttactatcaaattgagtgattgcttccgcggcagcagcataatcaggttcactgatatatactttttcaacgtcaacgtctgcgaatactgcttctgatcgtccaaagccagtatgatcaccatgactatgagtaataataattgataacagcttatttcctgtcattgaatttacgattgtttttgcattttgaatatcttcatcgttttcagagccatttcctaaatcaactaataatacaccgtcttcttctagtacaaaatacatagatgatgggttatttgttacgccgctctcatctgttgcaccaccaggaagtttttttgttccctcatcccagtgataaatattatccttgattttctctactttgtaccttcctaattctg

SEQ ID NO: 4263 - DNA, 29300 bp, Unknown
  gut microbiota DNA sequence
ctatattctcttttcgcgcaaaatccatccgggcccggccgatttttcggccgggcccggatggattttgcgcagagcagaaagacgacggcggagccgctaagactccgccggccgcaccggtacctggatctccatcagcgtctcgtcgggatcgctggtgagggtgacgtcaattttgtagaactgaaaaatcattccattcaggacccagccatgctccgccatatatgtatgcaggcgggcaaaggaggggtggtatcgctccagctcgcctctgcggtaattcatacacaggtaatcccccgggggtatcgtgcgcttatgctcggactcaatggcgtcacgctccacaaagatcatggggacggcgggaatataatcgtcgctgggctccagcaggtgccagtccgcgtagacgccgatacggtcgctggccaggatgggggccacctcgtccaggtagcgctccagccgggtgaaggcaaaggcgtgctcccgggagccgccggcaggctctccgaaggtaatcatataccgctggggaaaggcgcggcagaagaccttgtccaccggcgggggcggggtgatctcactcagaaagtggagcttgcggcgcagaatttcgctgagaagctgctgtttgcggatctcctcctccagcagctccaactgatggaggagaagctggtgggatttcctcaaattgcggcccgaaaaatagtcggtgatgtcgtggatggacatgccaagctgccgcagctccttgatggtgccaagtttttcgtattggcggatggaatagtagcggtagcgggtttggggatctacatagtccggtgtgatcagtccaatacggtcatagtaccgaagcgtttcgctggtcacttgccgcagcttcgcaagctctgtgatggacaacagattttccttgatgggactcacctcctgcgcggataagacattctatcacaggcggtcggacctgtcaaaaggctcttgtattagtgaaattaaataaaaatagcaaataattactgtgagaataaaataaaatgctgcacgagagagaaagatgcattgacttttgtgtaacacaaaggtatatgctcgttgcagacggaaagagcggccccccctggccgcactttttcctcagactcagcgcctcactgcggcaattccccaattccactttgttaaaacagagaacaaacggagggctttattatgcaggaaaataatatgtccgtttttggcaccgtgatccgcaacgaagagattgccgatttcatgcgccttctgaatctggcgcgcgaaatcttcaagcaggagctgacggtggtggagatcatgccgggcggcctgaccaataagaatttccgggccgtgaccgaagacggcacccagattgccatccgcctggccggacagggtaccgccaactatatcaaccgccctggtgaaaagcacaatgccggtgagatcgccgggctgggcattgcgccggagatctattactacgatcccaagacgggttcacaaattgttgagtacattgatgcgcccaccatgcaccccgtggactttcagacccgggacgaggtactggtcaaggcgggagcggtcatgcgccgctatcacgacagcggcctggagttcaagacctccttcgatcccgtcgccaagattgacgagtacaaggccatcctggacgagcacagctacgggaagcgctacgagggctgggagcgcatggtggaggcgctggagcgcatccgcgccgcctacgccaagcagccgccccgccgggtgccctgccacaacgacgcgctggcggagaacttcatgctccagggcgagcagatgcgggtcatcgactgggagtacggcggcatgaacgacggctactacgacatcgcctgcgtctgcgtggagaaccctctggacgcccactgtgaggatgtgttcttccgcgcctactgcggcggcgaacccagcgaggaggccaaggcccgcctgctgatcaacaagttcctggtgacctcccactggtctacctggtcgctggttcagatctgctacggcaaggacgcggacttctactgggagtacggccgtacccgtgcagtccaggcatgctccttcctggacgaccccagcttttccagcagcctgaccctgctgggcggctgatgggcaggaggggcagcccatggaattcatcggaacgctcattacctatctcatgatggcctgctgtgtcgtcggcggaatctcctacattgtcaatgaccagtcggagctgggtcgggcctttcaggacggcctgcacgccatggcaaacatgttcatccccatttgcgggctgatggcctcggttcccttcctgaaagtcttcatctccaaggtgttcgggccggtattcgccctctttggcggagatccggtggtagccgccgcgatcatcatgccgccggactgcggttccttcgccctggccaccgagatcggccagagcgcggatctgttcccggtgatcatcgccatcggcttcatgtgcgcctccaccatcgccttcaacgtccccatcggcctgtccatgctggacaagggggatcacaaatacctggccctgggcaccatgagcggttttctctctgtgcccttcggcgtgttcatcaccagcgtcatcgtgatgtttacccacccggccatccgctccaccttctccagtgtgggcgagccggatcatgtggtggtgctgaccctggggatgctcctgcgcaacatgatccccctggtggtcatctgcgtgctgctggccctggggctgaagttcttccccaacgggatggtcaagggcttcatggtgtttggaaagctgatgaccggcgccctcaccctggtggtggtggcctgcatcctccagcactacaccggcctgttcaccgacattctgggcatcggctggggctttgatcccatactggccgacgaggagaacaccttccgggccgtggagctgctgggcaccatcgccatgatgctcaccggcgccttccccatggtgacgctgatccgccggtatttgggcaagcccctggaaaagctgggccgtctggccgggctggaggccagcgggagcgtgggcctggtggcctgcctgcccaacggcctggcgatgttcccctttgtaaaggagatgcgcccccgggacaaggtggtgtgtatggccttcctggcctgcggcggatacagcctgggggacttcctggccttcaacgtcaatttccagcccaatctgctggttcccgtgtttgtggggcagatctgcggcggcatcatcggcatcctgtttgcaaagctcctggcggttccgcaggtgcgggcgctggagcgggagacggcagtgtgagacacgcggggcgggccttttcggcccgccccgcgcgttgtggttctccgtcttgggcagcagaaacgggcattcatctggatgccagcgttctcaaaattcaatgcaattcagatattgcaaagtctcgatgaaccaacttgaagcatgtccgggcctttgcgggccgcgccgtccccagcatgaaaatgcggaaaggggagccgtcctccgggcggtaaagatcaaagcaaaaaggacatccttacggatgtccttttctggtggagacgacagaactcgaatctgtgaccccttgcgtgtgaagcaagtgctctaccggctgagctacgcctccatatattggtgacccgtacgggactcgaacccgtgttaccgccgtgaaagggcggtgtcttaaccacttgaccaacgggccaggttgcccaagcggggcggaatactcctgaagggaagtcccaaaagacggcgcggtgccgtcttttggggtctggtagcggcacctggatttgaaccggggacactgcgggtatgaaccgcatgctctagccaactgagctatgccgccattgaaaaccccctgtcggacagggcaggattcagtatacgcgatcattcccgttttgtcaattgtttttttgaaaaaaattagtcaattttgtagccgacgccccagacggtcttaatgaaccggggattgcgggagggctcgcccattttttcccgcaatcggcggatatgaaccataaccgtattattgcggtccaggtatttctccccccacacgctctcaaagagccgctcggcggagatgacctggccccggttctcacagagcatccagagaatgtcaaactcaatgggggtgaggcccagctcccggtcgtagagggtacactcgtgggtggcccggttgatgaccaggccgttgaagtcaatgatgtcccggcagtcgccggccttgtcggcctcgttgtagcgggtgtagcggcgcagttgggctttgacccgggccatcagctccagcgggttgaagggcttggtaatgtagtcgtccgcgccgatggtgaggccggtgatcttgtccatgtcctccgccttggcggtgagcatgagtacagggaagtggtgctccttgcggatttccccgcagagggtaaagccgctgatgtcggggagcatcacgtccaggatggccaggtccagagcctgggtccgcaccacggccagcgcctcggtgccggtgccgcacttgaacacggtgcacccctcgctcttcaaatagacctctaccagatcggcaatctccggctcgtcgtccacaaccagaatccgcgcgtccatggcatccgcccccttttccaggacattatagccaaagcggcggcggcaagtcaagggtggggcgtaattgtaagaaaaacatcagaactcctgggcgcggccaggcgaaccctggccgcgcggagcggttagcctgacgcccggttcattttctgaatcaccaacccggtctgcacattccggccgtccacactgctgctgtaagtcagggagaaggtggtgggggccggtgcgtaaaagctgagtgcccgggctccgcctgcagtggagtcgcttccggcggtacggaaatagatgcccaggtcgatgcgggcctggccgttgaacgacggggtgatctgaagatacccaggtgaggccaggatcacaaacacgtcgaaaaagacttggtaatagccgggctggagccgaagctgctgggtgccgctcagtgtgatattgcctgtggggtcattcagcagctcatagagcggaatctgtccgttgttggggacggatcgtacatcggagtagtaggaagcaaagacatcctcacccggtccacccgcaggaccagtggggccagtggcgccgggcgtcccctgcgggcctgtcggtccggtcgcgccctggggcccctgtggcccggtggctccggctgggccgggaagtccctgcggcccggtggggccgtccatgccccggatgccctgagggccggtaggcccggtggcacctgccgccccccgcgggcctgttggtccggcggcgccctggggcccctgtggcccggtggctccggctgggccgggaagcccctgcggcccggtggggccgtccatgccccggataccctgagggccggtaggcccaggcacaccctggagaccttggcctccggcagggccctgcggccccgtggttccagagggcccggtggggccctgcgctccggcggcgccctgggggcccgtcggtccccgctccccctgcggcccggttggcccggtggggcctgtgggcccggacggggagggcggacagggcggatatggggggcagggcggcggacagccgcaggggtcaaaacagtatttcatgacaattacctcccgggccattctatgctgtgacccaccccgccgccaaaggcggctagtgacttttccgaaaaagggtggtacaatcatttttagtataaatggaggcatcctatgaatgagtttgacgccctgctggcccgggcggtggagcaggccagagccctcggtatcccggtgtcggcccgcatctccccccatgtggcggtcaaccgccgggcagtgacccggttcggctgctgcatccggcggggcggggagtatgtgattgagctgtcggagcggctgctggaggcggaggagcgggcgtgtatgcagaccctggcccacgaggtgctccacacctgccccggctgccgcaaccatggggccctctggaaggagtacgccgcgcggatgaatggggcctacggctatgccatctcccgtaccggcacctgcgaggcgctgggggtggcagatgtgcggccggtgcgctaccggctggtgtgcgagcgctgcgggcaggagttttgccggagccgccgctccccgctggtggaccacccggagcggtaccgctgccggtgcggcggcgtgctgcgccgcagcaactgaacctgtctggagaaggtgttcccaacggaaaagaaaaataagaaggccctgttcaatcgtattttctccatcgccggcctgtccatcggcggcgcgattctggcggggctcatcgtgtatgtggcccgtactatggatgtgagggccctgctggcctccatccagcccctgtggctgctgggggcagccctgtgcgtccccctcagcgaaagcgtggacgcgctgatcttttacggtatgggccgctcggcgggctgtcccgtcaagttggcgggctgctttgatgcggcctatattggggagttttactacaagctgggccccgccggcgcgccggtgcagctcaagctgatgtacgatgcgggcatgagcgccacctacaccgcctccatttacacctggaaggcagtggccaacaccatggtttacaccggctatgcagtggccgccctggcctatgagctgttctggcggcgggaggggctgggccccgccgtggcgggggcgggggcgctgattgccctctacgtgtttctgtgcgggctggccctctttaccgccgtgcggccggagcctattcagcgtctgatccgccgcatcctcaccttcctcgcccgccactggaaggtgatggccagggagggcatggtggacaagggcatggaaaaggtggacgagttctgcgcacagctccgcgccctcaagggcaaccgccggatgctggcgggcctgttcgcgggcatgtttgtggagctcacggccctgtttgccattcccttcttcctctaccgggggctgggtctgacagggggctctttctgggagctggtgctggtccagtgcctggtgctggtgctctcccgcatcatcatgctcccaggcaacgccggcggcgcggaggggagcttctacctgttcatgggccccctgttcggccggcatctggcggtggggctggtgctgtggcgctttgccgcctttctggaggttctgctgctgggcggggcctggtcggtgctccgctttgcgcagcgctcggcggccggacacgggacataggaggagaacgtcttggatggaaaatatacccgcctcaagctaaaaatgctgctgcttgtggtgctgggcaccctgatcgcggggggcgtgggcatctttctgctggaggtggtggtggatggggtgctccaggaccccttcgcccgctttttcctctgggcggccaccaccctgttcggccagagcccggagggggcggcggagctctaccagcgctatatccgcaacaacaagcaggagatcctcaccctgggtaccatgctactgatgctcatcgccttctacctggccatgggccggtttacccgctggctggacgacatccgctcggccacccgccggctggtggaggcccaggcggagccggtggagctgccccgggagctggcccccatccaagaggatctgaatgccatccagcggcagctccgggcgcgggaggcggcggccagggagagcgagcagcgcaagggggatctggtggccttcctggcccacgatctcaagaccccgctgacctcggtggtgggctacctcaccctgctgcgggacgatcccggcctggacgccgcccagcgggccaagttcactggcatcgccctggacaaggcccggaggctggaggagctgctgggggagtttttcgacatcacccggatggatctggacagcgggccgggggagcgccagcccatccagctgtccatgctgctggagcagctcgccgacgagttctaccccctctttgcggagaagcagctccagtgcacggtggaaattcagcaccacctagtggtgctgggagacccggacaaacttgcccgggtcttcgataacgtgctgcgcaacgccgtcagctactctacccccggcggccgggtggacattcaggccaaaaccgtagggcgtcaggcggagatcaccatccgaaacgaggggctggagatccccgagggggagctggccaacatcttccagaagttctaccggctggacgccgcccgctcctcccgcaccggcggggccgggctggggctggccatcgccaaggagatcgtggagagccacggagggaacatccgctgcgagagcaacgggcggcttaccagcttcgtcatctctctgccactttataaggaggtgcgccatgtctttaaacgaaaccgcgctggcctgtctgaaccgaaataggctgctctacttaaacatgctggaggtgctgcgacggggctcggcggagctgctttgggccggggagggcggggtgctgctctatgaccgggggtcgggggcctacatgcttaccgcccgggaccgggccgccctggatgggatgctccccctgctgcctgcggactgtgacctgctggtgggccacgacctctggtaccgggacgagctggccggccgcttcggcctgtggaaggaggagctgtgcgtccaggccgcctggatggctccggagccgccggaggcgccggctttcggcggggagctgcgccttttgggggaggagtgggccccctacgtctgtgagcactacagcaagagcgatatcggcggcctggagcacatccggcaggccatcggcgccggtatgctgggggccttcgtggacgggacgctggcgggcttcgcgggcttccacggcgagggctccattggccttctggaggtgctgcctgcctaccgccgccggggcctgggggaagcgctgctccggggggcggtgcggctggcgctagagcgggggcagtatgcctttggccaggtgcttatcgacaacgccccctccctggccctccagaaaaaggtgggcatgacggtcgcccgggaaccgctctactggctgtttcgcagataaagagccatttgggccggccggaagcgttcaacagacctttttgacgggcaccggccccggcgcttttcgaaagcgccggggccggtctggtcagatggcgtggtagtcctggagcagcttctccaggtcggtgccatggagctttttgagtaccgccttgagggcaaggcgctcggccgggttcagctccagctcggtgagcttgcggccgtcccgcagctggacggaggcgttgatcagatcccgcacgtcgtaggtggagccccacacctcgggcacgccccggtcgatgtccagcagggtgtagaccgcctccataccggtgcgcatggagtactcggtggtaaagatggtgtcccgctccgtctcggcgaactgccccaggaaggcgaagttcaccgccccgtcggggacgacgcggggccggtccccggcggcacggggcaggaagaaggcggtgatgtagggcatcatgcaggggacggtattggcgctgtgggcggccagctccgcaatctcctcctcgggcacccccatgtggtagagccactccatgcagatctcccgcccggtgcactcccgcatgggctttttcacaaagttgcccggcttgtcgctgaacaggccgtagatccacccaacgagctgccccctgggctggtcgcggaactggggctggcggttgaaggtccagctcagcagccagttggagtccctggcggtgacgatgccgccggtgaccaccttcccggagaaggggtcccgctggcagatgcgctggacataggggggaattttgtcgtcaagggtggtgacggtggcgctcatccagttgctcaactccggctgggagcagaacttgtccggccggccgaaggcggggtcccgcgcggcgatgcgccgccacatgtcccagccgccgccgggcttcagctccggccggaagggggcaggggaatcctgggaacccagggcggaattctccacgcagccgccgggagtgaggaaaaccaggtcgttttccgtcagatcaatgtgctcctctgccccgtcccgcagcagcaccaggcggctggcctgcttgcggccgggccggaggtcgaactccacgtccaccaccctggtgttgaagtggaactggacgccatgctcctccaggtacttgagcatggggaggatcatggactcatactggttgtagcgggtgaagcgcagggcggtgaagtcgggcaggccccccacgtggtggatgaagcgcttgaggtagagcttcatctccagggcggagtgccagttctcaaaggcgaacatggtgcgccagtagagccagaagttggactccagcaccgcactgctgaacacgtccgtgatgcgcttgtcgtacagggcctcgtcgggggtgaagaacagcttcatgatctccatggcgccctgatcgctcaggccgaacttgccgtcggtgtgggcgtcctccccccggttgaccgtggcccgcatgagggagtagttgggatcccgcttgttgagccagtagtactcgtccaggacggacacgccctcggtctcgatggacgggatggagcggaacagatcccacatgacctcgaagtggttgtccatctcccggccgccccgcatgacatagcccagtccctcgtagtgccagccgtcgcaggcgccgccggcgatgggctccttctccaggatgtggatgttccggccgggcatctgcccgtcccgcaccagatagcaggccgccgtcagggccgccaggccggagcccaccagataggccgatttatgctccacgccctccggcttcaccgggcgggcaaaggcctcgtaattgccgctggaataatacatgaaaatgcctccgtttcatagcgttgctttggattctggggccagtatagcccctccggaacggcggcgcaatcagcagaggggccccggtgatggaagtttcatcaccggggcccctctgtctcaattttgatcaaacgggcccgcctgatgggcggaatccgcccgcaggcgctccagcgcctgggcaaagctgcccgaaaccaccagctctacccggcgggccagctccgccggctctcccttcatgccggtgcggatccagtccagaaccagccccacaaaggcgtacttgtagaagtcggccagaaaggccttgtcctcctcccgcacctctccccgggggtccagctcctccaccacgcccatgagcaggccgtgggtgacctgaaagagaaaggtctccacctgctcccggcggacggagcggtagacgttgaggataaagggcctgttgtcgatcagcccgtccagaatccggcggaacccctcctgccaggtggtataggtgcgcttgccgtccagtatccgccgggcgtcctcctggcaggcccactccaccaggtcgtagatatccttgaagtggtagtagaaggtcatgcggttgatgccgcagtcctcggcgatgtcggtgacggtgatcttgtccagcggccgctccagcagcagcttcttgagggaggcctccagggcccgcttggtcacctggctcatggctcacctctggtccagcggcacaaaggcgcgcatgggggccaccgccttgtaggccgggcggatgatgcggttggcaggctggcagacctcctcgatgcggtgggcgcaccagcccaccatccgggccacggcgaacaggggggtgtagagctccatgggtatgcccatcatcttgtaaaccagtccggagaagagatccacgttggcgcacaccaccttctcctcccccttgacggagcgcagcacctcgggggtgaggcgctccacccgctcaaagagctcaaactcgtccagcatgcccttggtctcggccaggctgcgggcaaaccgcttgaggaggacggcccgggggtcggacagggtgtagatggcgtggcccatgccgtagatgaggcccgagcggtctcccgcctccttccgcagcaggcggcccaggtagtcccgcaccgcgtcgtcgtccgtccagtcggacacctcggcctcaatgtgtccgaacatctccatgaccttcttgttggcgccgccgtggcggggacccttcagggagcccaccgccgccgcgatggaggaatagatgtcggtgccggaggaggagagcacccggcaggcaaaggcggagttgttgccgccgccgtgctcggcgtggagcaccaggcacagatccagcagccgggcctcctcgtcggtgtaccggttgtcgtggcgcacggagtagaggaagttctgcgccacgctcagcccctcctggggccggtggaggtagagggactcgttgtcgtagtagtgccgcttggccgcgaaggcgtgggccacgatcaccggcacgcgggcaatgagctccaccgcctgccggagctggttgggcagggacatgtcatcgggccgcccgtcataggaatagagggccagcaccgagcgggccagcttattcatcacatcggggctgggggccttgaggatcatgtcctcggtgaacatgggaggcagggcccggtgggcggagagcagtccctcaaaggcggtgagctgggcccgggtgggcagggcgccgaagagaagcaggtaggcggtctcctcaaagccgaagcggccctcgctgacaaagccgttgatcagctcctccacgtcgataccacggtacaccagcttgccgggggcgggaatccgctcgccgtcctggacgtaatagcccatgacgttgccgatctgggtcaccccggccatgacgccggtgccgtcggcgttgcgcaggccccgcttgacgcggtagcgctcataaaaggccgggtcgatctggttatgcttctggtactccgtgcatagactttcaataaagtcggcggaggcgtccctgaccgcatggtccatatgcaacagctcctctgtctggtttcatttgtcccatattgtattctctttttatcaaacagtcaatctgaaaaaagcaaggacgggcgaaatctgaatgatgctgaaacaaaacttgcaaaaaggagggggcggagggggaatgaagcaggtggtggccaccgccctggtgctgctgctcaccctgtttctgctgccgctgctcctgctgggggaggagccgcttgccgggccgtcccagccccccgccgccaccggcaccctgcccatcgaccgcaccgtggtcacccccggccagacggcggacggccgggtacaggtgcgggtggccctggaggacggggaggtgctcaccctgccgctggacaagtacctgtggcgggtggtggcggcggagatgcccgcctcctttgagccggaggccctcaaggcccagacggtggccgcccgcacctacaccctctccaagatggagcgcaccgtggaggcccacccggacgccgacgtgtgcaccgacatcacctgctgccaggcctacatcgacccggcggacgccgccgccaactggggggagaacgcccagacctacaccgacaagatcgccgccgccgtggcggataccgacggcatggcggccctcttccagggccagcccatccaggcggtgttcttctcctccgccgccggaaggacggtggacgcggtggaggtgtggggcaacgcggtgccctacctcaccagcgtggacagccccgagggggacgaggtgcccaactaccactccaccgtcacagtgcccctggacgagttcaaaagcaagctgctggcccagtacccgcaggccgatctgtccggcgagccggcgggctggtttgccaaccttgtccccaattccgccggcggggtggagacggtggacatcggcggcgtcaccgtgggcggtggaagcctgcgcaccctgttcggcctgcgctccaccagcttcacggtctccgcctcggcggatggggtcaccttctccgtcaccggctacggccacggcgtgggcatgagccagtacggcgccaacgccctggccaaggaggggaagacctacgacgagattttgaagtggtattacaccggcatcgacgtggccccctatacgccccagaggtgacaggcggccccggcggcacatgcagccggggtcgcctgaggttatcgataaaccctcctgccgaagatttcggagggaaggatagtgtgaaagggaaccgtcagggttccctttcgcgttggatcaaaataactgtttgaaacttttctgaagtttcaaacagtttggcagcctgtcgaaaagactttgttcgacaggctgaggcggccccggcggcacatgcagccggggccgctgcgtcagaaagagaggccgcgggcttcctcataggcggtgagccacggggggctgttggcggagtcgtagccggtggggaggatgccggcgctgccgacaaagctgccgccggcgtcatagacgtattccatatagccgtagtcctcaaggctgccgccgatcacgatgtcgtgggcggagccgtcggaggcggtataggaatagacatacggctccgcctccgagaattgcccggtgatgtccagctcctccccggtttctgtggtgaaatagacgctgccgccgcgcacagtgaggagatcaggctcctcccttaccggaaagcacacgttctcctgggatggtgcaaccgttgctccggcgtccggttcgttccagtttacgctgtcggttgatgtaaacgctccgccggagagcagcgggatggagcccagcgcgccggaggcggccagggcgcccgcagtgagggcggcggccacggcagcggcggcgacgaggatgcggatggggcgtctgggtttggtggtcatggcagttacctccgattcggtatgggagcagcgggaggccagggcgcgccgttgctcctctacccggttgaggggggggcaggtctgggccaggacttgctcaaaagtcctctgatagagcttcttcatagccgagttcctccagcttcttcctgagttgttgtttggcccggtagagccgggcggagagcgccggggcggtggtgcggaactggcgggccagctcggccaccgtgaacccctcgtaatagcgcaggtggagcagggcccggctgtcgggggacagcgcccccagggcggcaaacaggccggcctcctccggcgtctcgaaggtcagccgctccagggccgtgtcgtcgttctcccgccgcctgcgccagggggaggtaagcagatcccggcagcggttgaccgccacccgggccagccaggggcgctccttccctggggcagggggcttctccagcagggtgagaaacacctcctggcacacatcctccgcgtcctgaggcgagcgggtatagctgagggccaggccgtacaccatggggcggtattggtcgaataggggaagaaattccgcttcggtcatcccggagcctcccttcgtcgtttgtggccacatcaataagacggcggggcgggggcggatctgacggccccggcgggatttttcgggaaaaccgcattgtaaaccggcccgtcctttgttataataccatattgggacggagcgcaccgcctgatccctaatctgttgtaaagtgagagatcgcacatgaacacacgctatgacgttgccatcatcggctgcggcgaggccggcatcttcgcgggctatgagctgatgcaccgcaacccgggcctcaaggtggttaccctggatcagggggcagacatctatacccggagctgccccatcgtggcgggcaaggtgaaggagtgcatccactgcaaggtgtgtgacaccatgtgcggcttcggcggggcgggcgccttttccgacggcaagtacaatttcaccaccgccttcggcggctggctcaccgacttcatgcccaagcgggaggtcatggagcttatcgactatgtggactccatcaacatgaagcacggggccaccgaccaggtgttctccaccgagacccccgccgcccaggcactggagaagaaggccctggagtatgacctccacctgctccaggcccggtgcaagcacctgggcaccgagaacaacctcaagattctccagagcatctatgaggaggtgcgccagggcgtcgagttccggttccgcaccgccgtcaccaaaattgagaacctggggaaggagggctaccgcctcatcaccgacaagggggacgaggtggactgtacctggctcatcgccggacccggccgctccggcgcggagtggttctccaaccagtgcaaggagctgggcatccagctcatcaacaaccaggtggacatcggcgtgcgggtggagctgcccgccaaggtgttcgagcacattaccgacgtggtgtacgagtccaagctggtctaccgcaccaagcagtacggcgaccaggtgcgcaccttctgcatgaacccctacggccacgtggtggccgagaacgtggagggcatcaacaccgtcaacggccactcctactccgatcccaagctgcgcagcgagaacaccaacttcgccctgctggtgtccaaccgcttcacctcccccttcaacgagccctaccgctacggcaagcacatcgcctccctgagcaacatgctggccggcggcgtgctggtgcagcgcttcggcgatctggtcagcggcatccgcaccaacgagcaccgcatgagcaagtccttcgtccaccccaccctcaccgccgccgtgcccggcgacctgtccctggccctgcccaagcggcagttggacgacatcattgagatgatctaccagcttgacaagctggcccccggcaccgccaactacgacaccctgctctacggcgcggaggtcaagttctactccgcccggctggccctgtccaacgagctggaaaccgccctgcccggcttcttcgccgtgggcgacggcgcgggcgtgacccgcggcctggcccaggcgggcgcgtcgggcgtaaaggtggcccaggtgatttcggagcggctgaagtaagccccgccggcacccacccgattcggagtgctcgaagcagatttgacatctccagagaacggccgccgcaggcggcccctgcccgccggcagcccagcgcaagcgggtgccggtgggagcggaggagcaagggagcggacgcaggttttgccgtcaggcggaaccggagtcaagcggactttgcgacgacgcggcccaggcgggcgcgtcgggggtgaaggtggcccaggtgatttcggagcggctgaagtaagccctgccggcacccacccgattcggagtgcctgaaataagcgtgcgttcaagtgcggcgccctcccctgcgggggagagcgccgcctttctgcacccctctgccgccggtgcatagaatggcctgaacggaaacagacagggggacgggtatatggacgaccggatacaggagctgctggagcgggcgcgggagaccgccgccaccgccggggagtacgccggacagatggtggacacggcccggctgcggggaaggctgttcgcccttcggacggacatcaacggcctgctccatacggcggggcggctggtgtacgacgctcaccggggcggcgccggcggagaggacgcgctggagcaggtgttctcggagctggaccacaaggaggccgcggcggccgagctgcggagccggctcgagcgcctccggcaggagaagccgctctagccgcggggaggcgggacccggacgggtcccgcttttttgcggctttttcggaaagggggcgggaagttgccctttttcattgcttttttggcggacggggtgtaaaataccatgtaatccttgcggccgcagtgcttgcggcgaaccgtcagaccgtatttcgggcccgtccgggccgcttattacaaataaggaggacaagctttatgaactacacgtttgcccaataccaggagagcgcggactacatccgcagccagatcggcggctttgcccccaaggtggccatgatcctgggttccggcctgggctacatgggcgatattgtggaaaaccccattgccgtgccttatcagaatatcccccatttcaaggtgtccaccgcccccggccacaagggtcagctggtgttcggcaccctggaggggcagaaggtggctgttatgcagggccgtatgcaccactacgaaggctactcctatgaggaggtgtcctacgcggtgcgggtgctccgcctgctgggctgcgataccctgatcgtcaccaacgccgccggctgcgtcaacctggattggaaggcgggcgacctgatgcttattgccgaccacatcaagttcttcatggagtcccccctgcggggtgagaacctgcccgagttcggcgtgcgcttccccgacgcctcccacctctacacccccgccctgcgggagatggcccgccagaccgccagggagctgggcatcgagctgcgggagggcgtctacatgtacttccccggcccccagtacgagactccggcggaggtgcgggccgcccgggtgctgggcgccgacgcagcgggcatgtccaccgcgccggaggtcatcaccgccggccactgtggcatgcgggtgctgggctttaccctcctgtccaacatgggcgccggtattctggaccagcccctctccgagcaggaggtgctggatgcggcggcggcctgccgggacaagttctcccgcctcgtgctggcctgcctgaaaaagattgactaaaaggagcctgccatgtctattctgatccataactgcaccgccgtcctcatggacgaggcgggcaccgtcctccccaacgcctatgtggtggtggaggggacgaagatccgctccgtcagcacccagcgcccctggggctcctttgaggagcagatcgacggccagggcaacgtgctcatgcccggctttgtcaacgcccacagccacgtgcccatgaccgccatgcggggctacggcgacggcaacaacctccaggactggctgcacaactacatcttcccggtggaggcccgctgggacgaccgggccatccgggcctgtaccgacctgggcctggcggagatgatcgcctccggcgtcaccaccatcgcggacatgtatggccacaccgacgcggtggcccaggaggtggcggcctccggcatcagcgccaacctgtgctgcggcggcgtgcagttcaccgacacctttgaccccgccacccaccacgactgtgtggtgcagcgggagctgaccgagaagtggcacggctacaacgacgggcagattctggtggacgcctccatccacggcgagtacacctcccaccacccgctctggcagtggatggcggactacgccaaggagcacggcctgggtatgcacgtgcacatctccgagacccgcaccgagcatgccgagtgcctggcccgccacggcaagactcccattcaggtgctcaacgactacggcgtgtgggatgtgcgggccatcgccgcccactgcgtctggaccaccccggaggactggtccgttatggcgtccaagggggtttcggccatccacaatcccatgagcaacctcaagctgggcagcggcatcgcccccgtccccgccatgggcaaggccggtgtcaacgtgtgcctgggcaccgacggcgtgtcctccaacaactgcaccgacttcttcggggacatgaagctggccgccattctccacaacggggccaactgcgaccccctggccctgctgcccatcgacgccctgcgcatggccaccgtcaacggcggcaaggccctggggcggctcaccggccggattgaggggggctacgacgccgacctcatcctggtggacttctcccacctgaaccttaccccctgccacagcgtgatttccaacctggcatatgccgcccacggcagcgacgtgtgcatgaatatggcccgcggaaaggtcatatacagagatggggacttcctcaccatcgacattgaccgggtgaagcgggaagtggcggactacgccctgcccctgctgtttgaaacgaaataagggggcctagcattgtccaatcagcaaaaaaagaataccttttacggcgcggccgctatcctgacggtgagcaccattctggtcaagattatcggcgccatcttcaagatcccgcttatcgccatactgcccgaggaggcctacggcgatttcaacggcgcgtataacatctactccttcttcctcaccatctccacggcgggcctgcctgttgccttgtccaagacggtgtcggagtgccatactctgggccgggagaaccagaagcaccgggtcttccgggtggcattctgtgcgttcctgttcatggggctgttcagcttcctctgcatgtcagtgttcggacaactggtagcaacctatatcattggcaatgagaaagccgtgttctgcgtgtgggcgctggcgccggcggtgctgtgcacctgctgctgctccgccttccggggctatgcccaggggcacatgaacatgatgcccaccgcgatctcccaaatcattgaggcgttgtgcaagctcttcctgggtttgggccttgccatggtgatcatgagcctgaccctctggccggaggacatccgcaaccggctggcggcctccggcgccctcatcggcgtctccttcggcagcgtgctgtcggtgatctatctggccttcaaccacttccgtacccgccggggcagcgccgcccgggccgccgaccagcccgaccggagccgggtggtgctggcccggctgctcaagctggccattcccatcaccctcagttcatgctccatgtccctggtgactatcatcgacaccaacctggtgaacaatcagctccagaatgtgtttaccgccattcagggcggtatgaccggcatcagcaacagttttctggatatctttcccaaggctgtggagatctttcagaacaatacggatgcctggcagcaagccctgctgacagacccggccaccaagctggacccgatcctggactctgcccgcagcctctacggcacctacagtaagaccatgagcgtctacaacctgccctttaacctgatgatccccctgacggcctgcatcgtccccggcatctccgcctgcctggcccggagcgaccggctgggagccaagcggattaccgagtccgccatgcgggtggccgccctcattgccctgccctgcggcttcggtctgctggctctgggcggccctattatggaactcatcgccctgggcaatgtggatacggccatcgccggtcccatcctgtccatcctggggattgcctccatttttgtctgcttccagttggtgggcaccgcgatcctccaggccaacggcatagtgaatctgcccatcattacggttattatcggcggcgtcactaagattctggtcaactacaccctggtgggtaatcccaaaatcatgatcttcggcgcgccggtgggcactctgagctgctttgcggtgatctccattctcaacctgctcatcatcaagcggtgcgtgcccaatccgccccgctatctggtggcgctgtccaagccgctggcggcctccgtggtaatggctgccgccgcatggggaagccatgggctgctcgcccgcgtcctgaacggtagtctgacccgggatatggcggccaccgccggagcgatcctggtgggcgtggtggtatatgtaattttagtcctggctctgcgtaccctgacccgggaggacctggaaatgatgcccgggggcaaaaagctggctaaaattctgcatatccagtaagttttttggaaaaagaggttgcaggaggccttgaaatatggtagattttcagtataaggattcttacggcgtcaaggacttggaggagattgtccgcctcttgcgggcgcccggcgggtgcccctgggacgcggagcagacccaccagtccatccgccgcaatttcctggaggaggcctatgaggccgtggaggccatcgacgagggcagccccgagcacctgaaggaggagttgggcgatgtgttgctccaggtggtgttccacgccctcatggagcaggaggccggccgcttcgatctggacgccgtggccgacggcatctgcaaaaagctcatcttccgccacccccacgtctttggggaggtgtcggtctccggcaccggcgaggttctctccaactgggaggagctcaagcggaaggaaaaggggcaggccaccaataccgacgcgctggaggccgtagcccgctccctgcccgccctgtggcgggccgagaaggtgcagaaaaaggcgaaaaaggcgggcttcgactggccggacgtgtccggcgccctggacaagctgtctgaggagctggaggagctgaggaccgccgtggccgagggcaccaatgtggaggaggagctgggcgatctgctcttctccgccgtcaacgtctcccgtttcgtgaaggtggacaccgaggaggccctcaacggggccaccgacaagttcatcggccgcttccgcaaggtggaagaggaggccgcccggcagggccgcgccctggagggcatgagcttggcggaattggacaagctatgggagcacgcaaaagagacttaagggcgggttcgccttaagtataatcagactggggtgattcccccagtaaacacaggaggagttatcgatatgaataaggctgaactgatcaatgcggccgccgagaaggccggcctgtccaagaaggataccgagaccgccatcaacgcggccattgaggtcatttccgactgcctggccgagggcgacaaggttcaactggtgggcttcggcgcctttgaggtgaagagccgcgccgagcgcatcggccgcaaccccaagaccaaggagagtatcaagatccccgcctccaaggtgcccgtgttcaagcccggcaaggcgctgaaggacatcgtcgcgaagtaagtcagaagcgcgtagaatggtgcccccgcggcgctgtaccgggccggcggaggcgtaggggcggtgcccacacccgcccgcgggccgatgagggcatcggcccctacgcgcggaagaggagtgggtgcccaggagtccctttcgccgcaggcggcaaagcgcaccccttccgccgcggcttcctcttcccgccgaacccgcggcgagggccctgaaaggggacgtaccccgtgttgtaggggcggggcttgtccccgcccgcgggcggccgcaagggccgcccctacaggggtgcacagaatggttcccccgcggcgctgcaccgggcccggcggaggcgtagggacgggtgcccacacccgcccgtgaggcgagtggccccatgcccggctgggccgcatccacagagagaaccacagggccgccgcaggcttgcggcggcccttgactatgttgactatggaggaggaagattcccatgcgactggacaaatggctgaaggtctcccggctcatcaagcgccggacggtggccaacgaggcctgcgacaacgcccgggtcacggccaacggccggccggtgaaggccagctacgacgtgaaggcgggcgacgtgctggagctgcgcttcggcgagcgcaccgtaaaggtggaggtgctgtcggtggccgagcacgtgggcaaggccgacgcccccgccctgtataaagaactgctgtgagggcggaccgcccccgccgcgctgagagcaaaaaacagccctcccatatatgggagggctgttttttgtggcttacttgcggccgccgcggcgggagctgcggcgctccgactggcgcagctcggacagcttgctgtccgaggcggccatgaactgcttgagccggtcctcaaagctggcgggctccgccggggcgggcttgccgcggaagccgccaccggtgtgcccgccggggcggcccatgggacggccctgacccgcggggcggggcgggggatccatagcctttttgatggagaggttgatgcggccgttctcgtcaatgccgatgaccttgaccttgacctcctgcccttccttgagatgatccttcacatcgttgacataggaataggcgatctctgagatatgcaccagacccgacttgccctccggcaaggagacgaacgcaccgaactttgtgatgcctgtgacctttccttccagaactgaaccaacaccaaactccatactgactgctaaatcctctctcataaattttcaatcggtgaaacggaagatatactcgcccggctctaccaggcccagcttgccgcgggcgatgtcggcctgccggtcgggatcatcgctgttttccacggcgtcggacaggtcggcgttgacctgcttctgggctgccacctgcgcctcggcctcggccaggtcgctctgggcggtcagaatctgctggcgcagattcagcagcccggtggcggcgccgataagcagggccagtaccaccagcttggtcaggagggacgcttttttggttttcacaggcggtacctcctcccgacgcgcggcggtccgagcggtgcagctcatccatttccctggatatcagccttattctataccactttcgccgataatggaaggacttttttgcggtttttccgatttttttacacagcctcaggagaaacactaccggtagtgtaagcacacgccacaaaaccccaacgagatcggccagacggtagcccagcttgaggaaccagcggctcagcagccagaaataagccgctgcgcccaggaggacggccgccacaatgtaaaggcgcacttcgccgctgccggcggtggtggtgtagacaaacagggcgacggtgaccaccagccagaacagcaggtccagcactccacccagcagggggaggcggacgcgcacacggaggatgcggaacgcgtcgtacagcagccccaccgccgcccccatcaccagcgccccggcaaagaagagggcctggtcggtgacggatacggtcatttcagcggaagagccgggcaaacaggccgcccgccctgtcccgcccgctgtcctcgtaggtgagggagtcgatggtgccctccaccttcaaatccccgccgtccaggctcagcttctcgatgtgcagctcctccccccgcacgatgagggtgccccggttggtgagcatgacaatggtgttctcgtcaaagctctccacctcctccacgccggagactgagagctgttcgcgctcctccagaatgatgtgatgggccgcctccgcccgcggacggttttcttcgtacggcatggctctcccccgcctttccatagtcttgtctcatatatatgggacaggtgggcgggttatgccagggccctcagcggcggctgatccgaagggcgggggccaggcggcggctcaacagccaggccagcgccagcttgactgcgtcgggcaggaggaaggggaacacacaccagcccaacacggtgaacattcctaccggcccggaggagctggtgtataccgcgtagtaccagacggagccgaacaggtagcacaggatctgacccacgacggcggaaccgagaaagacgggggcggattttcccagccatcgctcggcgccccacatggtgagggcggtaaaaaggaagcccaccagatagccgcccgtggcacccagaaaggcccccaggccgccgtggaagccggcaaagacgggcagtcccacggcccccagcagcagatagacggtcaccgccagggtgcccagcctgccccctagcaggcccagtgtgagaaagacggcaaaggtctgtagggtgaaggggacggcggtggggatggagatccaggagcagacggcgatcagagccgccaggatgccggtgtaggccagttctcttgtcttcatgacaggtgttccctcctgattgtaaacttaaaaatgattatagtttacatttaataaaatgtcaactaaaaagagatataggttgacgatttaggaggggacgggtacaatagagggcgaaaggaagtggagcgaatgctgcgggacgaggtgctggcgctgttaaaggcccgggaggggaagcccctgtcgggggaggagatgagccgtgccctgggggtgagccgggcggcggtgtggaaggccatggagtctctgcgggacgaggggtatgtcatctcctccgccccccgccggggctacgccctggagggctcgccggaccggctgtccgccggggagctggccggagccctggcgggccgccgggtgggccgcgcgctggtgtgcctggagacggtggactccaccaacaacgaggtcaagcgccgggccctggccggggccgccgacggcctggcggtggtggcggagcagcagaccggcggccggggccgccggggccgctcctttgtctcccctgcggggcaggggctttatctgtcggttctcctccgcccccggtgccctctggaggaggtgtcggccctgacggcgtggacggcggtggcggtgtgcaatgcggtggagcgggtgtgcggcgtgcggcccgggatcaagtggccaaacgacgtgatcctggacgggcggaagctgtgcggcattctcaccgagctggagctggaggcggagagcgccgccctgcgccatgtggtggtgggggtggggatcaacctcacccagaccgcagccgacttcgggccggaggtggccccagtggccgtctccctggcccaggctctgggacgggccccccgccgggcggagatggcggcggccgtgctggtcgccctggacgagctgtacgccgccttcccggcagagcgggcggcctggctggagcggtaccgggccgactgcctcaccctgggccggacggtgcgcctgctccgggcgggcggggaggaggaggcctttgccgaggcggtggacgataccttcgccctggtggtgcgccgcgccgacggcagccgggaggcggtgtcctccggcgaggtgtccgtccggggcctgctggggtatgtgtgatctccaaaagcgcgggacgtgtcccgcgccttttgcttgacaaatccgcctgttccgctataataagacaagttatgtgtcatgacatgtgtaaaggagagacggaaatatgggagcatgcagcgcatttctcaagcgaaaaaatattgtcctctcggcaaagcggtatggggtggacgcattgggggccatggcccaggggctgttctgttccctgctcatcggtaccattctggacacgctgggcaagcagctcggcatcgccttcctggtgacggtggggggctacgcctccgccatgagcggctcggccatggccgtggccatcggctacgccctccaggcgccgcccctggtgctgttttccctggccacggtgggctatgccgccaactccctgggcagcgtcaccctgtccggcggcaagggggcaggcgggccgctggcggtgctcttcatcgccgtcatcgccgccgagctgggcaaggcggtgtccaaggagacgaaaatcgacattctggtcacccccctggtgaccatcctggccggagtgggactgtccgccctgctggccccggccatcggcaccgcggcctccgctgtgggggacgttgtcaagtgggccaccgtgctccagcccttctggatggggattctggtgtcggtggtcatcggcgtggcccttactctgcccatttcgtcggccgccatctgcgccgccatcggcctgacggggctggccggaggggccgccgtggcgggctgctgcgccaatatggtgggcttcgcggtgctctccttccgggagaaccgctggggcgggctggtcagtcaaggcctgggcacctccatgctccagatgggcaacatcgtccgcaatccccgcatctggctgcccgcgatcctcacctcggccatcaccggccccctggccacctgcctgttccggctggagatgaacgacccggcctccgccgtggcctccggcatgggcacctgcggcatggtgggccccatcggggtgtacgccggatgggtcaacgatgtggccaccggggccaaggcggccatcacctccttcgactgggccgggctggcgctcatctgctttgtcctccctgcggtgctctgctggctgttcggcctcttcttccggcgcatcgggtggatcaaggagggggatctgaccctggagtgacagggcccggcgtatcgccgcgcgggcagcacgcggcgcgcgcctgtaggggcggcccttgtggccgcccgcggacggggaggagccccgcccctgcaattttccgctgaggccgtcgaaaaaaccgttcggcaggttgcggcgcggctcttgccgcgccgcttttttgctgtgcaaaggcggagcaaaattggccgtgtgccccctgccgcgtcccaggcgcatgaagttttacgcggaattgacagatccggcccgcctgtgttgttatagaggtgaaagggggcgaggccatggacgggacgcgggcggaggagctggtggagcggtacgccgacgccatcctccgcatcggctacacctggctgggggacatggacgacgccaaggacatctgccagacggtgctcatcaagctggtagaggagggccgtcgcttccccgatttgggccaggagcgggcgtgggtggtgcggctgagcgtcaacgcctgcaagaactggaaaaagagcgcctggttccgccgccgggcgccgctggaggagggcctgcacctggcggcggaggcgccggagccggaggacggcgcgctgctggccctggtgaacggcctgccccccaaataccggcaggtgg

SEQ ID NO: 4264 - DNA, 5491 bp, Unknown
  gut microbiota DNA sequence
gccggccattggccggcgcccctttctgtatgggggctatttcagggcgaggatgacaggggtgccgaaggcggtgcggcgggtgaagtagagccccatatcaatggtgtcccaggggtagttttcgatggtatactcctcgatgaagtatccctcgggcagcggggtctcgtccggggtgccccaccagagcaggtcgctggcgtaggaagatgtgttgttgaaatagtgctctgtgccgtcgggagtgcggtaggcggtggtaccgatctggaaaaagttcaggtggtactcgtcgcttccggggggcatgggggcgtagaaggccaccgccaccgacccgtcctcgtcccgacgggcgctgacgccggccccctcgggaggctctgccagggcctcgccggtgttcagatcgatgggcagatactcccggcccttctccagccactctgccttggtgatgtgcagggtgagggagtccggatcgctgaaataagggctctcgaacaggtaggagtcccccatggcggtcaggccgctggcggagcccttctcatagcggttgcccttcttgtcctccagatagaagtccagactctggagctcctctgcgttgtctgggtcctgctccagatttagccgggcgtgggtggggtagagctccagatccacaatccggatgttgttgccgtccagctccagccagcggttcacctccactgtgcggccctggccccggaactgctgctccaggggaaagtcgaaggtgaccacggcgtccgccgtccattccccggcatcggtgacatcgggtatgtgggcctgcacctcgcaggtcaggcggagggactctggaagctggggctcctcctcccccttgaaggccacggtgatggcgttggacagcgctccgggggtcacgctgtccatctgcacggagcagttctccagcctttccccattgggggtggtgaacgttgcacggggcataaaggacgtggcctcctccggcccggtgatggagaggaagagggtcagcccgccctggtcggccatcaggtactccaggtggacggtgatgccgttgtccgtagcgctctggccgatatactgcacatagtcgttttccacagcggccttgaggctgggggagaaggccacggcggcggccagctccttgagcacgggcactctcccgcaggccagggcgaagggggtggacaggttcaccaggagcacgaaggcggcaaacaccgccgccgcgctcccggcgggggcgctgatccgccgccacagcctccggcggcgggccctggcccgggcgcgggccacggcgccctccagggcggggggcagctcctccggtgcgtcccggagggccttgtattcttccatgcggtccatggctcaaacctcctcggtcagatgcagcttcaacagggacagggccttacgctggcgggtggatacggtgccaggcgggatgtccagggcctgggcggtctccgccagggtgaggccctggaagtagcgcagtaccaccaccgcccgcagctcacggggcaggcgtgcgacggcctcccgcagggggagcgcgtcgaaggcctccgctgcggtctcgggcagctcggccaccgccagctcccgcttccggcggcgcagctcggcgttgcaggcgttgatgaggatgcgggtcatccaggtggcgaaatactccggctggcggaggcgtttgtagtggagaaagccctggtacaccgcctcgtccaccgcgtccacggcgtgggcctcgctgcccagatagagccaggcggtgcggtagagacggtttttcaggccctccgcctgttgaatgaattcctgttcggtcaagggtggcgccccctttctgcctattagagaaaccggcgggccgttttcattgcgtttcttgaaaaaagtttggcttcattatataatagccgggtcagagaaaaaagaggtcccggaggaatcctgttttgaatcaactcgaccaacttcccatccccctgctccagtggtaccgcgaaaacgcccgggtgctcccctggcggagcgatcccaccccctaccatgtgtgggtcagcgagatcatgctccagcagacccgggtggcggcggtgctggactactaccgccgcttcatggaggccctgcccaccgtggccgatctggcggccgtggaggaagaccggctcatgaagctgtggcagggcctaggctactacaaccgcgcccgcaatctccagaaggccgcccgtcaggtgacggaggacttcggcggggcgttccccgacacctatgagggccttctcaccctgtccggcgtgggggagtacacggcgggggccatcgcctccatcgccttcggtgtccccgttccggcggtggacggcaacgtgctgcgggtggtggcccgcatcagcggagacggcggcgacatcgcccggccggacaccaaggcccggatgcgcgccgccctccaggccgtgcttccggtggacgcccccggcgacttcaaccaggccctcatggagctgggggccacggtgtgcctgcccaacggcgcgcccctgtgcgaccggtgcccggcggcggacttctgcaccgcccggcgggaggagcgcaccggggagctgcccgtcaaggcggcaaaaaaggcccggcgcatcgaggcccggaccgtgttcctgattttctgggaaaagaaggtggccctgcggcggcggccgggaaggggcctgctggcgggcctgtgggagtatcccaacgagctctcccccgccccctgcccggtggaggcggccgggttatccgacggcccggcggggaagcatatcttcagccatatcgagtggcacatgaccgcccaaatcttggaggccgcctcgccggagctgccggaggggtgggtgtgggccgaccgggccgccctggagcgggattacgccgtgcccaacgcctttcagtccttcgccggggcggtggaggcccggctgtgaaggagagcgccatggaggatgtactggccgcccagcggcggtattttgacagcggggccacccggcacctccggttccgccgggagatgctcacccggctggagctggccctcacccggtgggagggggagctgctggaggcgctgaaggcggatctcaacaaatccccctacgaggggtatatgagcgagctgggccccaccctggcggagctgcgctttgcccgcgggcatctgaaaaagtgggcccggcccgtccggcaccccgcccccctgtcccagttcccctccgtgggcacggtgtaccgggagccctacggcgtgtcgctgatcctcgccccgtggaactaccccctgcttctcaccctggcccccctggtatccgccatcgcggcggggtgcacggcggtggtgaagccgggggaggacgcccccgcctccgcccgcgccctggcggaggtgctggggcgggtgttcccgccggagtatatcaccgtggccgaggggggacgggaggaggcggaggccctagtggccaagcccttcgacgtgatcttcttcaccggcagcccggcggtggggaaaaaggtcatggccgcggcggcggagcacctcacccccgtcaccctggagctggggggcaggtcgccggtgattttggcccccgacgccgatgtggagctggccgcggcccgcattgcctggggcaagttcctcaacgcggggcagacctgcgtggctccggatcacgtctgggttccggaggggatggcggagccctttgtggccgccctggcccggcagatcacccgcttttacggtgagaaccccctggccggggaggagctgtcccgcatcgtcaaccggcggcacttcgaccgtctggccgggctgctgtccggcgggcggatcgccgtgggcgggcagaccgacccggagggcctgcgcatcgcccccacagtgctggtggacgtgccggaggacagcccggtgctggcggaggagatcttcggccccatcctgcccgtgctgccctaccggagcctgccggagctggtggaggcccagaggcagaagccccgcccgctggctctctacctgttcacccggagccgctccgtccagcgggcggtgatggagtccctgcccttcgggggcgggtgcgtcaacgacacggtggtgcacctggccgacccccgcctccccttcggcggggtggggaacagcggcatgggcgcctgccacggcaaagcgggcttcgacgccttcacccacgaaaaaagcgtactgaaaaaagggcggctggacattcccgtccgctatccgccctatgggaaaaagaatctgggtattttgaaaaaactgatgtgacgcgggaggaacaccgacatggcaaaactctatttccgctacggggtcatgggctccagcaagacggccaacgcgctgatggtgcgctacaactacgaggagcggggccaggacgccctgctggtcaagcccgcggtggatcagcgggacggggcccggttcgtggcctcccgggcggggctgagccacccgtgcatctacttctccgacctgatggagatgacgccccgccagctcaagccctacgcctgcatcatcgtggacgaggcccagttcctcacccgggacgaggtgcgctacctcaccgatctggtggacgactggaacatccccgtcatctgctacggcctgcgcaccgacttcaagggggagctgttccccggctcggcggagctgctggccacggcggacgtgattgaggaggtcaagaccatctgctggtgcggcaagaaggccctgtgcaacgcccgctttgacgagagcggccacgtcatcaaggagggcgagcaggtggtgctgggggccaacgacaagtacatcggcctgtgccgcaagcactggaaagagggcaacttagggccgcagtaactccgggcccatgcactccacggccggcagaaagcccagccgcagcccctcggagaaggcgtactgtccgtggcccagcacggggctgtcctgcagctcctccggccagtgccgggggttcggatggccgacgaaatattgatagagttcttccatcgcaggggacatgaaaatcacctcctaacgtcctttaagtcgttatcataataacactactaaaaggtcgtgtcaagagaaaagaggaaaagatgcaattttgtgagaagctctatgccctgcgccaagagcgggggttgacacagaagcaggtaggcgaggcgctttccatggccgcccgtcaataccagcgctttgaaaagggcgaacagaagccggggtttgacaatctgcggaacatggcggacttttacggggtgtcggtggactggctgatgggccgcacagagcgccgggaggtctggcggtaaccgggccctgtaggggcggcctttatggccgcccgcaggcgat

SEQ ID NO: 4265 - DNA, 59322 bp, Unknown
  gut microbiota DNA sequence
gcggcgggcatgcccatgcccgtcttaaaacaggccggagattctgccgttctcgtctacgtccaccttttcggccgcaggcactttgggcaggccgggcatggtcatgatgtcgccggtgagggcgaccaggaacccggcgccggcggacaccttaatattgcgtaccgtgatggtgaagcccctgggcgcgcccagaagggcggcgttatcagagaaggagtactgagtcttggccatgcagatgggcagggagccaaagcccagctcagtgagctccgccgcctgcttttgggcagcgggggtgagcaccacgccgtcgccgtgatagaccttcgttacgatagcggccagcttgtcctcaatggaggcatccagctcgtaggagaaggtgaagcggttgggcgcatcgcagaggcggatgacctcctcggccagggcaacgccaccctcgccgcccttggcccacacctcggagagggctacgttcacccccagtgcacggcaccggttctccaccagctccagctccgcctcggtgtcggtggggaaacggttaacggccaccacacagggcaggccgtagacctcggtgatatttgccacgtgctggagcaggttgggaaggccggcctccagggcggccaggttttcactccccagctcggctttggggcagcccccgtggtgcttgagggcgcggacagtagccaccaccaccaccgcatcggggtggagccgggccagacggcacttaatatccaggaacttttccgcgcccagatcggcgccgaagccggcctcagtgatcacatagtcgcccatcttgagggccacccgggtggccatgacggagttgcagccgtgggcaatgttggcaaaggggccgccgtggatgaaggcgggggtgccctccagtgtctgcaccaggttgggcttgatggcgtccttgagcagggcggccatagctccctcggccctgagatcgtgggcggttacgggggcgccggagcggctgtaggccaccaccatccggcccagccgagccttcaggtcggtgaggctgtcggccaggcagaggacggccatgatctccgaggccacggtgatgtcgaaaccgtcctcccggggaacaccgttgaccttgccgcccaggccgcacacgatgttgcgcagctggcggtcgttcatgtccacgcagcgcttccaggtgatacgccgcacgtcgatgtccagaatattgccctgctgaatgtggttgtccagcatggcggccaaaaggttattggctgcgccgatagcatggaagtcgccggtaaagtggaggttgatgtcctccatagggataacttgggcgtagccgccgccagccgcgccccccttgacgccgaagacgggccccagagaaggctcccgcagggcgacaaccgtattcttgccaaggcggcgcatgccgtccgccagacccaccgtggtggtggtcttgccttcgcccgccggggttggattgatggcggtcaccagaatcagttttccatcggggcggtccgcccggtcgtccagcagcttcagatcgatcttggccttgtattttccgtagtactccaggtattcctcgtccacaccggccacggctgcaatgtcccgaatgggctttatcgcacaggcctgtgcgatttcaatatccgacttcacttccacatccacacactcctttatacacttcggctggaaaagagagaggaagatggcggtgtgcccccgacatcttccgtttaccttccagaatttcaagtttatcgtaacatcctttgcccgccttgtcaaccggaggtggaacgggaaatggaaggtccgggggacaaaaacggaaaaggcaaattcagcttgcctagggcttgtttgaaaattggcgatgtgtccagcggcgaggaattttgggccgctggcaagcaattttttcgcaggaatcctgacggatttcaaggaaaaattgcgccgtccagtggtcaaaaggcccgtcgattgggcatgtcgacatttttcaaacaagccctaggtattaaaattcagaaatgtggaggtcacccgtggaggctggagtaaaaaaagaaagacacgacgtacgtcgtgtctttcttttttggtacggctgaagggattcgaacccccgaccttttgattcgtagtcaaacactctatccaactgagctacagccgcatgtcattgagaggactgtatttgtcctgctcgctgacggcttgattatattagcacaggttggaacagaatgcaagaggaaaataaaaatttctccaaaaattttcttcggccgggagaggatcgggtcaagtggagcgctctccctctgcaacaatgcgctccaggcaggccatcagatccgacatggtctccagcttgacatccatctgcaaaatgtgctcccggagctcgggtggcatggagtcaaactttgcacggatagcgggattgacataggacatggaaatcacctcgccgatagtatggacaggggtacggaaattcataccatgaaaggcaataaaaacgcgctccggaaccggagcgcgggagtttttggtctgtcccccacagagaggcgtctgccaccctgcgggggtacagtggttttgggtgtttgaaaagagaggaaagagaggaaagagaggaggagtcttgattgattgctctggtatcctgacaatctctattttaacaggtctaagcccaaagtgatgaaccattttcaaatttagtatgaacgttttatgaacgcggaaaacgactttttccctgggtaaagggaaagaaaaatggccatataccgccaggcatgccaatgagcgagcgtactcgcagcgcatgaagtgctacacagtacgaatgcggtacagggcgttgagcacccgccagttctgggggaagggccgcatcaggttccaatagccaaccccgtatagaccatattcggggatcaaggccagcttggcctgtatgctacgggcatcctcaaaccagacctcatgggttatgccgtagccatcagtatagcggtaccagggggcctgggcctgctcgctgtattggatatccacaccgtagcggaccgccctggccaccgcctcctggggggaaatggactgagccttggtacgtccctgcacaaaggggagcggccagtcgtagccgtagagggggacgcccagccagattttggaggccgggatttccgtcagggcatactccaccacttggcgcacattgggcaggggagccactgccatcggcggaccataggtatagccccactcataggtcataaggagtacctgattaactgccgcaccgatggcggcgaagtcgtggccctcatacagtgttccgggctgatcggcggcaattttgggggccaaggcggcgataaccggatagcccaggggattgagccgctctgtgaggcggcccagaaatgcggcataggcccccgcatcctcggcgtagacatattcaaaatccacatccagcccccggtagcccttttgcaccagcatggcctccagattgtcaaccagcgtatcctgtaccgcaggctgagtgagggccaagtgggccagctcattggagaagccgccctcttcggtcagggtggacaggtgcatcagaggagcggctccaccttggcgtgctgcggcgagcagggcctcgtcatccaactccaccagcgtgccgtcaggggtaaagccataggtaaagggggtcagataggtgagataagggacggtggattggagcagcgccgggtcgataaagggataggcgtagccgttgacggagagggtggcctccggcgtgctgtcgtaggcgagcaccagggtctggccaggatagatctccgggataccgccgagtatgggattgttgcggtagagctggcgcagtgggagctgataggccgcggcgatggaggccagggtttctccgggctggaccgtgtgggtctgggttggaaattgaaccaccagcgcctgccctacagccagacgggaggaggtttccaggccattgtccaagatgagctgggacatgggaatgccgtactccagggcaatggagtagacagtatcgccgggtttgactacgtggatgagcatggcagtacctcagagcagggtgatgaaatccgcgttggcccaacccaccacgctgtcaaagcgcaccacataccagttttgccactggttgaggacggtgagccgcgccccatcataggccctggccaggacgggagaagaggtgtccggcttatcccggatattgagatagccccaggagacatccactacggcaggacgcgaggggcgaggctccaggaagggcacgccgaagtattcggtcagggagagcacgatgttgcgggccacggcctccagattgtttttaatccacgcagcatcgtccgcgttgtcgtggtagcccagctcaagaaagacggagggagcgcggacgcggcgcacttcaccgacggaggtggttggttccgcccgtacccggttgggcagtggataaagggttttcagcccatccgccaccaatgtggccgcccgttgcccctggacagagccgggatagtagaacaccagaattccacggatctgaccgtactgcccctccggggcggcattggagtggagggccaggtgcaggtcgtagttgccagcgttagaggcacggatggacgaggcggcggtcatgtcgggggtattgcgggagtaacggatcccggatgcggtgagatagggctccatggcgtcggccaggcggttcatccactcctcttcggtgcctccgttgacatacaggttgttctcctgggtggagggggagagatagatgatgggcatagggatacctcctttttgctccatcctatgcacggagacgccgtagggtcattgcagagataaaagcagggcccgccgtgttggcacggcgggccctgcttattcccatcggctcgattcagttgagccgggcatccaggatatccagctcctccgagagctgacggggcagcttgtcgccgaacttctggtagaactcccggatgcccttgacctcgtcccgccagagggcggtgtccacgcccagcaggcccctgagagtgtccggctccacgccggagtcctctaggtcgatgtcctccggccggggctcccagccgatgggggtctccaccgcctcggcctcaccgaagcagcgcttcaagatccactccagcacccgcaggttgtccccgaagccgggccagaggaacttcccgtcctcgtcggtgcggaaccagttgacgttgaagatcttgggggccttgccgcccagcttctcccccatgcccagccagtgctgccagtagtcgcccatgtgatagccgcagaaggggagcatggccatggggtcccggcgtaccacacccaccgcgccggcagcggcggcggtggtttccgaggccatgatggagcccacaaataccccgtgggtccagtcccgggactgatagaccaggggggcggtccaggcccggcggccgccgaagacgatggcggagatgggcacgccccggggactctcaaactcgggggagatgcaggggcagtttttggccggcgcggtgaagcgggagttggggtgcgcccccttctccgaagaggtcttgccgttccaggggcggccctgccagtccaccgcgtgctccgggggattcctgtccagaccctcccaccacacggtgttgtcgtccaggttgtgaaccacattggtgaatatggtgccctgtcgggtggtggccagtgcgttggggttagatttgacattggtgccgggggccacgccgaagaagccgtactccgggttcatggcccacagccggccgtcctcgccaatacgcagccaggcgatatcgtcccccacgcaccagaccttccagcccgccttccggtagtgctccgggggaatgagcatggccaggttggtcttgccgcaggcggaggggaaggcggcggcaagatagcgcacctccccctgggggttctccacgcccagaatgagcatgtgctccgccatccagccctgctggcggcccaggtaggaggcgatgcgcagggcgaagcacttcttgcccaatagcacgttgccgccgtagccggagttgacgctcatgattgtgttgtcctcggggaagtggacgatgtagcggttctcggggtcaatgtccgccttggcgtggagccccttgacaaagtcgtctcccatcacgtcggccacggcccggcctacccgggtcatgatggccatgttgagcaccacatagatggagtcggtcagctcgatgccgtacttggcgaagggggagcccacgacacccatggaataggggatcacatacatggtgcggcccttcatggcgccggtgtaaagctttttcagcttggcgtacatctcctgggggtccatccagtggttggtggggccggcgtcctcctgctttttgcagcagatgaaggtgcggtcctccacccgcgccacgtcgttcaccgccgtgcggtggaggtagcagccgggcagcttctcctcattcagcctctcaatttccccgctggcgcaggcctgcttccgcagctcctccagctgggcctcgctgccgtcaatccaaacgagctggtccggctgggtcatggccgccatctcgtcaatccatgccagtaccgcgcggtttttggtcaatgccatgaaagtgtcccccttttgtgatgtaatgcagaaaattctgttagctgtattgtaaaagaaacgggcggtttttgcaagtccttttcgtcggatttgcaaaaactgcccggtctactggctcagagacggttctggagggcggaggccagagtggcaaattcagggatacccagccgctcgccccggatatcggcgggcagtccggcggcatcgatggccccccgcaacgcgtttttggacaggcggctgccgaaggcggaggagaggccgttgaggagcgtcttgcgccgctgggcgaaggaggctctgaccacctggaagaagaagctgtcgtccaccagattctgagggggggcggagcgggggacgagccggattaccgccgaagtgaccttgggggcggggaggaagcactccggccccacctcaaagagcagttccggctgggtgtgatactggcagaacacagagaacgccccataatcgctggaaccgggggcggcgcagatgcgcagggccacctcccgctgaatcatcaccgtgatggaggcgaagcacccggcctcaatgagggcggtgagtaccggtgtggtgatgttataggggaggttggcacaggcaatcgctgtaaggccagaaaacttgtcagacacaagagcggccagatccagcttcatggcgtcccccggcaccacctcggcgttggggtagggggccagcgtctcggccagaatgggatagagggtgcggtccagctcaatggccgctaccttggccgcccgccgggccagctgcaccgtcaaagggccgatgccggggccgatctccagcacgccggtatccgggcctgcgccggaggcctccgcgatgtccctgggtacccatccctcaatgagaaagttctgtcccatgcttttggagaagcggaagccgtggcggcccagcagggcgcgaatgtccttttcattgcataaatccattgggaatcacctcgtgtcccagggagcacatcacctggaattcctgttgaaaatctgtaatggctttttcctttacggggaaaagggcgtcaaaagcgtccagcgcggccacatcgggggcataggcaaagccctcgcggaagcgcccggcggcgtttgccagggagccgggtaccagttccagcgcctggaggccaggcagatactggccgttctccagggcaatgccccagcgctctccgcaccagaagccgtagcggccgtagtgccggggatcgcccagaatcaccacagcctgttcccccagggcctgagcctgccgcagggcatggcacaccagggcgcgggccagtccttttccctgaaaagaggggaggacggccagggggccgaaggtgacggtgtccagccgcccgccagcctcccgctcgatggagctggaggcgcaggcgatctgcccggccaggacgccgtccacctcgcacacgaaggtcagctccgggcggaaagcgggggactggcggagcaggtggagatagtagtgctcatcgcagccgggcttgtagacgttccagaaggcctcccgcaccagcgtctccacggcgcggtggtcggcgggggcctcgtggcgaagagtcagtgacatagtgaatacctcaaacagcagattttgctcgtataccaggaaacatgagcggagtggtatacttgtgccatgttttccggcagccccgcaaggggcgggaaaacggctgaaatgcaagtgcgtaatagctgcggttattataccataaaaaacagggacaggctatgcctgtccctgttttttcagcgggcgcttcaacatcagcagggtcttgatgtcctccacaacctccggggagtccacctccagggacagccaccgcccggagcccatgggcttgaccgcctgccagcaggcctgggtatactccgagagggtggggagaagggcctccgcctgggccggggccaccaccaggcaggtgaaggcgccggcggcggggtagagggtacacagagccttgccgccggagcggtacttgacgttccagccccgccccatggaacagctgctgtagctgtaaataggggaaagggaataggcttcacagatccagcggttcaatggctcccacagcggatgggatacataggcggagagttgctccgcagtgggctcctccggcccgggatagatggcgttccagtccattagttgcgccaccggagcagactggggaagaactgggccatctgcgcccgggcctgctcgggggtcagctcggggttggcccgcaccatcatgggggtgcagaagtcgatcatctcctccatggtcatctctccggtaaaggctccctcctgataacagtatttgcagtagtgctcgctgggcgtgccgccccgctccgtgccgcgaagggccggatcgtcgatgggcatgccgcaggattgacaaaaggtgtgattcatgtgagattcctcctgtgattgagatggctccatcctatcacagttatcctgacaccccgtgtcatggtttccgtggtgggccgccatttttcccgccaacagcgccagccgtttccgcaggcgctccggttccaacacctccactcccagaccaaaggagagcagatagccatagagccacggatcctccggaaagctcaccgacaccacgaggctgccgtccgccccgcgggtgacgcagccctcgtcgaattcgtcgtagacccggtaggcaagggcgggggagaagcgcaggcggacagggatgcagaagccctccggcggctctccggcctcgatgggcgggggagagagggggcgctgaaagggagcgcccggctccggctccagcatccgggtgagcttgaaggtgcggtaggccgcccgctccaggcagaacccctggaggtaccagtcccggcccttgaagaccagccgcgcggggaggacgctgcggcgggtggtctggccggaggcgcccacataggtgaaggacaggacgcggcgggacagaatggcctgcttgagctggacgaatttggcgttgtcggccccggcgctcccccagcgggacagctccacttgcagccagtccggttcccggcgccggaacagggcggacagcttggacagggtctccgccgtcccctgtccggcgtcccccggcaggctccgcagggcggtgagcagcagctgctgctcttcctcagtgaaggcggcccggtggagggtatagccctccagcagggacaccccgccgcccttgcccggcgtgctgtacaccggtaccccggccgccgacagcgcgtcgatgtcccggtagatggtgcgcaccgatacctcgaagtgctccgccagctgcggcgcggtcatgcggccccgctccagcaggagacagagcagctcaaacaatctgccctgggacatcagcgatttcccagccgggccatcaccagcatgtccacgtagtcccccgctttcacggcggcctcccgtttgcggccctccgtctcaaagccgaagcgctggtacaggcggatggcgtccccgttgtcggcgtagacctccagctccacccggtggagcatcagccaattgtccgccagatccaagaccgcctccaacagggcggtgccgatgccctgtccctggcagtcggtgcgcaccatgatgcccaggccgccggtgtgccgccgccgggggttggactccacggtcagcatgaccaggccgagcacggtattatccggcgatacggccaccagaacatgccggccctgtcccggctggcggagaagctcctccatacggcgggggcggtcggaggggagggaggccgcctgttcaaatacgccgggcatccgccgcagtgcggtgatccccgaggcgtcctccggcccggcggggcggatggcgtaggtcatggtgcggtcacccccggacgaatgcgggccatcttgtactcgtccacatagcggccgttccgcaccgtggtcatgcgcagcaggccctcctgttcaaagcccagcttctcatagagacggatggctcgctcgttgtcggcaaagacctccagctccacccgcaccagcatgagccagtggtccgccagatccagcagtgtttccatcagggtggtgcccacaccccggccctggtagtccgcatgcacaaagaggcccaccgcgcccacatggcgcatccggggattggagcagaccgtgaggccggcgcagccgattaccgtgccgtcgtccagaacggccacaaagttatggtcgtcagggcccagcccggcgatgaacgcctcgctgtcggcggtgcggtaggaggggaggccgagcgtattctcaaatacgcccggcatgcggcgcagagctgcggccccctccgcgtcctccggcccgatggggcggatggtgtagttcataaaagcacctcccaaaactatttttgccatgatagcacaggcaggggcaaaaaacaaccgcccggaggaaatttcctccgggcggttgcggaatggcttgatcgaaatcaataggccacgacgatgccgccgtcgttggcatagacggtgctgatgccgccggtatcgctgatgaggatctccccgaaacggcactgcttcatgaccagctccttgacgtggaaggcccgctccaggcagttgcagtggacgatggacagccggcgcccctcgtgcttgggatccgccgccatcagggacaccatcttggacagggcctgcttgatggacatggcctggccctttttgcagatctcaccctcgggggtggcgcccatgagcagcttgatgtgcagggtgctggtaaccagggactgcaccctggtgagccggccgtttttccgcaggttgtccagggtttccagcacaaagtaggtctccatctcattgatgtagcgggagacctggctgaccaccgtggtgaagtccatgcccgactgggccagctcctggattttcagggccaccagaacctcgcccgccgaggcggagcaggagttgaagatgtgcacattggagttggggtggtcctccagccagaggctccgcgcctgggccgccgcgttgtgggagccggagagcagggcggaaagagtgaccacatacaggtcgtcggcgccgcagtcaaacgcctccagatactggatgggggaagggcaggaggactggggagccgtggcactctccttcatccgccagagcagggcaccctggtcaaaggaggcatcgtctaccacgatatgctcacccacccggatggtcagcgggacgctgacaaagcagtcctcccggagctgggcgggcgttaaatcgcagcaactgtcgacaatgatcttaaaactcatagctggaaccctcttatataataatgaaaattagattactagtgtgcagtcattgtagcacgggcgggcggaaaagtaaaggggaaacctgtaaacaaatgattgcgttagaattggggggcttcctcgtccagctcccgcagcagcttttgatcctccttggaggaaagatccagtctggcgtagagatccgggcggcgctggcgggtgcggaggatggactgcttgcgccgccaacgggcgatgttcttgtgatcgccggagcggagaatgggggggaccttccggccgtgccactcctcggggcgggagtactgggggtactccagcaggccgttccagtggctctcctcctcgaagcactccgggtcggagagcaccccgggcaccagccgggccaccgcgtcggccaccaccatggcggccagctcgccgccggtgagcacgaagtcgccgatggagatctcctcgtccacacactcctcaatgaaccgctcgtcgatgccctcatagtgcccgcacaccagaatcaggtggtcgtaatcgtcccgcaggcggcgggcgtcggcctccacgaaggttttgccggcgggggacatgtagatggtatgtcccgggccgaaggtgtccacaatgtgcttccagcactggtagagggggtcggcctgcatgaccgcgccgtggccgccgccgtagggatagtcgtccacctgcttctgcttgttgagggtgtaatcccggatctggtgggcctcgatgcgaatgatgtcccgctcctgggcgcggcccaggatggactcgttcatcatatcgcccacggtcagatcaaagagggtcataatatcgatcctatacatcggtacgcattccctcgatcagacgaaccttgatatagccgccctccacattggtctccgccaggaactcgtccacggcggggatcatgtattcatgctcgcccttcaccacgtagacctcgtgggcgggcggggtgagcacgtcggccacaacccccagcttctccccgctgccggcgtccaggacctccaggccgagcagatcggcgataaagtgccgcccctcgggcagcaccacgccggagcgatcgatggagacgatcttgcccttgagggccatggcggcattcacgtcggcgacgccctccagcgcggcgaggacattgcccttgtgtacccgggcggcgcgcacccttacgggcgttccgtccagatagagggtgccgaactggagcagaaactcggggctgtcgcaccaggggacgattttgacctcgccctggatgccgtgggtattcacgatctgcccggcctccagaaactgatttttcatttgaaatacctcccgcaggcggcgcgtccaggaggccgcgccctacattgaaaaagcggcggggctcgctaccccgccgctttttagtcgacgatttcgacggaaaccttggtgccctggcgctgggccacggagcgcatcagcgtgcggatctccttggcgatgcggccctggcggccgatcaccttgcccatgtcctcgggggccacccgaagctccagaacggtctcactctcgcccttgtgctcggtgaccgacaccgcgtcggggtgatccaccaggttccgggcgatataggtcagcaattccttcatgccagccgtgacctccattagatggcgccagcttttttcagcagagccttcacggtctcagtgggctgggcgccagtcttgatccaagcctgggcgcgctccgcgtccaccttgatctcggcgggctgggtcagaggattgtaagtgccgatctcctcgatgaaacggccgtcgcggggatagcgggagtccgccaccacgatgcggtagaagggagccttcttggcgcccatccggcgcagtctgatcttaaccattgtatcttcacctccatgtaattgttgcacatctatggaaacgcgccgcagcgcgcttaccaaccggtcagaaggggagtcccggcagcttgccgagctttcccatttttccaagtttgcccatgcgcttcatctgcttgccggagaactgcttggtcatctgctgcatcatatcgaactgcttgagcaggcggttgatgtccacgacctgagtgccggagccggcggcgatgcgctttttccggctgttgttcagcagggaggggttctcccgctccgccggggtcatggacaggataatggcctcggtgcgggccagggcgttctcgtccacgctggccccttccagtgccttggcgttcatgccggggagcatcccggcgatgtcggacagggaacccatgcccttgatctgaaccagctgatcgtaaaaatcagccagggtaaacttgttcttgcggagcttctgctccaactcggcggctttcttggcgtcaaaggtctgctgggccttctcgatgagggagagcacgtcgcccatgcccagaatacgggaggccatgcggtcggggtagaagagctccacctggtccagcttctcgcccacacccacaaatttgatgggcttgccggtgaccgccttgatagagagagccgcaccgccccgggcatcgccgtccagcttggtgagcatgacgccggtaatgtccagcgcctcgtcgaaggtctttgcggcattcaccgcatcctggccgatcatggcgtccacaatcagcaggatttcggtggggtcaatggcggccttcatcaccttgagctgctccatcagctcctcgtccacgtggagccggccggcggtgtcgatgaacacaatatcgttgccgtgcttcttggcgtgctcgatgcccgccctggcaatgtccaccgggtcaatctggcccatctggaacaccggaacgtccacctgctggcccaccacctctaactgggtgatggcggcggggcggaaggtgtcgcaggccaccaggaggggccgcttgccctgcttcttcataaagcccgccagcttggcgccgttggtggtcttgccggcgccgttgaggccgaccagcatcaccaccgtggggggcttgggggagatcgtcagcttggtgttctcgccacccatcagggcggtcagctcctcattgacgattttgacaatcatctgggcgggggtcaggctctccagcacgtcggagccgatggcccgctcggtgacggtggccacaaactgcttgaccaccttgaagttcacgtcggcctccagcagggccatgcggatctccttcatggcctccttcacgtcggcctcggagaggcggcccttgccgcgcagcttcttgaaggcggcggagagcttttcggtcagtccttcaaatgccatgggttactcctgtttcaactgggccagaacgcccttgagctgtccgcacagggactccagctcgtcgtcctgccaatgggcctcgttgcgttgggcgatggcgtccaccgccgtctccatctggccgaactgctcctgcattctgtggaagcggcggatgatgcccgtcttgtcctccagctcggtgaggatggcctcggcgcggacgatcacatcccggacgccctggcgggtgatgccgtagttctccgcgatctcggccagggagagatcctcattgtagtagaggtcgtagaactccttctggcggtcggtgagcatgtcgccgtagaaatcatagagcagggccatgcggtatgcctggtttttcatcgctgccgcctcctcccgtgtgccggttttctgtaaaggtggtaaagctacggagctttacaacagaagtgatgatactataaattggccggattgtcaagagaaagattgcgtcttttccggctctgcggcgtaccagagggggaggcccagcaaaaccgcgccgcccagcaggttgcccaaggtgacccacagcaggttccagcccatggaggcccagtccgcgccgccgttcagcagggcatggagtgcgaaataggccatgttggcgatggagtgctccagtccggtgaggacgaaggtggtgatggccagggtgatcaccagggccttggcggtctcgctctggaggcggaagccggcgaacacgccgatgcacaccagaaaattgcacagcacgccccggaggaggagcagataccagggggcggacagcttgcccgggacgatcagggccagataggcccccaacagctccccgctggagccggagccggccagcagcaggcagagcaccagaatgcccaggagattgcccaggtaggccagcgcccagacacggagggttccggccaggcggacccggccgtcgtagagggatacgctcatgaccaggatacagccggtgaacagctcaccacccagcaggacaatgagggtgagagcggcagagaaggccagggcccccagcagcttggccagagggagattggtgtcgtagaaccaggcggcgcagaggctggagagcagggcgcccacaaagataaatgcccccgccagggcggcccgggtcagatagcggcccggcgcggtgccggagaagcggagcttctgcactccggcctgcgtgatctgttccacaacggttcgtgtcatggtgtggcctccttataaaatataggtaatttcattttaccggaggttgggggcgggagcaagctgccgcggcaccaatcttttttcgttttcctagtgtcaaaaccgtcaaaacgttgtataatatccgatgttgatactttggcagttcccataaggaaaggaatggtaaagctgtgattgaggtcacccggacacagcttctgcccggcgtccatctgacggcggtgcagacgcagaaattcaaatccagcgtgctggggatgcagttcctgctgcccctggcccgtgaacaggccgcgctccacgcgctgctgcccatggtgctccgccggggcaccgcggagcacccggatatggaatccctctccgccgttctggacgagctgtacggcggttccctggagcctacggtgcgcaaaaagggggagacccagtgcgtgggctttgtgggcagcttcttggacgacgcctatactctggacggttccgccgtgctggagccgtcggccgccctgctgggggagctggtgctccgcccgtacacccgggacgaggtattctgccccgactatacccgccaagagcgggagaacctggtcacccgtatccgcgcccaggtcaacgacaagcgccagtatgcccaggtgcgtgtggtggcggagatgtgcgccggagagcccttcggggtggacaagttgggggatgaggcgtccgcggcggccatcacaccccaaaagctgtgggactgctaccagcaggtgcttcgcactgccccgatagagttctactattgcggttccgcccccctggagcgggtgcgggcggcggttcaggccatcgtggacggcctgcccgcaggggagcgcgcgcccctcgcgcgccccgaaaaggggaacgctcccgcccagccccgccgggtggaggaggcgctggacgtgacccagggcaagctggccatggggttccgcacctgcattgacgcctgggacgaggattacccggccctgatgctgctcaatgcggtctacggcggaaccaccacctccaagctctttctcaacgtgcgggagaggctctccctgtgctactatgccagctccggcctgatgaagtacaaggacgtgatgctggtctcctccggcgtggagttctccaaggtgggccaggcgcaggacgagatccttgcccagcttcaggcctgcaaggacggcggctttacagacgacgagctggagtgggcccgccgctcggtggtgagcaccctgatgaccaccctggacgcccagagccgtctggaggattactggctgggtcaggcggccgccggcctcaccgaggcgcccgacgagctggcccagcgggtggagcgcaccacccgggcgcaggtacaggcggcggcccagaagctgacgctggacacggtctatttcctgaaaggcaaggagtgagcccatggtaagcaaagaatacccccgcatcggggagaaaatctatcacgcggagctgcccaacggcctgcacatctatgtggaccggcggcccgagtttcagaagagctacgccttttttgccaccaactacggcggcatggatatgaagttccggctggatggccagtggcgggacactccggcgggggtggcccacttcctggagcacaagatgttcgataccgaggacggcaacgccctccaggatctggcggccaacggggcttcccccaacgctttcaccagctcggccctcaccggctactattttgaaagcacggagaaattctgcgacaacctgaaaattctcctctccttcgtgtccattccctggtttacccaggagagcgtggacaaggagcaggggatcatcggccaggagatccgcatggtggaggacgatccggacaaccaggtgttttacggcctgatggagtgcctgtttgatcaccaccccatccgggtgcccatcgccggcacccaggagtccatctcccacatcaccgccgacaccctctacgcctgccacaaggcgttctacaccccctccaacatggtgctcactgtggcgggggacgtggagccggaagaggtggtgcgcattgcccgggaaatcctgccgaaggagccgggcgggcacattgagcgggattacggcggggaggaggacggcgcggcggccaagccggaaaaggagctgcgcatggaggtgtccacccccatcttccagcttggcttcaaggccgagcccgcccccgccggggaggagcacctgcgccgccagctcatgggcgagctggcctgcgaggcgctgctgggcaattccagccccctgtatgccaggctctacagcgagggcctcatcaacaagaactttggctacggctttgagctctatcccggctgtgccctgatggcggcgggcggcgagagctgcgatccccgtgcggtgcgggacgccgtgctggccgagggggcccgcatcgcccaggagggtgtggacgagggcctgttccgccggctgaaaaagggggtgtacggcgccaaggtgcggggcctcaactcctttgaaaacgtgtgcatcgaactggcccaggcccactttgccggtgtggagtacctgaccttccccgaggtgttcgacggtatctccaaagccgatgtggaggactgcatccgccgctgggtgacgccggagcggtgcggtctggccgtggtccggccgggggaggaggcatgatgggaaccgtctcctttcccggcctgggtctggaattccacctgaaccgggtggccttccacatcggaagttggccggtgtactggtatggcatcatcattgccgccggattcctgctggccgtcctgtactgctgccatgcggccaagcgcttcggcatcaagcaggacgacatcatcgacatgctcttttttgccgtgcccctgtccatcgtaggggcgcggctgtactacatcctcttttacctggacctctaccgccgggaggacggttccctggactttggagctatggtccgcatctgggacgggggccttgccatctacggcggcgtcatcatggcggttgtcgtcctgctggtgttctgcaaggtgcggaagatccgatttctggcctttgcagacctgggggtgttcggtatgctcatcggccagatgatcggccggtggggcaactttgtcaatattgaagcctacggcggccccacagagctgccctggcgcatgggcatctatgcctatgtggacggagtgcggcagtacatggaggtgcaccccaccttcctctatgagtctctgtggaatctactgggctttgcccttctggtgcagattgcacggcgctggcggaagtttgacggccagatgttcctgagctattttgcctggtacggcgtgggccggggctttatcgagggcctgcgcaccgacagcctgtacctgttcggcacctccatccgggtgtcccagctgtttggatttgccacggcggccatcgccatcgtgctgctggtgatcaacctgggcttccgcaaacacgacccggccaagctgtgggtgaatcagatgaagcggcgggcccgccgggtggcgctggtgtatccggctggagtgcctgcggcggagaagtggctcaaggcccagaagaagagcctggagcaggagtttgccaagaccgaggagtatgcactgcccaagggaaccccggcggaggagactgcggagctggtggcttccctcaaggcccgggaggatctcagcgaggtacgccagccaaaagcgggcaactaaaaaataacagaggcggtggacagaatgtccgccgcctctgttattataggtagcgcctgactgatttgcagtagcgctcgtaagccgcgccaaaggtctggaggcaccagcgctcctcggcccggatgatggtgtgggcggtgagctgaaagacaaggagggcggccagaagcggtagcgactgcgtgaggaggacgcagcccagaaagacgaaaaaataggagacatacatgggattgcgggagatgcggtagacacccttgtggcgcacgccgctctccgagggggccgcgaagccgatgacggagagcaggagaaggagcaggccgaatgcatagagggccgctccgctccagaagaggggggcgggcgcagtatggaccgacgcgaagaaggggcccagcagcagggcggcgctggagagctgatagagccagtaggcaggcttttcgggcccgcggaacggggggaagtgggcggcccgccggagtgcgctgctgtccagcatggagagcattccgaagcgcaggcttagaaatggaatcagcagaacggccgccatgatatgtcctccctgtgtcatgataacccattatagcacggggcggcggggaggggaagaggaggaaggggcgggatacccatgggtatcccgccccttcctgttgtttgccgggctcagcccagcagcttgctctccagatcctggagcataatgtccagagcggtgatgccgccctcggcggtgtaccatacggcggggtgggccaaatagacgatattgccgttcttgtaggcatcggttcccatgaccagctcgttctccatgatttcctgggcgagctgggcgccgtcagtttgaatagcggcgtcccggtccatgacgaagatgtagtcggggttcttctccacaacgaactcgaaggaggcctcgttgccgtgggtggaggtgtcgatgtcagcatccacgccgatgttctcaaagccgatctcccggccgatgatggagcagcggccgtcgttgcccagcacgttgaagccgccgctggtgcacatacccacaacggcggtcttgtctgcggcgaagtcggccagggtctggatgcgggcgtcaaagccggccatcagctcgtccaccttgtcttccagaccaaacatggaggcgatggtagcggcgttttggcggacgctctccaccacgcccagctcgctgtcggtggcgaggtagaccacgggggcgatctcgctcagggcgtcgtaggacttggccaggcggccgccgatgaagatcacatcgggctgggcggccatgaccgcctccagatcggcggttttgatggtgcccagattggccacgttctcatcggtcacatagctctggaggtagtccagggaggtgtcggcggagccgacaacgcggcccccggccacgcccagggcatccagaatatccagggaggccatgtccagaatggcgatgcgctgaggatcgtaggggacctccagctccacggcctccttgtcggcgttcagggaggtgatggtgacggtttcgggggcggagggagcctcggtgccggccgcagggctctccacggcgggggaggggctgccggtggaccgggtgtcgtctccaccggtggagcaggcggtcaggcccagtgcgagggccagggcgagtgcaagagagattccttttttcatgtgtgttctccatttctaagcgaatgttcgcggttgtttgagcggcagggtcaatagtagatggacagggggcgaccctcgatctccatgatttcaaagtccacctgatagatctgcgacagcgtttccttggtcatcacctcctctacggttccgaatttggcgatccttccgtccttgaacgcgcagatgtagtcggaatagaaggccgcgtagttgatctcatggaggaccagaatcaccgtctttcccagctcatcgcagaggcggcggacgattttcatcatgttggtggcgtgatagatgtccaggttgttggtgggctcgtccagaaggataaactcggtgtcctgggcgatgaccatggcgatataggcccgctggcgctggccgccggagagctcgtcaatgaaccggtcctgaaagggctccagctccatgtaggcgatggccttgtcgatgatgcgctgatcctcctcgttcagatggctgcctgagtaggggaagcggccgaaggtcaccagctcccgaaccgtgagcttcatctgtatgttgttgctctgggtgaggatggccagccgcttggccagctccttgctcttccacttgccgatgtcccggccgtcgaagtccaccaggccgctgtcccgggcgatcaggcgggagatgatgttgagcaccgtggacttgcccgcgccgttggggccgatcatggagatgaccttgcctttcgggatttcaaagctgacggagtccaccaccgtcttgccgtcgtactgtttggtcagatccttgacacgcatgggttacaccctcctgttggacaaaagaagatagagaaagtagacgccgccgcccacggtgatgaacacgctgatgggcaccgcgtagtggtagatacgctccaccacaagctgtcccgccaccagcaccaccatgcccaccagggcggagcccagaatcagataggtgtggcggtaggtcttgaagagctgacgggcgatgttggcgataatcaggccgaggaaagagatggggcccaccatggcagtggccaccgcgatgcacagggtgacgcccagcagcaggcggcggatgctccggtcgtagtccactcccagattgatggcctggtgcttgcccagggtgagcacatccagcagggccagatcccgccgcaggacgaagatcagccccgccagcagcaccagggcgaagacgatgatctcggagttgatgttttcaaagtccgccaccagggtggagagcaggctgtcgtactcattggggtccatcacccgggttagcgtggtctggatgctggagaaaaaggaggagagcacggtgccgatgagcaggacatagagtacattgtggttcgttttttgaaagagatagctgtagataatggtggccacaatgcccatcaggatcacatccgccgcgaaggacaggttcgcgttgcgggccagaaggctgcccgagccggcgaaaaagaccaccgccgtgtgaatcagggtgtagagggagttcatacccagcaggcagggggtgacgatggtattgttgatgatggattgaaacacgatggaggcgccgccgatggcaaaggcggtgatgagcatgactaccagcttgggggtgcggattttcatggagtagagcatcagatgctggctgccgaagttgaccgccacaaccatgtagcacaccgcggccagcagaaccagcagggccagcagagtcgccttgcggacgttggcctgataggaggcggagggaagggccgtgcttgtccggttcatgcggcgtcacctccatccagatgggccgccggggcgcagccgcagccggcgccgcctcccgtgagacggatcgccttgcggccgtggcggagccggtagagcagcagcaccacgaagataaggctgcccagtatgcccacaatcagctcgatggggagctcgtaaggggcgatgaccacccggccgatcatgtcgcagctcagcacgaagacggcgccgaacagggccgtgtccatcagcgtgccgcggatcttgtcccccttgaacatggccaccacattggggacgatcaggccgatgtaggagatggagcccacgaccacaaccacgctggcggtgatcatcgcggcgatggtcagcccgaggaacagcaccaggttgtagggcacgcccaggttcttggagaagtccttccccataccgacaatattgaagtggttggcaaacagaaaggccagggtgaccagcggtacgatcaggtagaccagctcataccggccgcggagcaccatggagaagtggcccacggtccaggtggacagggcctgagtcatctcatactggtaggccagatagttggtgaggccgccgatgacattgccgaacatgatgcccaccaggggaaccatgaccacgtccttgaactggatgcgctgaatgaaccagacaaaggtccaggtacccagaacggcaaagacgaaggagaaaagcgcccgtccccacagagtggagtttggcaggaacaggagggccagaagaatgccgaactgggccgaggagatggtggctccggtggtgggagagacgaatttgttcatgcagagctgctgcatgatcagaccggccacactcataccgaccccggtacacaggatcgccagcaggcggggcagacgcgagatcagaaaaatctccagttgttcgagctctcccgacagcagcccggacaggtttatatcgatcacgccgagaaacagtgaccagatcgacagcaccagaagggccagtgccaagagcagggtggaaagatgtcgtttgatgggaggtcctcctctcaaggttgtaattagctataactaacttttgggcaaaaaaagacagcgcaccttgtgagcaaactggacttacatgccgcatcacattgcacgtcgctcgggactcagtaaagtggttagcaataacaaactgagttcgtccatagggtaccatatccggggagaactgtgcaagcggtgattccgacaaaattatgaccgccaatctatggaaaatatacaaaatagataggaatagtgaatataaatagaaggggcataaacggggacaggcgttcataggatgtgccaagtacaaaagaaggacgtgagggtatgtcggaagaacgaaatgcagtccggttccgccaggcggcggctctgctgccgccccatctcaggcggccggtggaacggctggatgggacaagccaggcccgggtggaggagctccgcctgcgggcggggcgtccactgactctggtctgcccggagggtgagcggacggttcctggtgcggaggcgccggtgcgttccatggatctgagcctggtgctggagattgccactcaggcctccgcccatacggcgctggaacgggtgcgcaacggcttttttaccgtacgcggcgggcaccgcatcggcatctgtggaagcggcgtggtgcgggatggggaggtgcgaaatctgcggcagctctcctcgctggccatccgggtggcccgggaggtgccggggctctccgcggcggtcctggacaggctgtggagtgggggcgtgctccagagcacactgctcctctcgccaccgggaggcggaaagaccaccctgctgcgggatctgatccgtgccgtctccgacggggagggcggccccgccctccgtgtgggggtggcggacgagcggggtgagctggccgccatgtatcagggggagccgcagttctccatcgggcggcagaccgacgtgctggacggctgccccaaggggccggccctgctgatgctcctgcggggaatgaacccccaagtgctggcggcggatgagatcaccgcgccggaggacgctgcggcgctggagatggcggccaattgcggcgtgtcgctgctgtgtaccgcccatgcggggagtctggaggagctgaaggcccgtcccctgtaccgccgcctgctggacgaggggctgttccggcggctggtgatcatcgagcgggcggggagggaacggcgctaccaggtggtggagctatgctgaagctgatcggggcgctgctgctggccggcggggcgggggcgctgggctgctccgccgccgcccagctctcccgccgggtggcggtgcttcgggctctgctgggggcactggaggggatggagcgggagattgccttccgcctgacgcccatgccggagctgctggagcgcgccgcggcggagagccctccgccggtgtgcacgctgtttgcccgctgccggaccctgctggacgagctgggagagcggtccatggcggagctgtggcgggaggccctggagcaggtgcccctggggctggacggcccggggcggctggccctggaggagctgggggaggtgctgggccgctatgacggggacgggcagcgggaagccctcgcccacacccgtgcggagctgtcccgggcgctggagcaggcccgggaggcccgggaaaaacaagggaggatgtaccaggtgctcggtatcacggccggggcattcctggttatcctgctgctgtgagggagcgtgcgatatggatgtggatttgattttcaagattgcggccattgggattctggtctcggtgctcaatcaggtgctctcccgctcggggcgggatgaacaggccaccatgaccaccctggccgggctggtagtggtactaatgatggtggtgcagcagatcagcggcctgtttgaactggttaaaaacctgttcgggctgtgaaccatggaggatattctgaagattgccgccgccgccgtagccgccgctgtgtgcgccgtggtggtgaagcagcgggcgcaggaggtgggtctggttctctctctggccgccggagcgctggttctgaccatggccctgggggcggtggagagcgtgcgcgccctgatggacgagctgggcgaggccgccggcctgtcgccggcggtgctggctccggtgctcaagaccgtgggtattgcaatcctgacccacatttccgccgaggtgtgccgggacgcgaaggagagaggcatcgcggccttcgtggagaccgcgggggccgccgtggccctgtgcgtggcccttccgctgctgcgggcggtgttggacactgtgacgggactgctgtaaaagacgaaggggatacgaatgagacgaagaatactgatgtgcctggcggtcctgcttctgctgtcgggcatgggggcggcctcggccagcgatgtgctggccgcccagtcggaggcgctggatctggatgcgctccaggacgcggcggggggctatctgcccgacggagcgctggaggcgggcatcagtctggatgaagggctccaaaccattctggataccggcagcggacagatctccggtgtggtgcgcaaggctgtgcgcagcggtgtgctgctgctgacggtggtactgctgtgcggcctggccgaggggctgtatggcggcatgggggtgagtcagaccaccgatgtagtggccattgtgggcgcactggccatcactgcggtggcggtggcggacgccaactccctcatcggaatgggacgggaggcgctggaacagatggagaccttttcaaagatactcctgcccacgattacggcggcggccgccgccgcaggctctcccagtggggcagtggcccgccaactggccaccatgctcttttccgacatactgattaccctcatcaaccgcctgctgctgcccctggtctatacctacatagccgcctgtgtggcctatgcggcggtggggaacgaggggctcaagcgcatcgcaggcaccctgaagtgggtggtgaccagtgtactgaccgtggtcctgctggtttttgtgggttatctgaccgtcagcggtgtgattgcgggctctaccgacgcggtaaccgtcaaggcggccaaatttaccatgtccagcctggttccggtggtgggcggtatcctgtccgacgcggcggaaaccgtattggccggggccggaatactgaaaaacgcggtgggggtgttcggcatgcttgcggtgctgtgcatgtgcgtggcacccttcctccagctcggtatccactacctgacgtataaagtgacctccgccctcagcgctaccgtttccagcggccgggtggcggggctcattgaccagatcggcggcgccttcgggctggtacttgggatgaccggagccagcgccctgctgctgctcatctccatggtttccgccattacggcggtggtgaggtaggggctatgctggaactgattcgacattggctggttgggatcacctgtgcggctatgctcgtggctctgggcgagagcctgattccagcggggagtatcaggcgcattgcccgcctgaccggggggctggtgctgctggcggctatcctgaaccccctgctaaagctggataccacggcgctgacccgggcactgacggagtacaagctggagctgagcgcatacagcgcggatctggaggaggagaacgaaatcttgatgaaggacatcatagaagaacagtccggcgcatatattcaggacaaggcggccgccctgggcatcgactgccaagttacggtggaggcggacggggaggaagagtggcctattccacagtcggttaccgtcatgggcagcctgacggcagagcagcaggaggcgctggagcggaccattgaggaagacttcgccatcccggcggagcggcagcggtacgaaagcggggacgagggatgaaaacagagggcttcggggtatggggcagcaagctgcgcagcctgtttgaccggtacaaatttgtacttgtggtgattctggccggagtagtgcttttgctgctgccttccttcggcggggagaagcgcggcggcggggcggttgaaagcagtcaggaatccggttccgaccctttccaggtggaagagctggagcggaagctggaacaggccttggcccagatcgacggcgttggggaggtacgggtggtgctgaccctgcagagcggcccgcgccggattctggcccaggactcccagagcacagtagatgaggggaggacggaggcggaagtaaccaatgtagtgatttcagccggctccggcgtagagggaacggtgacgttacagcagctttcgccccaattccagggggctcttgtggtatgctcgggaggcggagagccgacggtccagcttcgtctggtggaggcggtttccgcgttaacgggacttggcgcggacaagatatcagtttgtaaaggaaagtgaggaagcaaagatgaaagtgtggaaacgaaatgccgtggtggccgcgatcgtgctctttgtctgtgtggccgtctatctgaactggtcgtatcagagtggagagacggcggatgcgggcaagacactgggggaggcggccctggtgaacggccagaccagcgacccgctggtgggaggaacggcagcgagccccgacccggcatcctccgcctcgcccgaggcagggaccaccggcggcgggagctatttcgactcggcccgtctgaaccggcagcaggcgcgggacagcgccctggcgatcctccaggattccatcgccaatgagagcgccgatgagaccatgaaggaggccaacggcgaggcaatccagaccctggccagttataccgtctccgaggcgcagattgagaacctggtgacggccaagggctacaccgactgcgtggcctttatcggcgatgagagcgtcagcgtggtagtatcggcccgggagggcggcctcaccgatgcggacgtggcaaaaatcactgaaattgtcaccgacgagaccgggatggaggccagccaggtgaagattatcgaggccgagggataggtggttctggagcgcgcggagaaaaaccagttgtaatttctctattttgtggtacaatgaaaacgaccgagtagagaaaaggagcgtgaccggaatggcggatggaaaggaatatgtctcccgccctgacgagcttgggaacatccatatttctgaggaggttctggcggtgatcgccgctgccgctgccatggaggtggagggggttggaagcctcgccgccaatctgggcagtgacatcgccgaactgctgggcggaaagaagaacctgtccaagggcatccatatcgcagtggaggaggagagcatccgcgtggatgtctctttactcatcaagtatggctataccattattgatgtggcgaaggaggtccaaaacgcggtatacagtgccatcgagaacaccagcggcctgacggtggagtgtgtcaacgtccatgtgctgggcgttgccttcgaccgggatggaaagaaggcccagtaaagggaaaagcaccagacgcgtgccgggttccggcacgcgtctgtgtacgtttttcctggaaaacccggggtgcggagggcgcgccctgggctttttgacgttgcgtggaatttgctcttttctttttatgcatggttgttgtataatacaatcatctatgacaaaaagccgcgggattatcccgccatggaggaaccggaatgaccagaactgctgcccgagagattgccgtccactttgcctttgagctgggctttaccaaccagacggcagaggaactgctggcggaggcgctgaaccgcaagacctttgagcagattggggaggaggagccgctctatgcggagttccccaatgagaagcagcgggagtatatctccaagctggtgaagggcgtgtatgagcacagccccgagctggatgaatacatctcgaagtatgccatcggctggaaatactcccgtctgaaccgggtggccatcgcgatcatgcgggtggccatgtatgagatcctgtatatgcaggatatccccaacgccgccgccatcaatgaggcggtggagatgaccaagcactatgaggagccggaggtcgtgtcctttgtcaacggcatcctgggctccttcgtccgcaacgagtgcccgccggagccggtgggcctcaagccagcggcggagcggccgcaggacgaggcgtaatatgcgcgcactgggcatcgacacaagcaactacaccacctcggcggcggtatttgacggcagcggcggctataacgccggccggctgctggaggtgcgccccggcgagctgggtctgcggcagagcgacgcgctgttccagcacatcaaacacctgcctgggcgctttgccgagctgcgggcggagggctggctgaccggcctgtccgccgtgggggccagtgcccggccgagggcggtggagggctcctatatgccctgctttctggtgggagaggggcaggggcggacactggcggatgcgttgggcgtgccgttttaccccgtatcccaccagcagggccacatcgccgccgccgcctggtcagcgggacggctggagctgctggaccggcccatgctggcctggcacctgtccggcggcaccacagagctgctctatgtggagccggacggggtcaatgtcagggcgcaatgcgtgggcggcaccagcgacatctccgccggacagctcatcgaccgcaccggcgtgctcctgggcctgcccttcccggcgggaaaggcgctggatgccctggcgtcggagagcggcccggtacggggatttcctgtaaagctgaacgacctgacattctccctttccgggatggaaaataaggtaaaggcgctggcagagcagggagagccgccggcggagatcgcccgctttaccctggagacggtggcgtcggcagtacgtcgggccaccgacgcggcccggaaacgctggcccggcctgccggtgctgtgctccggcggcgtggcctccaaccgcctgctgcgtactgttatgagcgacgcagcctttgccgcgccccagtactccaccgacaacgccatgggggcggccattctggcctggcgcagtctgagacaggaggccgaggcatgaagaacgccccaatttacagcgtaacccaggtcaaccaatatatcaaaggcctgctggaccgcgacggtgctctggccggcctttttgtgcggggagagctctccaactacaaggcctatccctccggacaccactacttctccctgaaggacgcggagggggccatccgctgtgtcatgttccggcgggaggccatgggcctgcggttccgtccggaaaacggcatgaaggtggtggcctttggccgggtaacggtctttccacgggacgggcagtatcagctctactgtagtgagctgacccccgacggcgtgggggacctccatgtggcctttgaacagctcaagcagaagctctaccaagaggggctgttcgacccggcccacaagaagcccatcccgcgctatccccgaaaaatcgccctcattacctccccggcgggggcggcggtgcgggatatgctccgcatactgggggcccgctggccgctggcggaggtgctggtgctgccggtgcgggtacagggggcggaggcccctggggagctttgcgcggccatcgcctgggccaaccggcatagggtggccgacctgctgattaccggacggggcggcggctccatggaggatctctgggccttcaacgacgaggacgtggcccgtaccatctacacctctgagattccggtcatctccgccgtgggccatgagcccgacgtgaccattgcggattttgtggcggatctccgggcggccaccccctccaacgccgcggagctggcggtgccggatcagaacgagtgctatggctggctggagcagatggaaggccgcttgaccggggcaatgggccgccgactggagcgggcctgccgtgaactggagcaggccgggcgctgccgggcgctacaggaccccatgaattatatcaatgaccggcggatgctgctggactaccagcgtgaccggctggcccacggactgaccggggccatgggccgggagcgggagcgctttgcccgattggcggcggcgctggacgccctgagtcccctcaaggtactgggccggggctatgccattccccagcggtcagacggggcggtacttcgctccgcgaaggaggccatgccgggcgagacgttgcgcctgcgcatggcggatggcaaggtttcctgtaaagtgattgaacctgccggatagggaaaggacgaaatagatggcggaaaagaaagtgacctttgaacaggccatggcgcggctggaggagattgtaaaacagttggaacagggtgacgctcctctggaggatgcgctggccctctttgaagaagggaccagactgatgaagaaatgcaccacacagttggacaaggcggagcagaaggtctccaagctcctagccgggccggatggaaacccgaaggaggagccgtttgagggggagggatagtcatggcggagctggaacgtctggaggagcaccgggcccggatcgaggactggctgcacgcctgtttccaggactgtgcgccccgtgggaacctgtatgacgccatgcgctacagccttctggccggcggaaagcgcctccggcccgtgctgttgctggaggcctgccgcctgtgcggcggagcggtggaggatgccctgccctttgccggggcgattgagatggttcacacctactccctgatccacgacgacctgccctgcatggacgatgacgatctgcggcggggccgccctaccaaccacaaggtgtttggagaagccaacgcggttttggccggcgatggccttctgacggcggcctttgagaccatgctggccccgggacagaagcttccgccggagcgtgtattggcggcggcgggcatcctggcccgggccgccggcggccgcggcatggtgggcggacaggtgctggatatggccggcgagggccgcgcccttggcctgaccgaggtggaggagcttcagcgcctcaagaccggtgcgctgatcagagcggctgtggagatgggctgcgccgtggccggcggagcggaggaacagcgggaggccctgtgccgctatgccgactgcctggggctggccttccagattcaggacgatatcctggacgtagtgggtgatgaggccaccttgggcaagcccatcggttcagacgtcaggagcgacaagaccacctttgtggcgctcaaaggtctggcggactgccgtatcctggtggcggagttgaccgaccgggcggtggaggccctggcgcccttcggttcggaggcggagagcctccgcggtctggcgcagtcgctggccggccgcgagaaatgagaggacttatatgagcaatgtcgtagattttctgaccggaaatctgattttaaacctgtccatcctggcctgggcgatcgcccaggtgctcaagtttgtcatcacgctgatttcccagggaaagctggactggcgccatattctctccagcgggggaatgccaagctcccactctgcctttgtttgcgcctgcgcggcggccatgggctatatgtacggctgggcgtcgcccgtattcaccatttctgccgtggtcgccattgtggtgatgtacgacgcggccaatgtccgcaaggcggcgggggagcaggccaagatcctgaactatatcatggaacactggactgagatgaagcccgccattttcggtaaggagctcaaggagttcctggggcacacgccgttccaggtgctgatgggcagcctattgggtatcagtgtaggattgctgggcgcttggctgtggacgtaattttgaattccgggcctctgtgggccgggaggtggaaccattctgaattttgatttgaatcacgtaccgaatcaactgggagaactgagtgacggtgaggctgtggagctgtgccggctgctgcgggcgcgcctgatcgacacggtttcccgcaccggcggccacctggcctccagcctgggagcggtggagttgattgtcgccatccaccgggtgttcgacaccggacgggaccgtttggtgttcgatgtgggacaccagtgctacgcccacaaaattctcaccggccgcaatcaggcgatggaaacgctgcgtaccttcggcggaattgctggcttccccaaaccggtggagagtgaaagcgacgcctttgtcgcgggacacgcctctaactcagtatcggtggccattggaatggcaagggcaagaacattacaacatgcggactatcatgttctggcgttgatcggcgacggcgccttgtctggcgggctcgcctatgagggcctgtccgatgcgggggacagcggggaaccgctcatcgtcattctcaacgacaacggcatgtcgatcacaaagagcgtgggcggcgtggcggagcatttggcgcgccagcggctgaagccccagtacctgcgctttaagaagggctaccgtaaggtcatgagcgtattgccgctgggcggtcacatctaccatgcaacccacaagatcaaaacggccatcaaggacagtctgttgccgtgcagcctgtttgaggatatgggctttacctacctgggaccggtggatgggcatgatgtcaagtatctgacgcagcttttgagctatgcgaaggagctgaacggccctgttttgctccatgtaagaaccgtgaagggaaaaggctatacaccagcggagcgcaatccggatcagtttcacggtgtcggccgcttctgtgtagaaacaggggagctggtgcatggttcaggggagagcttttccgccgtgtttggagagaccctctgttccttggcagagcaagacggcaagctctgtgccattacggccgccatgcaggggggaaccggcttgaaccgctttgcccgtcagtttccggcgcgcttttttgacgtgggcattgccgagggccatgcggtggccatggcagcgggcatggccaagcaggggatgcgcccggtctttgcagtgtactcctccttcctccagcgcagctacgatatgctgctccacgacgtggcgcttcagaagctccatgtggtgttggcggtggaccgggccgggctggtgggggaggacggcgagacccaccacggcgtctttgatccagcctttctcgacaccatccccggcatgacggtgctttgccccagcagttttcaggagctgcgggagatgctgcgttatgccatctatgacgtggagggtccagtggcagtccgttactccaggggaggggagggcgcctaccagggcaacgtcccggtggagccagccaccctgctgcggacgggagcggacattaccctggcgggctatggtatgatgcttaaccagcttctggactgcgctgaccgtctggcacggaatggcatccaggcagaggttgtgaagttaaatgccattacaccgattccactggagcggctgactgcctctgttcaaaagacaggacggcttctggttgcggaggacagcgcggcggcgggcggtgtggggcagcgcatcgccgcaggcctgtttgacgctggcatccaggtgcgagggctggccttggcgaataccggacacgcctttgttacccatggaacggtgccccagcttcaaaggctgtgcggtttggacggggcgagcctatatcacagagcattggaggtctgccgtcatggctaatgtaaaaaagcggctggatgtcctgctggtggaacgaggtctggctgaaagccggcagcgggcccaggcggtgatcatgagcggtcaagtctatgtcagggaacaaaaggtggacaaggccgggacgcaggttgaggagaacgccccgattgaggtgcgtggacaggcgttggcctatgtgagccggggcgggctgaagctggagaaagccctcaagactttttccggcatccgcttaaagggagtacatgccattgatgccggggcgtccaccggcggctttaccgactgtatgctccaaaatggggcggaaaaggtgtatgcagtggatgtgggctatggacagttggcctggagcctgcgcagtgatcccagggtggtgtgcatggagcggaccaacgtgcgctatttgacggcggagcagattccagagccgctggacttcggtacagtggatgtgtcctttatctccttaaagctgattttacccgccctacggggtatcctaaagccggacggacaggtagtctgtctggtgaagccccagtttgaggcgggccgtgagaaggtgggcaagaagggggttgtgcgggaccccgctgtccatctggaggtgctgcggcagtttttgcagaacgctcatgaggcggactttactgtaaaggaaatgaccttttcgcccattcgaggaccggagggcaacatcgaatatttgggacacctgtgtgtcggggcgggcgagccctggaacggcgacctttcagctctggtcgaggcatcgcacggggcattggagggaaccggacaatgaaagtggtattgagcccaaacccataccgggaccggggcctgcgggcggcccaggccgcggaaaagattctgcggaacgtgggggtggagaccgccatgtgtctgcccttcctcctggagggcagcaatctggaatttcccaagcatatccagtttaaggacacccaggaggagctgaaaaacgcggacatgctggtttgcttcggaggagacggaaccatcctccacgcggccaaggacgccaacgcccacaaggtgcctatactgggggtcaatctgggcagcgtgggttttatggccgagctggagcagagcgagctgtccatgctgtccaagctggcggccgggaagtacacgatcgaatcccgtatgatgttggatgtagcggtccgccgggatggaaaggtgctgttcaatgacatcgccctgaacgacgcagccctcacgaaaggggctgtggcccgggtcgtggatctggaggtatatggcgacaaggtgatgatcgccaatttttccgctgacggcgtgattgtaagtacgcccaccggctctacagcctattccatgtcggcgggcggccccatcgtggagcctacggcggagaatatgattgtgacgcccatctgtccccatgccctctccgcccggtccatcgtcttgggacgggagcgtacggtgtccattaaaatggggaagcagtcacgcaagactgcctatttgtcggtagatggcggcaaggcgtttcgtctgggcagcggcgatgtggtggagctgaagatgtccagctccaagacccgtctggtacgggtgacagggcggagcttttatgatatactaagtcagaaactgggaggtgccaaggcgtgaagggaaaacgtcagcaggagattttgcgcattattgaggaacaggatattgatacacaggatcagcttctggcggagctgagggcccgcggactccaatctacccaggcgaccatttcccgggacatcaaagagctgcatctgatcaaggagcttaccggctacgggacctaccgctacgcggtgtcagagcgcaaggcgtcgctgaatgtcgccagccggctgcgcacgattttcaaggagggggtcatctcctttgatctggcccagaacatcattgtgctcaagaccatgccgggagtggcatcggcggcctgcgcagccattgacggcatggagatcacaggactggtgggcagtcttgcgggggacgataccgcgatgctggtcatgcgcaccaacgaggacgcgcaggagttctgcaacgagatccacacaatgctgaaataaagcggaaacggcggggtggtcggcatgctctcactgttgcacattgagaatatcgcagtcatcgaatcggcggacattcagttcgacaagggattcaacgctctgacgggggaaacgggagccggcaagtccattgtagtggatgccatcggcgccatcatcggagagcgaaccagccgggatctgattcggacaggggccagatccgccctcgtcaatgccgtctttaccggcctgcctccgctggcctggttccaggagaacggcggagggccggacgaggatggaaatctgctgatccagcgggagatccagccggacggcaagaatgtgtgccgcctgaatggacggctaatcaccgtagctcagctacggcaactgggccggcagctcctcaatatccacgggcagcacgacggccagcagctcctggacgagcggtgccacctggagtatctggatggattcggagaaacgggatcgctgcaggaggaataccgggcggcctttggccgctttgcggtcctgcgccgggagattgcggctctccagatggacgaggcggagaaagcccggcgcattgacagtttggagttccagattgccgagctggagcgggccggactgaaggctggggaggaggaggccctcaccgagcgccgcaatttgctgcgcaatgcgggcaagctgattgaggcggtagagggcgcccatttggccctctcaggcgatgaggagcgtgagggggccgccggcctgatcggcgcggcggagagttcactccacgcggcggcccggctgagcgggcaggtggcggagctggtggacaggcttacggagctgcgctgctcggccgatgatctggccgagcaggtgcgggatttacgggatggtttcgactttgaacccggtgagctggacgagctggagagtcgtctggatgtgatctaccggctgaaaaagaagtacggggactccgtggaggatatgctggactacctggagcggtgcagaaaggagctggacgaaattcagttctccagcgataccatcgcccggttggaaagggatctgggcaaagcgatggaggaggtccggcggcggggtgaggcgctgagccaggcgcgccgtgaagcggccaaggcgctggaggagcgtattcaaacggaattggcccaactggacatgccgaaagtgcggttccaggtggagttccggcccaaagcgggggagtacgccatggacgaaaccggactggacgaggtgcagttccttatgtccgccaatgtaggggaggatctgaagcccatccagaagatcgcctccggcggagagctggcccgcatcatgctggcccttaagaatgtgctggcggagaatgaccacgtgggctccctgatctttgacgaggtggacaccggtgtgtccggccgggcggcccagaaggtggcggagaagttggcgggcgtggcccgcaccaagcaggtgctctgcgtcacccacttgccccagcttgcggccatggcggacgtccatttctctgtggagaagggggagcgcaaggggagaaccttcacagaagtagagcgcctgagccgggagcggcgcatggaggagctggcacggctgacctctggtgagcgcatcaccggcgcgacactggcggcggcgggggaactgctggacagtgcggaacggttcaagcgggctttaacccaacaaaagtaatcttttgttgggttaaatcttccccttgacaaactggctgccccgtactataatccaactcaatatgagactgcgatgacagggagaagtaccgtcttatgtcccgcccagagagcccccgtcttggtgtgagggggaggggacaggccgggaaatacaccctggagcagccgcccgaaccgcgtgaaggcgcgcagtaggggtgtgtcgggtgcgcccgttaccgcgccggagtgtgttggcactccatgaggctgtctccgtgaggggatggtgaaccagaggtggtaccgcgtttgacaacgccctctgtccgtgaggacagggggcgttttttatattaaaacacaaagtgcagccatactaattagcaattactgtaggggcgtccctatggacgaaagaaaaggagaatgaaactatgacctgttacgaagaactgaaggcccgtggcctcattgcccaggtaaccaatgaggaagagatctccaagatgatcaacgagggtaaggcggtgttctatatcggcttcgaccccaccgccgattccctccacgtgggccacttcatggccctttgcctgatgaagcggctccagatggcgggcaaccggcccatcgccctcatcggaggcggtaccggtatggtgggtgacccctccggccgcaccgacatgcgctccatgatgacggtggagaccatacagcacaactgcgcctgcttcaagaagcagatggagcgttttatcgagttcggtgacggcaaggcccagatggtgaacaacgccgactggctgatggacctgaactatgtggagctgctccgcgaggtgggcgcctgcttcagcgtgaacaacatgctgcgggccgagtgttataagcagcgcatggagaaggggctgagctttctggagttcaactacatgatcatgcagtcctacgatttctaccacctgttccagcactacggatgcaacatgcagttcggcggtgatgaccagtggtccaacatgctgggcggcaccgagctcatccgccgcaagctgggcaaggatgcccacgccatgaccattaccctgctgctcaactccgaggggaagaagatgggcaagaccgccaagggcgcggtgtggctggatcccaacaagaccagtccctatgagttctaccagtactggcgcaacgtgggcgacagcgatgtgctcaagtgcctgcgtatgctcaccttccttcccattgagcagatcgacgagatggacaagtgggagggcgcccagctcaatcaagccaaggagatcctggcctttgagctgaccaagctggttcacggcgaggaggaggcgcagaaggcccaggacgcggccaaggccctgttcgcccagggaggcgacaagtccaacgtgcccaccaccaccctggacaccggcgatctgactgacggggcgatcggggtgctggagctgatgctcaagtgcggcctggtgccctccaagaaggaggctcgccgcctggtggagcagggaggggtggagttggacggtcagaaggtcaccgatgtggccgcagccgtgaccgccgaacagctctccggcgagggtataatgctcaaaaagggaaaaaaggtcttccaccgtgcggtgctcggtgaatgaaaaaaggcgccggaggataattcccctccggtgccctttttcggttgcggaagtgattggatcatgatacaatcttaacaggatagccaatacggaaggggattgcggcatggaggataaggacaagcaaggggaaaagaaatggtatattctggatcggggatcgttatctctcctgatcgtcctgttggccgctatcctgttttatgtgggattgaccaatttcgatgttatcgcggtccgggtgcgcacatttatgggtgtgctgacgccctttattgcaggttttgctatcgcctatctgctcaatacgcccatgtgcttttttgagcgaaagctctaccaaaagcagaagcaccggcgtgggctggcgattctgacggtctatctgatcgccctggcgatcgttgtggtcctgctcaacctgatcataccgcaggtggcgcaaagcgtggtagatctggccaccaacatgcagacctatctgaccagcctgaacagcctggtgcagaccctctccgagcagtttggactggaggcggaggccctgaatgaggctattggctcttatcaggacctgatgaccaatattgccgcctatctctccaaggctctgccggatctgctgaactttggctacgccatcggcagtggggtgatctcgggcattaccgcactgatctcctcggtttacatgctggcagggaaggggcggctggttccgcagatcaagaagatgctctacgccattctgcccaggcggcgggcggactggcttctcggggtatgcggacatgccaaccgggtatttgtaggctttatcaatggcaagctgatcgactcggccatcatcggtgtgctctgctttatcctttgcttgattttccgcatcccatatcccatgctggtcagcgtcgtggtgggcgtcaccaacattatccccttttttggaccgatcatcggcgccatcccctgtctgatgattctggtgatcgtcgacccttgggcggccctgcggttctttgccttggtcatcggccttcagcagtttgacggcaacatcctcggccccaagatcttgggcgacagcacgggcctgtcagccatctgggtgctggtttccattgtggtgtgcggcggcctgtttgggttcccgggtatggtactgggtgtgcccacctttgccgtgctgtatgcactggtgcgggactgggtcaacaaacgcttggcactcaagcgcctggacggaaacgggaggcctctggacggcgctccttaaaaactgaacgagtagagtagtgaagggaggtgcgaagcgaagcttcgcacctcccttttagaggcccaaataggtcaccaagtccgccatggagtatagaccgggggactgcccggcagccagaaaccgggcggcctgaaccgctccggaggcaaacacctcgcggctcagggcggagtgccgcagctcaatgagctcatcccgcccggcaaagagcacctcatggtcgcccacaattccaccgccccgcaccgaggagatgccgatttcacagcgctcccggctccgccggataccctgccggccgcagaccagctccggttggcaagggagggcgtccgccgcggcctctgccagcatgagggccgtcccactgggggcatccatcttcttgttgtggtgccgctccacgatttcgatgtcacagctcccgcccagcaccgctgcggtccggcgtaccaactcgacgaggatgtttacgccaagggacaggttggcggagcgaaagatagggatggaacgggcagcctgctgtatctcctccagttgtccctggtcatagccggtggtggccagcacaaggggcatcctgtgttccaggccgaagctcagcagagcgggaagggccgagggactggagaagtccaccacaacgtcggcctctccctgaaattcggcgggggaggcgtataccgggaaatcgcggatatccgcgcccagcagatcaaagccggcggtcagctccagctccggttcagcggcacagatagcctctaccgcatggcccatccggccgttacagccggagaggagcagttgaaccatagttcacatcctttctctgcgctattggagcaggtgagcgctctccatggcgcggcgcagggtctccaggtgcccgtcggacatggcgcaaagggggaggcgcagggaacccacctcatagccggccagattcagggcggtcttgatggggatggggttgacctccagaaagagggcgtcaatgaggtcggtgtactcgatctggagcgcagcggcctcccggaaccggccctccaggcagaggtggctcatctgaaccatcacctcagggacgagattggccgccacggagacgacccccttggcccccagactcatcatgggcaccacctgatcgtcgttgcccgaccagatgtggaagtcatcgccgcagagggcgcgggtgtgggagagcagggagaagtttccgctggcctccttgaccccgttgatgttggggtgctgcgagagaagctggtaggtctcggcggtaaaggatacgccggtgcgggaggggacattgtagagaaggatgggcagctccacccggtcggctatgtaggtgtagtgctgaatgaggccggtctgggacgctttgttgtagtagggggtgacgagcagcagggcgtccgcgccggagtcctgggcgtgctgggagaggtagagggcagcggaggtgtcgttgctccccgcgccggcaatgaccttcacccggtggttaacccgcttgacgcagaaggccacggcggcgatgtgctcccggatagagagggtggcgctctcgccggtggttccgcagacgcagatggcatccacgccgtggtcgagctgctggtcgatcaggcggccgaagcagccgtaatcaatggcgccgctctggtcaaagggggtgacaatggcggtacaggctccggtgaaaacaggctctcgcataagatggggtttacctcctttggatatacccctccgcgcagagaagctcagcaaggagaaccgcaccgccggccgcgccgcggagggtgttgtgggacagacagacgaacttgtagtcgtactgggtgtcgggacgcagccggccgatgcacacggccatgccgccctcggtcatccggtccagccgggtctgggggcggtcaggctcctcaaagtagtgcaggaactgcttgggggcagagggcagggccagctcctgggcacggccctggaagcccgcccaggcggctttgatttcgtccagagagggcttgttccggaaccgggcgaaaacggctgccatgtggccgttggaggcgggaacgcggagacactgggcggtgatggacgggcctgcggcattgacgataacgccgtcctccacccggccccacagcttcaggggctcctgctcgctcttttcctcctcaccaccgatgtagggtatcacgttgtccaccatctccggccaggtttcgaaggtcttgcccgcaccggagatggcctgataggtgcagaccagcacctgctccaggccgaaggcgcgcaggggatggagggcggggacatagctttgcagggaacagttggacttgacggcgataaagccgcgctccgttcccagacgcctgcgctgggcttcgatgacccggaggtgctcgggattgatctccggcaccaccatgggcacgtcgggcgtccagcggtgggcggagttattggagaccacggggcacccgcggcgggcataagcctcctccagggcctgaatttcctccttcttcatgtccaccgcggagaatacgaagtccacctgggcggcaatccggtcgatgtctgtttccgcgttgagcaccaccatgtccttggcctccccgggcatggggacatccagggcccagcggccaccaatggcctcctcgtaggtcttgcccgcagagcggctgctggccgcgatggcggtcaactgaaaccaggggtggttctccagaagggtaacgaagcgctgaccgaccatgccggtgccgccgatgacgccaactctgtacttttccataaccaatacctccgtcgttccataatatcctattccagatccagcttgtttgagactgggaaaatgaggactttcatataaaaagaaaatcagcagtttacatgtccgctgattttgtactataatgtcaaagacgatgccgctacggcgcagtccaacttaggtgcagggcgctccctgtcatttttgaaaccgccacggctcctatcctgcatctgatactgattagttttcaaagattgtaccacagatggagcccatgtgtcaatgaaagagagttgaaaagtgattcgatgaagcagagggtaaaaggaaatattttgcggcttgtaactgcctgtcttgcaattttattgataagtgggcttgctccggctggtgcggcctcggcggaggccaacccgatggtccgggtgggcctgttctacggcggaaacgccctgtcgggggccaacctagccaacgacgtgggcagcggctaccgcttcggctactttgatggcgatctgaccttccagctcctgggctacaccagcgagacgacggtctccatggtgaaaacccagaatgtgtactacgggtcgaatgtggactggagtggctccggctattacgacagcaagacctccgacatcgccgtggggtgttaccatctccagctcccccagacctacgccacctttgaggaggcatcggccgccgcagcacagtacagcgatggcttcccggcctggatcgacggcacctactatgtgcgggtgggctccttcctggacagtacctccgcccaggcggcccaggcctccctcggcctgaccggggccacggtggcgggcacctcgggagcggggatctctgtggtaaagacgggcaccaatacggtcctctttcagtttgacagtacctccggcctgtatctggcggttaagcccggccgggacgacacggtgaaggcggaaacctacttccggggctattcctatttcggggcgtttgaataccgccggaacggcggggacatcacggtggtcaatgtgctttccatggacgactatctccagggcgtcatcgtccaggagatgagcccctcatggcccctggaggcattgaaagcccagacggtttgcgcccgcagctacgcctatggaaagctccaggcgggcaagcaccagagccagggcttcgacctgtgcaacaccactgactgtcaggcctacgtgggtatcgctaccgccagcgacaacagccgccgggcggtggaggagaccagcggggtgtatctgtggtacaacgggcgggtggcggaccaggcggtttactcctcccacaacggcggagccagcgagagcgccgtcaacgtgtgggggagggattacccctatctcatcgggaagattgacccctatgaggcctccgtcgtggaccgtatctccaactacaactggacggtgacctataccgcccaagagcttaccgagctgctccagagcaaaggctatggaaacagcaccatcgtggatttccgggtgaccaagaccagtcccaccggaaatgccatcgagatcaccttcaccgatgccaacggccggagctggagcaagacgcgggaagcgtgccgcaccttcctggggctgcgttcccagcactacaccatatcgggcggcagcggaggaggctacgcggtcaatggcaccggttccctcagtacactgaacggagcctatgccgtggatgggagtggggcagtgagcacactgactgaggggcaggtctatgccatcggcggggacggcgtcacctctcaggtgaagccctccgcgtcggccggcagctccggcgtctttaccatcactgggtccggctgggggcacggagtgggcatgagccagtggggcgcctatgccatggcccagcagggtgatacttacaaggatattctgaccttttactatactggaatcgaggtgcgcaagccataaaaaccgctgattttgatttttatctgccggaggagctgattgctcagaccccgctggagcggcgggacgcctcccgactgctggtgctggacaaggagaccggagccacccggcacatgcatttttttgatctgcctaccctcctgcgcccgggggactgcctggtgctcaacgactcgcgggtgctgcccgcccggctgctgggacatcgggagcccaccggcggcgcggtggaggtgctgctgctcatcgaccagggggacaaggtgtgggagtgcctggtgcgccccggccgcaagctgaagccggggacgcggctgtccttcggggacggctccctcaaggccgaggtggtggaggtatgcgaggggggcaaccggctggtccgcttcgagtatgaggggatcttcctggagaccctggagcggctgggcaagatgcccctgccgccctacatcaaggcggagctgagcgaccccgagcggtaccagactgtctactcccgcgaggtcggctccgccgcggcacccaccgccggactccactttacccgtgccctgctggagcaggtgcaggaaatgggggtaaaggtctgctatgtgacgctccatgtgggcctgggcaccttccgtccggtgaaggaggaggagatcaccgaccacgagatgcacagcgagtactgcatgatctccgccgagaccgccgagaccatcaaccgtaccaagcgggaaggggggcgggtcatctgtgtgggtaccacctcttgccgcaccatcgagagctgggcggcggaggacggcacgttgaaggagtgcgcggggtggacgaatatcttcatctatcccggctaccgcttcaaggcgctggactgtcttatcaccaattttcacctgcccgaatccacgcttatcatgctggtttccgccctggcagggcgggagcatgtcctggccgcctataaggaggcggtggagcagcgctatcggtttttctcctttggagatgcgatgttcatcggctgagtcagaacgaaaaagagaaaccggggttcccacaagttgtgggaaccccggtttttgtatgggtcagataaggccctcttccaccagaaagtcatgggcgacatcggcggcgtttctgccctcgaggtctacctcggcgttcatggcggccattgcctcattggagatgcggccgtccagcagggcgagcacctccttcagctcggggtactcgtccagacactcctgacggataaagttgaccgcgtagtagggcgggaagaagctggcgtcatcctccagctgaaccaggtcaaacttggagaggagggcgtcggtggcgaaggcgtcgataacatccacctggccgctgtcgatggcggtgtagcgcacggccacgtccagggcgttgacctcggcgaactcggtgttgaaggtggactccagacggggaagggcgtcctcccgctgggtgaagtcggcggtacagcccaggcggagttcgggtgctacggccatcagatcggtgagggtttcgagctgatactgctcggcgatctccggccggacgctcatggcgtaagtgttgttgtaacccaggggggcggagacggcgatgttgtagtcgttcttcatcttgtccacaaggatatcatacacctcgtcagggtcggtgttcagcggcaggcccagcacagagagatacacctgaccggaataatcgaccaccatgtcgatgtctccgttctccatagcggtcatctccagggaggtgctggctaggttaaaggtggtgtccacctcgatgtcggtcttagcctcgatgagctccttgtagatgttgcccacgatgtagacctcggtaaagttggcggaacctacggtgatgtgcttttccgacttcttgttagacaggccgcccccgatggcgaccaccaccagggcgacacacacgcccacggcgatcacctgccggcggcggatgaccctcttgggcaggttctgaatctgctcgttgggaagcaggccctcgctggtgaccgcctgctccagcttggcgaagatgaagtcgaagagcagcgccagcagggagaccgggacggcgcccagcaggatcatctccacattcagggagttgaggcccagattgataaaccagcccagacccttggcaccggcaaaagcggcgatggtcatagtgcccacagaggccacggcggcgatgcggataccggccatgatgaagggggcggcgatgggcagctccaccaggaacaggcagcgcgtgcgcgtcaagcccatgccccgggccacctccaggttcttggggtccacgctcatgatgccggtataggtattcttcagaatggggaggaaggcatacacaaagaccatcaggatggcgggcaccgtgccgatgcccagaaagcagacggccagggacagcagggcgatggaggggatggattgcatgacgttggcgatgccaatgacgattttggccgctgtctggttgcgggtgataaggatgcccagcggcacaccgatggccagggagatgagcagggccagtgtggtcatgttgatgtggcggaaaagctcggtgaccagttcgggccagcgggagaccaggagctcccagaaggaggacagagagaatgaaatgcccataattacgcaccctcctgttcgtcgcgctcaaccggctcgtcgatgaaacggcggctcagggtggagaggaggctgctccggttcaggaaaccgcgaatggctccctccgcatccaggacgggcaggatgccgaagtccttctcgccatagtccgctaccttttccagtacagtgctcaggctgtcgtccacccggacggacagataatcgtcagagaggaacgaggagaccggggagctgtattggtcgatgccgatcagatcctggagccacaccataccggcaaacttattgtcgtcgccggtgaccagcaggctgtcgatgttatagtgccgcatgagctgtaccgcctgcaccactgtgcggctctgagagatggtgatggggcgggggcgcatgatgtcctcggcccggataaaggaggggttctcccacaggcggttcttgccgatgaaggagttgatgtactcgttggcgggatgcttgaggatgttctccggcttgtcgcactggaccacatggccgttttgcaggatgcagatgcggtcggccagcttgacggcctcatccatgtcgtgagtgacgaaaacaatggtcttgtggaaccggagctggagccggtgcacctcgtcctggagctcggcgcgggtcatggggtccagggcggagaagggctcatccatgaggatgatctccgggtcggcggcaaaggcgcgggctacgccgatgcgctgccgctggcctccggagagctgggaggggtactggctgcggtattggtccggctccaggttgaccagctccagcagctcggtgatcaggtcgtagattttttccttggggtacccggccacacgcatggccagagcgatgttgtcctccaccgtcatatgggggaacaggccgccctcctggacgacatagcccatcaggcggggaagctgggtcaccttgatccggttgatgggggtgccattgatgagaatctcgcctttgtcaatggggttgagcttgttgagcgttttcaacagggtcgttttcccgcatccgctggaaccgatcaggacaaaaaactcgttgtcctggatggtcagactgatgttcatcagtaccgattttccgcggtatgacttgtagagatttttcaattcaatcacagcaaaggagctcctttctgaatgatccctattgtagtatggagtggattgaaatggagtaaggattgacggatttagataaagaatttgttaaggcagggagaattcgcttgacagatcattctgtatctgctaaagttacagtacaaactgtaactaaaaaaattacaaataagtatgagtggaagccgcaaaggcttggaaccctatctccagtagaaaagaaaagggcaaacagaaaggatgaatgtaatggaagcgatcgtcatcacgaaagaaaattttgaggagcaggtgctgagggcggagaagccggttctggtggacttctgggcgccctggtgcacctattgccggcgtattgcccctgcggtggaccaggtggctggacagtatggggagcagatggtggtcggcaaggtgaatgtggacgagcagccggagctggcagagcggtttggggtggagaccatccccacgctgctggtatttcggaatggacaggcgggagagccgctgatcgcccccggctcaaaggcgcagattgtagagtgggccggactgtaagagaggaggtgcgccggatgggtgtaaagcactatgacgtgattgtgatcggcggcggacccggcggctatacggcggccctgtactgtgcccggagcgggcgctcggtggcggtgctggaaaagctctccgccggaggccagatggcgaccacggaccggattgacaattatcccggctttgaggagggcattgacggcttcgagctgggagagcggatggagcgccaggcctggcggttcggcgtgtccacggtatacggcgaggtgcgctcggtggagctggcgggccggcccaagcggatcgagagcaccgagggcagctttgaggccgaggcggtgatcctggccacgggggcgttccctcgggagctgggcctgccggacgagcaggcgctccgcgggcgcggggtggcgtactgcgccgcctgcgacggcatgctctaccgcggcaagacggtagtggtcaacggaggcggaaacaccgctgtgggcgacgcgctctatctggccaagctttgtaaaaaggtctatctggtccaccggagagacgagctgagggcctcggcggtctatcgggacgcgctgagggaaaacggcgttgagatcctttggaacagccgcattaccgctctgcgcaaggagaaacgcctgacaggtgttgaggtggaggatcttcgcaccggcgcacggcgggagctgttctgcgacggcctgtttgtggccatcggccgggtgccggatacggccctgtttgccggccaggtggagctggacccctcgggctatatcgtggcggatgaaaccacccgcaccagcgtgcccggcgtctttgcggtgggcgatgcccgcactaaggcggtgcgccagatcgtcaccgcagtggcagacggggccgtggcggcccactatgcggaggagttcctgttggaggatgctgtaaaggataaaaacctgtcatgaatagtgcgttttgtgtggcggtccacgccctgatctgcctgaaccggcggcaggagcagctctccagtgaggagctggcccgcagtatctgtaccaatccggcccgcgtgcggaagatcatggcggggctgaagcgggccggactggtggaaaccaaggaggggaatgagggtggctaccgctttgtgggcgatcccgccgcccttacattagatcaggtagcccgggcgctagaggtgcggttcgtgtcgaccaactggcgcggcgggggcgtggatcagccctgcctggaggcatcgggtatgtcggaggtcatggacggtctgctggaggagctggaccagggctgccggagcaggctttcggagatcagcctggctgagctggacagcagactttatttgaaacaaaggagatgaatatgggtctttcactggagacgagcgtgccggtacttacggtgtttttacaggggctgctgagctttttctctccctgtgtgctgccccttgtgcccctctacgtcagctatctggcgggaggcgccagggacgtggacagcgacggcaatatccgctatcccaggggaagggtactggtcaacaccctgttctttgtggtgggcatcagctttacctttttcctgctggggttcggctttacagcactgggaagctttttccgcagcaaccagacctggtttgcccgcatcagcggcatcattatgatcctgtttggcctgtaccaattcggcgtgttcgggcgctcgggcgccctggagcgggagcaccggctgcccttccggctggaccggtgggctatgaacccgctggtggccctggtgcttggctttaccttcagctttgcgtggacgccctgcgtgggccccacgctgggcagcgttttgctgatggcctcttcggcgggcagcgccgcccgcggcttcctgctgattgcggtatacaccctcggctttgtgatccccttcctggccgtgggactgtttaccggggcggtgctgggctttttcaagcgccaccagagggtggtacgctacactgtgaaggtgggcgcggtcctgctggtgcttatgggcatcatgacactgactggcttcatgaacggcattaccagttacctgtccagcgcggcgggcagcggagcggccgaaacgccccaggctcagacaagcggaactccggaccccacaccagaggggagcgtgcccgccggaccggaggagagcccggcggccagcgggcggccggtgattcccgcgccggatttcaccctggtggaccagtacggggaggagcataccctctccgactatgagggcaagacggtgtttctcaacttctgggcgacctggtgcggtccctgcaagcgcgagatgccggaggtgcaggcgctctacgagaaatacgggaacaacgagggagatgtgatcgttctgggcgtggccaatccaaagtcggaggagtacccctataatcaggatgttactcagccggaggtggagcagttcctggaggacggcggctacaccttcccggtggtgatggacgttacaggagaggtattctactcctacggcatttccgcctttcccaccaccttcatgatcggcgcggatgggaatgtgttcggctatgtgccgggagctctcaccggcgatatgatggagtccattgtccagcagaccatagacggcgttgaggcgggagcatgagggatactcttgtcaaagctcagtccttctggtattatgaaaggtaagtttttgacaaaggagttttgacgtgtttgaagtcctgaaaacagagggaaaggcccgccggggtgtctttacctgcgcccacggcacggtgcagacgccggtgttcatgaacgtgggcacccagggggccatcaagggtgcggtgtcggcccacgatctgaaggagatcggctgtcaggtagagctgtccaacacctaccaccttcacctgcgccccggcgaccaagtggtgcggcagatgggcggcctgcacaggttcatgcggtgggacggcccgatcctgaccgactcgggcgggttccaggtgttctccctgtcgggcctgcgcaagatcaaggaggaaggggtcaccttcgcctcccacatcgacgggcgccgcatctttatggggccggaggagtccatgcagattcagtccaacctgggctctgatatcgccatggccttcgacgagtgcgtggaaaacccggcgacctatgagtatgccaaagcctcctgcgagcgcaccctgcgctggctggcccggtgcaaggcggagcacgaccggctcaacgccctgcctgatacggcgaatccccgccagatgctcttcggcatcaatcagggcgccactttcccggagctgcgcatctggcacatgaaggaaaccgccaagattgactgcgagggctacgccatcggcggcctggcggtgggggagcccacccaggtgatgtatgacatcatcgacgcggtggagccctatatgccggcggagaagccccgctacctcatgggggtgggtaccccctccaacatcatcgagggtgtggcccggggcgtggacttcttcgactgcgtgatgcctgcccgcaatgcccgccacgccaagctcttcacctggtcgggggcgctgaatatccgcaatgagaagtacaagctggacgagcggcccatcgacccggactgcgactgcccggtgtgccgctccttctcccgggcctatctgcgccacctctttgcagcggaggagatgctggccatgcgtctggcggtgcttcacaacctctatttctacaacaaactggccgaacgtatccgccaggcgctggacgcgggccaattcgcggcattccgggcggagtattccgagaaattggccgggcggctgtgaagtttctgtgaatgaggcgaaaagggcttgtcaaaatctgcttttcgctttataatgtcctattggtgacgttttaacgtcaaagtatgaatcggaggggattattttgctgacacagactgctggcgttctgctgacaaattcagggacgaatggtagtgcaagcttattgagcatgcttctgccgttcgtgatcctgatcgcggtcttctatttcctgctcatccggccggagaacaagaagaaaaaggcggcggccaagatgcgctctgagctggcggtgggcgatgagatcaccaccatcggcggcgtggtaggcaccatctgccaggtgaaggaggataccatcatcatcgagaccagcgccgaccgtgtgcgtatggagttcaccaagtgggccatctccaccaagggcacccagtccacggagaacgctcctgcggacaccaaggattccaaggacaagaagtaatagtgaacgccctccctgcataggtttcagtaggaatccatgccaagggagggtgtttttatgaaaaaaaaggaggaggagcagagcgcaaagctgatccgctgcggaatggggctggtgctggggggcgtggccgcgctggcggtttgctttgtctttctgctggtggcgtcggcggccatttccggcggactggcaggggaggagctgatgtatcagctcaccatcgtgggatgtgtgctgggggcctttgcgggcggcctgctggcagtgcggcgctgtgggagccgggcgctgatcgttggccttaccaccggcggagtgctcttcctgctgctgcttaccatcggggcgctctgcttcgaaacggtctctctggaggcggggggcatcggcctgctgtgcggctccctgtgcggcggagctgccgccggaatcctgggcggcgggggtaagaagaagcctgcccggaaaaaacgcagaaaataattgaaatcgggcggagaatgtgttataatcgctccaaaccatcgttatgggagggaaaccagaatgaagcatgtgaagacgctcaacggcgcgactctgaagaagagcgccgcccacggcggttgcggcgagtgccagacctcctgccagtccgcctgtaagacctcttgcaccgttgccaaccagaagtgcgagaaccagtaaaaacgaacttggctcgaaaagggtggggcatcccaccctttttgtatgccgtaataaagtgaggaacgaacaaatatggtacatacctttcaatgccttggcgtgaatatcgccgtggatgtcaacagcggcgccgtccacgtgctggacgagctcacctaccaccttctggagcaggtgcagccccccatgggagagcactgcccggcggagctttgcgccaggctgccccagtacgacccagccgccctggaggaggcctggcaggagctgcgcggtctggcggccgaggggctgctttttgaggaggacgactacattgaccgggagaaggctgcctccatgcagcagcaggccctggtgaaggccctgtgcctccatgtctcccacgactgcaacctgcggtgtaagtattgctttgcctccaccggcgatttcggcaccggccaccgcatgaccatggacttcgagaccgccaaacgggccatcgacttcgtcatcgccaagtcgggccaccgccgtaacatcgaggtggacttcttcggcggcgagccgctgatggccatggataccgtaaagaagacggtggagtacgcccgttccattgaggaggagcacaacaagtgcttccgctttacaattacaactaatggtgtgctcctcgatgatgagaacatcgagtacatcaaccgtgagatgtccaacgcagttctctccatcgacgggcgaaaggaggtcaacgatgacctccggcccacggtcaacggcaagggcagctatgacgtgattgtgcccaagttccagaagctcattgagggccgtgggacgaaggactactacctccggggcacctttacacgattccatcaggactttgccgaggacgtgaaggcgttggcatccatcggacggaatatctcggtggagccggtggttgggaaggaggaggatccctatgccctccaggaggcagatctgcccgccctgaaggcggagtacgagcgcctggcggagtatctcagggaccacccggaaaccaacttcttccacttcaatgtggatctggcccaaggcccctgcgtgatcaagcgcctgcggggctgcggggcgggctgcgagtatgtggctatcaccccggagggggacatttacccctgccaccagtttgtaggcaacgaggactacaagctgggcagcctttatgatggcaccttc

SEQ ID NO: 4266 - DNA, 35545 bp, Unknown
  gut microbiota DNA sequence
caggagctgtcgggccgctttgccggactgaacatctacacccgcgaggagtgcagggattgctgggcacggttctactgctcgggtgggtgtagcgcgtccaacctgcttgtcaatggcgacataaaaaagccccaccgtgtgggctgtgagttggagcgaaagcggctggagtgtgccatcgctctgcgggcgatcgcggccggaatggcggagtgacatatacagatcgtaattatacaaatcgtaatctccgctacaaacagacaaaaagtgatgaattgagccggatgtcggcaaaaacagtgactataattttagtaaagaggagcgccacaaagtgtggcgctcctctttttgtatacacagtttacataattaagtaaacataacaacttggcataatatacaaaaatgaagttttttcttttccgtccttgcacaagacggcctggtaagctatagttagcatgtaaaccgttggcacgcgtctaatcgaggccctgtccgcatatgctcccatgggaggtgagggcgatgcgcagggcggcggaagcgtggagaatttcaggggatgggcttattccggtgctggcggtaactgcggcctgctttttgttgggcgggctggtaggatgcctgctggcatcccatatcgaaggcgggggtcaggagagcctggccgcctacgtggagggatttcttcgcgccgctcaggcgggggagattacagcgcctgcgctggcctcactggtgtgggacaccgtgcgctggccgctgctggcgctgctgctgggcttcaccgcgctgggacttctggggctgcccctgctgtttgcggtgcggggattcctgctggccttttcgattgcctcatttgtgcgcctgttcggcggcgcgggctgtctgctggccctcttggtctttggggtgagcggtgcgctttcggtgccggtgctgtttgtgcttggggtgcagggcctcctggccgcccgggtgctggccggacgggtctggggggatgggaaaacccctccgccctatgggaaactctattttttccgctgcggcgcctgtgccgtcgcgctgtgtgtgagtctgctgctggactgctttgtagtgcccggcctggtatccagcctggcggggacgttcctgagcctatagagatactgcgagaaggtgttggacggatggattatcaatcaggttatgcgcactatttgacagaggaaaagcgggcctccgccaacacgttgagctcctatctgcgggatgtgacccagtatctccactggctggaaggggagggggttccgccggagcaggccgcacagaaggatgtggagtcttatacgagatttttgtcggccaagggtaagtcggcggccacggtaacccggtcgctggcctctctgaagtctttctacagctatctgatcgcggagggcagggtgtccgtcaatccggccagggggctggccccggcgaaggtagagcggaagctgccccacatccttacctccaaggaggtggaactctttctggagcagccggatgcctcggatgccaagggctgccgcgatcgggccatgctggagctgctttatgccacgggtatccgtgtctctgaactgattggtctggatctggaaaatgtcaacctgtccgccggctttatccgctgttccggccggggaaaggagcggatgatccccctctacccggcggctgtccgggcgcttcaggactacatagagcacgtgcggccccagatgctggagcacccgcaggaacgcgccctgttcgtgaatatgagcggggagcgcatgagccgccagggcttttggaagatcatcaagcactatcaggagaaggccggaattcagacagaaatcaccccgcacaccctgcgccactcctttgccgcccatctgctggaaaacggcgcggatctccactccatccaggagatgctgggacacgcggacatttcgtccacccagatctatgcccagctggtcaaccagaagctgaaggatgtctacaacaaagcccacccgagagcctgactgacgggccgcggcgcgctgcgccgcggcccgtttttcggcttgcgccgccgtgcccgccgtggtaaaataaacttcgtatggactcaggaggggaacggataccatgctgattttaggcatagaccccggctttgccatcgtgggcttcgggctggtggaggctgatcgtggccgtcagcgcctagtgcagtgcggcgcaattaccacaccggcaggggagcccctgcccgcacgtctgcggcagatcgccgacgatatggatctgctgctggcccaattccagccccaggccatggcagtggaggagctgtttttcaacaacaatattactacgggcatcggcgtggcccaggccaggggagttctcctgctggcggcggagcgccggggggtgcccatctttgagtatacccccagccaggtcaagcaggcggtggtgggctacggaaaggcggagaagcggcaggtcatggatatgacccgccgtgtgctgaatttgagcgccgtgcccaagccggacgacgctgccgacgcggtggccatcgccctgtgccatgcccgttcgtttacctcccgccttcagagccccgacgcggcccgcccgggcagcgggcgctatgaggtgcggaaacaagtgcgttaggagaagcaaaaacgatgttttattatctgaacggcgtggtggcccatgtggccccctttctggcggtcatcgactgcggcggggtgggctatgcctgccgcaccaccaacaacaccctgtcccatctgcaaaaggggaagccggccaagctctatacccacctgaatgtccgtgaggacgccatggagctgttcggcttttccacggagaatgagctcaactgcttccagctgcttacctcggtatccggtgttgggcccaaggctgcgctctccatcctgtctgcggccacacccgagtccctggccatgagcatcatcaccggggacgaaaaggccctgacggtggcccagggcatcgggaaaaaaatcgcccagcgcatcatcctggagctgaaagacaagctggccaagggacagatcgcccctggaggcgagagctatggcggcaccggcgtcacggtaatcccggagaacaagtccagcgaggccgctgccgccctggcagtgctgggctacagccagagcgagattgccgcagctctcaagggcattgacgtggacggccttgccctggaggagatcatcaagcaggcgctgaaaaggatggtcaagaattaacgtcgggctaaaaatgcgcttggggagcggttcatttttattgcacgcatctacgtcagaatgaggaagtgaacatacttgagcattgacttttccgataccgggtttgagacccaggagccgctcgtcaccacatcgctgacgcgggatgacgagaacgagggttccctgcgtcccaagaccctgcgggagtatatcgggcaggagaaggccaagggcaacctggaggtctttatccaggccgccaaaatgcggggggaacccctggatcacgtcctgcttcacggcccgcccggcctgggcaagaccaccctcagcggcatcattgccaacgagatgggggtcaatatccgcatcacctccggccccgccattgagaagcccggcgatctggccgcgctgctcaccaatctggcggagaacgacatcctctttgtagacgagattcaccggctcaaccgctcggtggaggagattttatacccggccatggaggacttcgccatcgacatcatcatcggcaaggggccctcggccaactccatccggctggatctgccccgcttcaccctgatcggcgctaccacccgggcagggcagctctccgcacccctgcgggaccgcttcggcgtgaccctgcgcctggagctctacacaccggaggagctggcgcagattgtcacccggtcggccggcctgctggatgttcccatagagtcggacggcgcaatggagatcgcccgccgcagccgcggcacaccccgcatcgccaaccggatgctgcgccgggtgcgggactttgcccaggtgaaggctgggggggtgattacccgtccggtggcagaccaggcgctcactgcactggaggtggaccacctggggctggacgccgtcgaccggcggatgctcgccagcatcattgagcactacggcggcggcccggtgggcctggagaccctggcggcgaccatcaacgaggaggcaattaccctcgaggacgtctatgaaccctatctgatgcagatgggctttctcacccgcaccccccgcgggcgctgtgtcacccgtcgggcctacgagcacttgggcctgaccgtgcccggcggggcctgcggactggagcagctctcgctgtaggggggagctgggtgaaaaagaaccccctggttcccatcctgggcggcggtgtaatcgcggcgctcgttctgggcgttatggcggtaattgtgctggtggacgccgggctgctgcatctgctgggcgtccgctgcgactccttcggctggctggtgctctatgttctggtggaggcggtgctcggcctgcccctggagctgttcaccgctggcctgaccaaggcgctggtcaagctcggctgggccagtccccgtctggccaatctcctctacatcccgctggacgccctgtgcaccgtctttgccttttgggtggccgatatgcttatggagccggtggaggctaacctcctcgccgttttggtggtggggctgttgtccgccctgttctccaggccggtgaaacaggcggtgcggcggaagaaaatgccgctggagggggagcatgaccaagcgaatgacgatcgactgaactgataagaatgaggtggctatcgaatatgggtaaattatttggaaccgacggcatccgcggtgtcgtcaacgacggactggacgccatgctggccttccgggtgggcatggccgccgcgcaggtgatgacccgggagaagggaggcggacagcctcgattcaccatcggaaaggatacccgcatctcctcggatctgctggagggggcgctgattgcggggctgtgctccgcgggggcggatgtgctccacctgggcgtgatccccacgcccgccgtggcgtggatcaccgtggacaccaaggcggatgcgggcatcgtgatttccgcctcccacaacccctttgagcacaacggaatcaaaattttcaacggccagggcttcaagctctccgacgagctggaggggaagattgaggaaattttgctgaacgatatcgccgtgcccctcaagaccggcggggagatcggccgggtgatttacgccgatgagaaggagtcccaggattatatcgaccacttggtgtccaccattggctccgagctggcggggctgcatattctggtggactgtgccaacggcgcggcctctgccactgcggcccggctgtttgaccggttccccgacctgcacaccgacgtgattcacgccgatcccgacggcgtcaacatcaataacggctgcggctccacccacctggatcagttgaaagccatggtgaaggcgggcgggtatgatctgggcatcgcctttgacggcgacgcggaccgctgcctgatggtggacgagacgggagaggagatcgacggcgaccaggtgatcgccgcctgtgggctggcgctgaaagaggcgggggaactggccggcggagctattgtgggcaccgttatgagcaatctgggcttgcaccgtttctgcaaggagcacggcattgggctgttctgcaccagcgtgggcgaccgcaacgtgctggagaagatggaggagtgcggctatgtcatcgggggcgagcagtcggggcacacgattttccggcgctgcgccaccaccggagacggccagctcaccgcgctgcaattcctggatctgctctgccgctccggcaagaaagcctccgagctggtaggggagtgcaaacgctatccccaggtgctcatcaatgtgccggtggccgataaggcaaagaaggaggccgtcctgtcggcccctgcgcttcagagcgccgtggcggagcaggaggaaaagctggccggaaacggtcgtgttctggtgcgcccctccgggactgaggctctcattcgcgtgatggtggaggctcagaccgagcctgtagcgcgggaaacggcggagcttttggcaaatgtaataaaaaatcatggatcttaacgggaaatttttgcgcaaaagcttgacaaatccagaattatccgcgtataatgtataaggagaaccggtatgaaaccagatcatattccttcccaggaactcacggacgaaacgctgtgccgtttggccgcctccggcgaccgtgtggcagaagagcgtctggtcatgcgctataaccgcttggtgcggatgtgcgcacgcccctattttctggcgggcggcgacagtgaggatctgattcaggagggtatggtcggcctgttagccgcgatccgagagtatgactcctccaaagcggctgtatttcgcacttatgcggaggtctgtatcaagaaccgcctgttctctgtaataaaagcagcagcgagagataagcacacaccgctgaacaactcagtctcgttcgaaacccctctttttagcgggaacggagatcggtttgcctaccatgcgccaggccggcaggtggaagacccggaggagatatttctcagccgggagtccttccgggagcggatggaaacactgatgggccaattgtccggtttcgaagcaagtgtacttcggttgtatctgaacggtctgtcctattctgaaatcgcagccgaggtaaacaagtccccgaaatcggtggacaacgctgtccagcgcattcggcgcaagttggcacagcaatcttcatctggcgatgtcagcgtaagctgaacgcaatattactgacccagcacaatcggatcatccggacctgggcaacaaagcaaagagagggtaaaatcatgtacgaagacaagactctggtatgtaaggaatgtggccaggagttcgtgttcaccgccggtgagcaggagttctacgccgagcgcggcttccagaacgaaccccagcgctgcaaggcctgccgtgatgcccgcaaggccgcttcccgtggcccccgcgagtatttcaccgctacctgcgctgcctgcggcggcgaggccaaggtgcccttcgagcccaagtccgaccgtcccgtgtactgcagcgactgcttcgcccgtatgcgcgagcagggctaacagccaacttgaaaaggacgcccacaggggcgtcctttttttgtccgctgatgttagggaaaagaaaactgtgtcttgaaaaaatcagaaaaataggatatactactaatatcctagaattttggaggtattacacctatggctcagattacaaaagatacgattatcggcgacatcctggatattgcgcctgagaccgcgcccatcttcctgtccatcggcatgcattgcctgggctgcccctcctcccgcggtgagactgtggagcaggcctgcatggtgcacggcgtcgaggtggaggagctgctggccaagatcaatgccagtgtggccgccgcgcagtaaaagactccggaaccaaaaaggggcggccctccggccgctccttttttatcatgaggtgataccgatgagaaccgttgaacttaccccccgtctgcggtcggtggccgagctggtgccccggggggcgcggtttgccgatgtaggaaccgaccacgcgtatctgccggtctggctgctgcagcaggggaggattaccggggcagtggcctcggatctgcggccggggccgctggagcgggccaggggcacggcggagaaatacggcctgaccggccggatggacttccgcttgtgcgacgggctgtccgggatacagccggatgaggttaataccattgccatggcggggatgggcggcgagaccatcgcggccattctggccgcggccccgtggacctgggagcgggaatgcctgcttctgctccagcccatgagcgcccagcccttcctgcgccgctggcttcaggcccacggctataccatccgacgggagctgctgagccgggagggggacaccctttacacaacctttgaggtgtacgctggccccatggcgaagctgaccccggcggagctgtgggcggggcgacagaccaggggagagggttcccccctgcggttggcttacctagaccggctgctgcggcaaacggagcgcgcgatagcagggctgaagcggtccaaacgtccggaggatgcctcccgcctggcagagctggaacaggtacatcagggactattggacatgaaggaggagtggctgtcatggcaacggtgagagagatttatcaatatctggacggactggccccgttttctctgcaaatggagtttgacaacgccggttttctggtaggccggggagaacgggccgtgtcaaagattctggtctccctggatatcacggaggaggtggcggaggaagccgccgagctgggggcggagctgatcgtatcccaccatccggtgatcttccgcccggccaaatccgtgacggacggcgatccggacggacgggttctgctggcgctggcggagcacagggtcgccgccatctgcgcccataccaacctggacgcggtggcggggggcgtcaatgacgccctggcccaaaagctgggactggtgcagattgagcagctccatcaggacggggtggatggctccgggcgtccctacggcatcggccgggtgggcagtaccaccggcgcccccatgtatgcccccgcctttgctgcctttgtcaaggaggcgctgggggccaacggcgtgcgctacgtggacgcccgccgcccggtgcgccgggtggccgtggggggcggcgcttgcgccgacctgctgcgggatgccctggccctggggtgcgacacctttgtcaccgccgacgtgaagtataatggcttcctggacgccaaagcccttggggtcaatctgattgacgcggggcactatccgaccgagcaggtggtgtgccccgttttggccaaatggctggccgccggcttcccacaggtggagattctttccacgagccgccataaggaggcctttttatacctgtaagggcttgcaaagacgcgcaaatagtgataaactagttccgctgattttcgattgcaggaagggaacgaatcaatatgtcaggacattccaagtggcacaatattcaaaagaccaagggcgcggcggacgccaagcgttctcagatatttaccaagatcgcccgtgagatgatcgtggcggtcaagaccggcggcagcggcgaccccaacaacaactcccgcctggccaccgtcatcgccaaggctaaggccgccaacatgcccaacgacaacatcaagcgtaccatcgacaaggcgcttggctccggcaatgccgacagctacgagaacgtggtgtacgagggctatggaccctccggcgtggccgtaatcgtggacgcgctgaccgacaaccgcaaccgcactgcccccgaggtgcgccacctgctggacaagtacggcaagggcctgggggctacgggctgcgtgtcctggtcctttgaccgcaagggcgtcatcatcatcgagaaagaggatctggacgaggacaccgtgatgatggacgcgctggatgcgggcgcggacgatatgcaggtggaggaggagacctttgaggtctacaccgaccccgatgctttcggctccgtgctggccgccctggaggagaagggctataccttcgtccaggccgccgtggagatggtgcctcagaactatgtcaagctggaaaatgaggacgacatcaagaacatggagaagctcattgatctgctggaggacaacgacgacgtacagaacgtctggcacaattgggatcaggagtaacttcagacattcaaaacggaggtctggctttgtccagacctcctgtttattcataactttaccaaggaaaatccgacctgccatctgacgcaatgcaacttcaagaggttccagaagcgtttcaggtgctgcctgtccgaaaaaaacggccgcccggagcgctgtgctctgggcggccgtatctgcaagtaagcctgtaagccgggttctgtcctttaagacagccatctatctcgacgcaccgttgccagtacgctccagccgcctccccgggacggtcgggccgaccatatgtccctccacggcgttgctccggatagagtttacagcgacggacgcttggcacgccgtcgggtgagctcttacctcacctttccaccttgaccggccagaggccggcagactatttctgttgcacttttcctagggtcgcccccggcgggtgttacccgttatccttgccctgcggagcccggactttcctcacagacaggcctttcgccccgcccgcgcggctgtccagcttgcttgcgaaggacattgtaccgtattgtgggccgcttgtcaaatgggaatctcactcctccagcgaaaacagggccttttcatagtcctggacataataccgcaggtgcttccgccctctggagagcacggtatgtccctcagcctccagaagcgccttctgagcctccgtgccccccggatacttttcattcagctctccgccggttttcagcgtccgccagtaagggatcttgtcttcggcgcgctgatggctggcccaggcggcgatggacacaaaaagcccggccgtcaggggttcggtaaagtcggcgccgctccgccgggcgagatagctccggatgtcgccaacagtcaggagcttcccgaagggcactctccgcatcgcgcggtcgtaatcgatgggcgggacaaagtacatgcggtcgcctccataggctgcaatcgcctttggatcggtaattatctgtatcttcggcatgtccctgcgggcgttcagcatggcgttgaagtcttttcgtgcctcatttgacaagaaaatccctccagtccgacttttttcccacattttatcaaaatggccggggcaagtcaatctcgcccgaggaaacgccctcctttcgattgaaattttctcctcaatgggatataatattttagttatagacgaaacaaaaagggaggaacgagccatgggttccaccatacaggagtatttggcgtccctgcggggcaagcgggtggcggtgctgggcatcggcgtgtccaacacaccgctcatcaaaatgctgctgcgggcggatgttgaggtgaccgcctgcgacaagaggcagagggaggacttcggcggccaggcggaggagttggagagcctgggggccgagctgcgcctgggcccggactatctggacgggctggaccacgatgtgatcttccgtacccccggcctgcgtccggacgtgccccaactgctggcggcccgggaacgggggagtaccatcacctcggagatggaggtttttttccaggtctgcccctgcaaaaccatcgcggtgactggcagcgacggaaagaccaccaccactacgatcattgccgagctgctgaaagcggcggggcagagcgtctatgtgggaggcaacatcggcaaaccgttgctgcccgacgtggacgggatggtgcccgaggacgtggccgtgctggagctgtcttcgtttcagttgatgaccatggagcagagcccggatatcgcggtggtcaccaatctggcccctaaccacctggacgtacacaaatctatggaggagtacatcgccgccaaggagaacatcttcacccaccagggagcggacggcctgctggtgctgaaccaggataacgagatcacccgcggctttgcggccagtgcccgcggccgtgtgacccggttcagccgtcgggaggagctggagcagggcgtcttcgtcagagacggggccatctgggtgcgcaacgccatgcacgagcgcccggtgctctacctggaaaacatcctcctgcccggcgagcacaacatcgagaattacatggcggccatcggcgccctggacgggctggtgcccgaccaggtggcgcgggacttcgccgccaaatttgcgggggtagagcaccgcattgagctggtgcggacgaggaacggggtgcgctactacaacgactccatcgcctccagcccctcccgcaccatcgccggtctgcgctccttccatcagaaggtagttctgattgccggcggctacgacaagcacattccctttgatgtgctcggccccgaggtggtggagcatgtcaaggcattggtgctcaccggcgataccgcgcccaagctgcgccaggcggtggagcgggcacccggttacgatccggcggccttgcccattgtggaatacaaggattttgaggcggcggtgctggccgcctgcgggctggcccagccgggggacgtggtgctcctgtcgcccgcttgcgcctccttcgaccgcttcaagaattttatggagcggggcgcagcttttaagaggattatctacggcctggagtaaggctacggacgccggaggacacggcctccggcgccctgcttcggtatccgtggaaaggagtgaacccaatttggatatgagacaagccctggagcggctgtgcacctgcaccgcgccctccggctttgaagcccctgcggcagcggtagcggcggagctgctccggccgctggtggacgaggtgtccgtggaccgcatgggcaatgtgctgggggtgcgccgatgcgggaaggagggagcgccccggctcctgctggacgcccatctggatgagatcggcctgctggtcactggcgtggaggacggcttcctgcgcttccgcagcatcggcggcgtggatccccggatgctgcccggccgggagctggtggtgctgaccgacccgcctcggcggggcatcgtgacctgtccggctgggggggaagcggacaagagcatacccctgtccgagctgttcgtggacgtgggcctgtcccagacggaggcggagcgggccgtaccggtggggacgcccatggtctatcggggtggctgctttgccttgggagaggaccagatgtgcggcaagtccatggacgaccgctcctgcttcgtcaccctgctgcgggcggcggagctgctgcgggacagggagctggacgtagacctctatctcctgggctccacacgggaggaggtctccggggcgggcgccacggtaggcacctgggcggttcagcccgacttctgcgtggcggtggacgtgacccacggcaaaacccccgacggcccggcggacaaggccttcgccattggcggaggtcccgccatcggcgtgggccccaacatgacccgctggatgaccgaccggatgctcgccaaggcgaaggagaggcagattccctaccaactggaggtcatgtccggccacaccggcaccaacggctgggagatgcagatcagccgggagggggtagccacctcggtgctgtccctaccgctgaagtatatgcattcccccattgaggtgctctccctggcggacatggaacaggtggcggccctgctggccgccttcacggagggactgggaaaggaggcggcacggcgatgagagaactgctggagcgcctgtgtgcgcttaacgccgtgtccagctgggaggacgaggtgcgcgccttcctcctggcggaggtggagccccacgcagacaggctgcgggtggacgctctgggcaacctgattgcctggaaaaagggccggaaaaataccggtagcaagctcctcctcaccgcccacatggacgaggtggggctcatgatccgccaggtcaccgacgacggctatctgaaattcgacactgtgggcgccatcgaccgccgggtgctcctgggcaagccggtgctggtagggcccaagcgggtgccgggggtggtgggactcaaggcctaccatctggtcagccgggaggaggagaagtccgtccccaagctggacgagttctatatcgacatcggagccaaggaccgggccggggcggaggcgcaggtcgcactgggtgatacggcggcctttgacagtgacgccggagacttcggggcgggcctgttccatggaaaggccctggggagccggttgggctgcgccgtgctgctcaccctcctgcgggatgaactgcccatggactgtacctttgtctttaccgcccagaaggaggtgggggcccgcggggccttcggcgcggccttctccgtcaccccggaggtggcgctggtggtggacggcgcggatgctgcggatctggccggagtgcccgcccacaagcagggatgcagcttgggcggcggtgtggtgctgccctatatggatcagggcgccattgcagaccgggggctctttgaggcgttgcgctccctggcggaggccggcggcatcccctggcagaccatgcgctcggtggccgggcgcaccgatacggtcgccatccagcggaccaaagagggggtacggacggcggcggtgtccatccccgtgcgctacccccgcaccccgtccggcgtgacctgcctgcgggacgcggaggcggccctggccctgatccgggcctttgttggacatttggcagaaaaggagtgaaccgacatggaactgattgagattttgcaggccctgaacgcctgtcacggcccctccgggagcgagggggccgtcgccggggtgctccgcaccctggccgctccctacgtggattcctgtaccacagacgccctgggcaacctgatctgccataaaaaggggagtgggcccaaggtcctgtttgccgcccatatggactccatcggcctgatggtcacccatatcgacgagaagggcttcctccgcttcggtccggtgggcggtctctccgcccacgaggtgctgggcacccccgtccgcttcgccaacggtacccgcggcgtggtggccctggagggcaaggtggagcccaaggacatgaagctggagcacctgtacctggacattggggcccgaaacgaggcggaggcaaaggccatggtacaggtgggggacattgcggtctatgacacccacgccttctgctccggagggcgcatcttctctccctatctggacgaccggatcgcctgcgcggtgctgctgatggcgatggagcgcctgaagaacacggaaaatgacctgtacttcgtctttacggtacaggaggaggtgggactccgcggagcccgcaccgccgcttacggggtggcgccggactacggcattgccgtggacgtgacggactcagacgacatcccttcggccccccatgcgtgcagcagtgtggccggaaagggggccgccatcaaggtgatggacagttcggtgatctgccacccttctgtggtggccaagctggagaaacttgcactgacaggtaacatcccttgtcagaaggatatcctgcgctttggaggcaccgacgccggggccatccaccagagccgggccggggtgtataccggcggcatctccattcccacccgctatgtccacacgccgctggaggtggcggatctgggagacgtggaggcctgcgcagccctggtggcagccttcgcccaggcgaagctgacctgctgagtcctcaaatacagaaagaacggaatgtgtaaaaagaaatgcctttacagattagtgaaaaagtaatggccctggcagcccaggcgcaggccgggctgcgggaccaattcgaccgcattgattccatcgcggaggagaacacccgcaaggtcctggccgcttttcagaagcaccgggtggcggaggcctattttgccgggaccaccggctacggctatgacgatctcggccgggacaagctggatgggatcttcgcggagctgttcggcaccgaagatgccctggtgcgggtgcagttcgtcaacggcacccatgccatctcctgtgccctctttggcgcgttgaagcccggcgacattctggtgtccgccgtgggcgccccctacgacactatgctgggggtgatcggcgtggtggacaagggccccggttccctgaaaagttacggaatcgaatatcggcaagtagatttgcttgacgatgcgccggacccggagggactggcctgggcggtgcgggacccccgcgtcaaggcggtgctgatccaacgctccaagggctattccacccgttcctctctctctgtggcggagatcggggcgctgtgccaggtggtgcgggccaacaacccggaggccgccattctggtggacaactgctacggcgagtttgtggagacattggagcccacccaggccggggccgacttggtggtgggttccctgatcaaaaaccccggcggcgggctggctcccactggcggctatattgccggacggcgggatttggtggagggggccgccatgcggctgtccacccccggtatcggaaaggagtgcggctccacctttggggccaaccgcagcctctatcaagggcttttccttgccccccataccacggcccaggcagtcaagacggcggtgtttgccgcccggatgatggagctgctgggctaccggacggagcccacctccgatacggtacgccacgacatcattcagatgattcattttggcgcgccggagcccctcaaaaaattctgcaaaggcatccagttcggcgctccggtggactccttcgtgacaccggagccctgggacatgccgggttatgactgcccggtgatcatggccgccggggcctttattcaaggcgcgtccatcgaactgtcctgcgacgcccccatgcgtgagccctatacggcctatctccagggcggcctgacctatgagagcggcaaggccggtgtcctgctggcagtggaagagttgctgcggggcgaatagggcaagccggtccgcgcataggctgatccgggaggtgaggcccgtgcgcagaccgatacgcccctggctgagggtgcctcgccggcggcggcccgccgctgcgcggccaaaaggtgggattctgctccccgtgctgatcgggatcggtctggcggtggcggtcattgttttgatcgacgccgcactccggcccacagttacagagctggcaaaggccaaggtaaaaaatgccgtaaccagcatcataaacgacgcagtcaatgagactctgtccagcgaagccatatcctacggcgatctggtgacgttggagaaggacaccgctgggcaggtgacagtgctggccgccaatacagcccagttgaacgcacttcgcacggagatcttgggccggatattggagcaggtggaacagcttgacagtcaggagctggggatccctctgggaaacctgaccggctttgccaccgcgtcggacttggggccggtactgccggtacgggtgttgactgcggccacaccgaccgctgcatttgaacatgtatttacctcatctgggatcaaccagacccttcatcaggtcatgctgaatgttcaggtagagtgtaccctgctgatcccaggcggcacggtggacacggtcgtggaggcacaagtgtgtgcggctgagacgctgctggtggggcaggtgccagatacctatctggagctgcccggaggtttgtaagaaatccgtaaggaatttgtaacgacgctggcattccctctgtggtagaattgggacgataccagtaggagggagccaaaatggatacactgctgtggtactgggcggtctcctgggactatgtggcccagatgctgctctgcatgctgctggccgcccttgtattttttcttctgcggccctggcggaaaaaacgcttagcccggcagggcatggccagtgggaaactccgcgagactgcactgctgttctttgtgatgttctgtgccggattggctgcgctgaccgtctttcccgcttatttctggacggcgtaccactggcaggaagcgctggccgggcatgaggtattttttccgctgactccgctctctgagtcgatacaggagattcagtggacccccacggtccttcaaaatctgcgggaaggcggctgggcgggatacatggccatcgccaatctgcttatcttttgtccggtgggcttttttccagcgctactgtggcggggaaatcgctgtatgctgggacttctgactggcttttgtacttccttctgcgtggagttcctacagctgtttgtggggcgggccactgacatcgatgatttgattcttaataccttgggaggatgtttgggcgggcttttgtgcctgattttcgcccatttagcccccaaatttacccgacgattccaagtggaggtccgatatggacgagaaacaggagatacagagcctgcgccgggagctggagcaggcgaattatgaatactatgtgctggacaaccccagtatgtccgactacgattttgaccacaagctccgccgcctggaggagctggaggcggcccacccggagctggttacccccgattctcccactcagcgggtggggggcaaggtggccgacggcttccaggaggtgcgccaccggataccgctggagagccttcaggacgtgttctccgtggaggagctggaggagttcgatcagcggatgcaggaggctctgccggagggcgttgaatacgacgtggagcccaaggtggacggcctatctgtggcgctggagtatgaaaacggcctctttgtgcgcggcgccacccgcggcgatggccaggtgggagaggatgtgacagagaatctgaggaccatcccttccatccctctgcgcctgccggaggccctgcccgccctgattgtgcggggcgaggtgtttatgcccaaaaagagctttgaacggctcaacgaggagcgggaactgagaggggagagcctgttcgccaatcctaggaatgccgcggccggctccctgcggcagctagaccctaaaatcgcggcctcccgagggctggatatccgggtttttaacatccagtgggcagagggaaagacctttcagacccattcagaaaccctggaatacctgcggggacagcactttaaagtaattccacatgacacctgcaagacgatcgccgaggcggcggagcgtatccaggccatgggggagggcagagaggcttacccctttgacattgacggagcggttgtaaaggtgaatagccttgcagaacgtgaaaccctgggcagtacggcgaaatttccccgctgggcggcggcctacaaatatccgccggagcagaagccgtcccgggtggtggacattgtggttcaggtggggcgtaccggcgtgctgacgccgaaggccgtagtggagccggtgcgtctggccggcaccaccgtcacaagcgccacccttcacaatcaggatttcatcgcggaaaaggacatccgcatcggagatactgtgctggtacagaaggcgggagagatcattccggagattgtggaggtgctgaaggagaaacgcccggaggggacgcagccctaccacctgccggagcagtgcccggtgtgcggtgcgccggtggcccgcgacgaggatggggcccacatccgctgtaccggcgcagagtgccctgcccagcgcctgcgccatttggtccacttcgccagtcgggacgccatggacatcgagggcttgggccccgcggtggtggagaatctggtgggcgccggtctggtcaaggggccgggcgatctgtaccacctcaatgcggaggaggtggcccagttagagcgcatgggcaaaaagagcgcggaaaacctcgttgcagccattgaacggtccaagggcaatgacctgtcccggctgctgtttgccttcggcatccgccaggtggggcagaaggcggggaaggtgctggccgcccgctttggcacactggatgcgctgatggcggcctcggaagaggagctgaccgcggtacccgacatcggcggaatcacggcccggagcctgctccagtggttccagagcccccagagcattcacctcattgacacgctgcgggaggcgggggtgaatctggagagccatgaggagccggtgggcgaccaactggcggggaagatctttgtgctgacaggtacgctgaagcgatttacccgggacgaggccggagcgatgatcgaggctcagggcggcaaagtgtccggatctgtttccaagaagacctcctatgtggtggccggagaggcggcgggctccaagctgcgcaaggcccaggagctgggcatcccggtgcttaccgaggaggaatttcttaccatgctcggcagcaggcccgatacggatcaattataaaaaggggcaccggttctcaaggagagccggtgccctttttgtgctctgcggcataggatgtgtggaaaggggagagcgctatgctggaacggataccctatgaccgccgtgccgctgtggcctatgcccatcagtgggcctacggacgaaatccggatttctatgactacgaggagatcggcggcgactgtaccaattttgcctcccagtgcctgtacgccggaacgggcgtgatgaacttcgacccagtctacggctggttttaccgggaccccaacgacaaggccccggcctggaccggtgtggagtatttttttgactttatcacccgtcagacgccgagcccgggaccctttgggatttctaccacgctgagtgagctggagccgggagactttgtccagttccgcttcaataaggatgtatttggacatactccggtggtggtggagatcgggcgtccagccactttgcagaacaccctgattgccgcccactcctatgacgccgactggcggccgctgagcacctattattttcaggagatccgcttcctgcacatacagggcgcctaccgggaactcggtgaggaaccgcttcttcccggcatgtaaaaaccgctcccctgtccacctttggacaggggagtttttcaggcgtgtttgaaaaagtacaggtttttgaacaaccggaatccgggaatttcgccctctattttatcatatttcctggaaaaagcaatgaaaaatgacatttataaacctgtactatttcaaaccactatgaggaagcataaccgtgcagaagggggcgtggtcggaatgggacaaaaagacctgcgcttgaaccgcaccgcgtgcctcatgcagaggctgatgctggctgccttttttgcgctggcagtcgcggcgctggcagttggcatatctcagggggaacggtatctccaggcatttaccctggcgctgctggggctttttctgtatactgccttgtgtgtacctgccgcgaaacgattggaacatttggggccgttgcggctttggctgcttctcaccatactttgcaccgcaatcaaagtattttggatctggagggtacgggttcctctggcgggggattactcggtcttttggggatatgccaatgcgcttgcggagcgcacaacggtatacggcgggcggtatatggccctgtttccccatattttcggatatgccgattttctgagctggtttattcgcctgtcggggccacagcccatgcttgctccggtgctcaatgtactgctgacggtctgctccggcagttttttgtatcatctgtgcctgcgctggttccacttgccggccgctacgctggcctatctgctctggattctgtgtccatctcagaccatctataacagccttgtgctatcggagcctctctatactgcccttattctcggtgtgctgtcccttttgacggagacggagcggtttgccgccctaaaggggtatccgctttggatgggggttctctccggcacggcgggcggcgttcttctgcgatgggtcaacggggtgcgccccattgcggccatactgctgatcgcgctccttctgtggctctctctgttgaacctgaaccggctggctgcccggaactggagaagatggtgggggctctgcatggccggtgtgctgggggcctatgcccttctggggccggtctggaatgcccggctttcggtacggataggggaggagccgtcccacacgccggggtacagcctattggttggcttcaatcccgactccggaggacgctggaatcaggaggacagcgaccgcctgtatggatacagcgaccagcctggggcaacggctcaatggacacaggaacagcttctggccgatgcagaggcccggattttatctggagaaattgacttttcaaagctcctaaagcaaaaactgcgcacgtttctgggatcagacgatgcctgcgtgggatattcggcctcggttctgcagcatacggcgtttttctccctgctctgtaatggcttctattatgcggcatttctcctggcaatcgggggtgctatccaggtgtggcggagcagagagagaggattactattgctggcaccactctatatcttagggctgaccctggcacagatgctggtcgaggtggcggggcgctaccactactcaatgatacccatgcttttactgcttggacaggggacatggaggagggcaggggaggaatagaaataggaggccgctctcaaagagagcggcctcctatttctattttccaggggggatgggggtggatttcttcttcattcgtcccagcgggttcgccttggccgccgagcgcagattttcgttgtccacatgagtatagatctgggttgtgttcaggttttcgtgtcccaacacctcctgaagcgtgcgcacgtccacaccattctgcagcatgagagtggctgcggtgtgccgcagcttatggctggaatagagagaggcatccagcccggcttttttgaggcgctgtttgaccatatagtgcaccgcatccttggtcatacgggtatgggtgcgggtcaggaacagggcgttcgggtcggccgcagcctgacggctgcgctcctccagccagtcatccagcgccgcgcggcaggcatcgttgaggaagatcatgcgctccttgttgcccttgcccagaacacggagctgttcctctcgaacatctgttaaattaagggagactaactccgaaattcgcaacccacagttgagaaacagcgtcaaaatgcagtagtcccgcgcctggttgggctcgtccacggcctccagaagctggatgctctcatccaggctgaggtagcggggcagcgattttttcagccggggagagtccagatcctgcatgggattttcgctgattaattttgccttgctggtgagatacttatagaacgagcggatagcagcgatttttctggcccgggcggtggcctccaaaccatagccggtggaggggctgttggcgtgcttggcccggtcacggctcaggtaattcatgtaggagtagacatcgctcagcgtgacagacctggccaggtccagatccacgtcgtcaatcgggatttcatccagctcggcggtacgtggtgctttgcctttttcgattttcacatagcggaagaagttgcgcagatccaggtagtattcatccaccgtttttctggagtggccctgaatggtctcatgatacaccagaaagtcccgcagaaccggcggagccgtcagacggtagtcatttgtattcaaaccctccctccaactcaacaaaatttttattttgttgagttggaggtataccccctctcgattggagtgataccggtgagcctgatagcctgcaccagtgcgtgtgtctatcaacaggacggatactgcagattggagcgcgcatcctcctgtggcgtgccctgtgcggaatctccttgcgtcaattttgtgccacggcggaactgcggtacaaccgcgccgcctacaaaagcgcggccagcgcctcgcggatgttgcgaaccggaatgagctgcaggccatccggggtgtccagctttccgccggtacgggctgggatcaggcactttgtgaaccccagacggcgcacctcgctcaaccgctggcccaacgcattgactgagcgcagctctccggtcaggccaacctcgccgatggcggccagatctccaggcacgggcttgtcccggaagctggaagccagtgcgacgatcatggccagatcggcggcgggctcgtccaaaaacaagccgccgatgacgttaatataggcgtcacaggaactgaccatcagtccaccccgcttttccagaacagccagcagcagattcgcccggttgaagtcgaagccgttggcggtcctgcgcggtacattgaagctggtgggcgccagcagggcctgtacctcggccaaaacaggccgcactccctccatgacgcaggtaacgcaggtgccaggggtgtcctgaggccgtcccgagagcagcatctccgagggattgggcacttcactcaggccggagtcctccatctcaaagacgccgatctcattggtggcgccgaaacggttctttgccgcgcgcagaatgcggtaggagttctgctgctcaccttcgaaatagagcacgcagtccaccatgtgctccagcaccttggggcccgcgatagacccctccttattgacgtgtccgatgacaaagacggtgatcccctgccccttcgccaactgcatcagcgccatagtacagtcctttacctgtcccacgctgccgggagcggtggtcagatccccgttgtagagggtctggatggagtccacaattagcacgtctggcttcagctcgttgaccgactccagcacatcctctaggttggtctcagccagaaggtacattccctctccacggacatggagccgctccgcccgcagcttgatctgccgctccgactcctccccggagacatagagcacagaggcaaaacggcacaggttgtcgcagatctggagcatcagggtggacttgccgatgccgggggcaccccctaccagcaccagagagcccttcaccgctcccccgcccagcacccggtccagctcattcatcccggtttcaaagcggagctcgtgggtggtttccacctcgcgcatgggcctgggccggttgccggttccccgcaggccgcccccagcgacagaggcggcggccgcactcctttttttcggctctgccggccgctccacaagggtattccatgcccggcaggcgggacattggccggaccactttggggtttcatttccgcactcggtacaataaaacagtgtttttgctttcattctgaggcgacgcctcccttttgtagtgaaaagccttcccctctcccctcctcgtccagccattgcagccaggaggcggccaaggcggaggccagcttggtctgataggcgccggattgcagtagcagctcttcctctgcattggacaggaagccgcattccaccaggatcgccggacaggtgatgtggttcatcagatagacgctatccgggatgggctttgcctcacgggtgttgcccgggtccagtgcggcccgcagtgtctcctgtgtgagttgtgccagaggttgactgagctctccgttggaatagaacacctgagcgccgtggtacttcccgtccggaaaggtattctggtgtacgctgagcaggacagcatgctccgtctcctcgatccgggccacacggttgtggaggtcagagacttttttctcccggagggtttgcgcactgtcatcatggagggagatatcttcactgcgcagcagaagcggcgcctcgccatacaaccccagaagctgatccagcttctgcacaatggccagattgattccgctctccggcacaccggagagcgagaccgcgcctccatcctccccgccgtgacctgcatccagaaccagggtctgtccaccgctgcggatgggagaaaaggtcgccaaagcagcccggcccggccagaaccagaaaaaatagactgtaccgacggccaacgcggccagcaggacccagcttccaattttctgcatatcaaacgccccctctcagacacggtatgagaggatattttttattataacacaccttacagatttttgttgccttttgcgtgcagacacgataggataaagacaggaaacaatggaggtgctttctatggtcgttgacaaaatcgagcatgcgtccctctactatggtctggggaaacggtttcaaactgcattggagtggctggcttcggcggacgttggcgcattgacgcctggccagcgggtggacatcgacggggacaatgtgtttgcaacgctctttgaggtggacacgctgccgcctgaggcgtgcaagctggagtgccaccagaactatgcggatattcaatatttgctctccggcatggagggtgcgggctatgccctgcccgacgcggagcttcgcgcgctgagcgagtacgactcaaagggagatatccagttttatacggctgagtgggacacgctcaccatccggccgggtaccttctacatcgtctggccccaggacctccacgccccccgtgtggcgctggggcagcctgggccggtgcagcgcctggtggtaaaggttaaattaaaataaaacgcagcgtgaggcggaaaaactgtctgtcagccgccacccgattccaaaacccgccccatcgcccgcgttcgggccgatgcgggcgggttccctttttctctccctgcatagaatgtgacgaagggggctggtgggagccgcctccccccttccctcttcaatttatgtaaggaggaactgcgtttgtatcccgacaataatatgccaaatacctgcggagacgcctgcggtactatgcctgagtgcgccccgctggcggtcccatatgtccccttccagcagaccaatcccaagcgctactcccagcaggatgcgctgaataacggtacgcttttccccggcctgaacctccccttccgcgttaagccggacgcggcaaaggtgatgggcggcgcgctggcggagctccaggccctggagtttgttctggtggagctgggcctttacctggatacccaccagggcgacgcggaggcctttgagctctataagcagtatgccgcaatggaaaaagaggctcgggagaaatacgaggccatgaacggaccggtcacccagatggccacggccaacgcgaagacatgggctgcctggctgagtgagccctggccctggaactaccaggaaggaggcatgaagtaaatgtttatttacgagaagaagctgcagtatccggtcaagatcgccaactgcaaccccaagctggcctccttcatcatcagtcagtacggcgggccggacggcgagttgggcgcctccctgcgttatttgagccagcgctattccatgccctaccccgagctcaagggcctgctgaccgatatcggcactgaggagctggggcatctggagatgatcggcgccatcgtccatcaactgacccgcaatctgaacgatgagcaggtgcgggagggcggctttgcgccctatttcgtcgaccacaccactggcgtctaccccaccgccgcctctggcttcccctggaacgccgcctccatggcggtcaagggcgatgtgatctgcgacctgtccgaggacatggccgccgagcagaaggcccgggttacctatgacaacatcctgcgcatgtccgacgatccagatgtcaacaacgtcatccggttcctgcgtgagcgggaggtggttcatttccagcgcttcggcgaggcggtgcgtctggccaaggagaagatggaccagaaaaacatctactttaccaacccggcgtttgacaaataaacccatcagagcccccgcacagctttcgtgcgggggcttttcctgtcgccactgggcttgcgttttttgccgcttggcgctatgatctaatatagaagaaaaaaataaagagaagcggaagaatttcgtcaaattcactatagcaaaaatggagtgggcgcgtatggcaggggtccaattggaacatgtggtgcgggagtacaccatgggaaggacaaccattcgggcggtagacgacatcagctttaccataccggaggggaaatacaccatcattttgggggccagcggcgcgggcaaatctacggtactcaacatcttgggcggcatggactcccccacctccggccgggtgacggtcaacggcagggagatctcgggcttcaacaagcgtcagctcacggagtaccgccgggagagcatcggctttgtctttcagttctacaacctgatgcccaatctgacggtgctggagaacgtggagctggccagccagatctgtaagaatcctctggactcccggcaggtgctggccatggtagggctgggagaccggctgaacaacttcccagcccagtgctccggcggagagcagcagcgcggcgccatcgcccgtgcgctggccaagaatcccgatgtcctgctctgcgacgaacccactggggcgctggactaccaaaccggaaaggctattctggccctgctgtacgatctgtgcaaaaagagccggaagaccgtggtggtggtcacccacaacggggcgctggcgccgacggcggacgtgctcattcggatgaaaagcggaaaaatcgaatcttttgaggagaatccgagtccggtgcctgtgcaggagctggagtggtaggatgatctggaaaaactttgtgcgggatctgcgccgcacggcctcccgcctgatctcggtcagcatcatcaccatgatcgcggtgatggtctataccgccctcagcggcatcctcaccaatatagagcgcatctccgcctcctatctggaggggcagaatgtggcggactactggctcacaggcgtcaatctggaccagggggactgccggacgctggagggcatcgcaggggtgaccggggtgcagccccgggtagttctggacgcggaggagcgccacgacagcggtgtgacgctccagctctatgccgtccccggggactacgccatcaacacgccctatgtggtggagggccgcctgccggagagcagccgggagatcgtgctcagcgatacgctggcaggggcccgggggctccatcccggggactggtacgagttgacactgacgggaaccggccggtacctgcgggtacggatcagcggactggtcaaagacccggagtgcctctactatgtgaataccacaacgccggccccggatttgacccactatgcctttgcctatggaaatgagacgcttttgcaggagctgatgggggcaaaccgctacaatcagatctgcatcaccaccgacggaagcctctctgcggcgcggctccggctggcggtggacgcggccctgggggaccgggtcgtgaacatcctgtcactggaggacaatacccaggcctactatctgctggagatgcgggacaatctggcgcccatactcaacattttcccggtgctctttttcctgtgcgcggtgctgatgatggtgagcaccatgaaccggctgatcgagaacgcccgctcggatatcggaaccttcaaggcgctggggtactctgacgccaaaatcatgtgctattatctgctccatgccctcctggtggtcgtggtagggttcccggtgggcgcatggctggggcggtatgtgtccgccctgatcgtttccaccatcgccatcgggtgtgatctgccgccctatacggtggtacacgactttgccgcctgggggcgggctctggggctgaccgccctgtgctgcatcgggagcgcctggctggtggcccgctcgctgctgaaggagaccccggcccagtgtatgcggcccaagccgcccaggagcacgaagcccgtggctctggagcggctcggcccggtctggcatcggctgggctttaatcagaagtacatcatccgcaataccctccgcaacaaagtgcgtatggccacctgtatcttcggtatcgccttctgtatggcgctggtctttctggcctttgctctgcgggactccattcaggcctactcggacgcgctggccgagcggcagaaccgctacgacctcatggtggatctgagcacgtcggtgactgaggggcagtaccggcggctcgccaatgacgtgggtgtaacggaggcggagctggagatgagcaccgcctgctggctctacacggactcgcagcgggccacggcggcgctcacagtgacggaggatcaggtctcgctgaagcggtatgacccctatgccgagggcgcgctcacccttccggggaacgggctggtgctggaggagtccctggcgaatgagctgggactgcgggccggcgaccgggtgacgctccggtttgccggggacagccggtattactccgtgtccgtggcggaggtcaaccgctgtgtcagcggggcctgcctgagccgcagcctgtggcggagcctgggcctggcttacacgcccacggccgcctacctcaccagcgatgggccggaggcgctggccgcgcggttgggagactatgacttcgtggacgcatggcagacccgtcaggccgccacagccgccgcggtggagcggctgagcagcatgtccatggtagtctatatcctgatcctgttcggcggcgggctggcctgcatcgtcatttacaatctcggtatcatgagcttctttgagcagctccgcagtctggcgactttgatggtgctgggcttttatgagaaggagatcaagacccttcagttaagcgaaaacatcattttcgccgtgtgtgggattctcctgggcatcccgttgggggtttccctgaaccgcatgatcctggcctccattaccaccatgcctctgatggaggctaccaggccggcctctctggccctgtcctgtgcggtgacgctcctgttcgcattggcagtcaacgtggtgatcgggcgtaaaatgcgggagatcgacatgctgggcgcgctcaagagcgtggaataacaaagaggtggatggaatgaaacgattgaaacagggtgcggttgcgctgaccggtgtgctgcttctgctgagcggctgctccggcggcgtggatgaataccaatgtgtgcatccggagaccgggactctggtgcagcagcttgtggagggcacagggacggtgagctatcgggaggagtattccgtcatccctaccgtcagcgccaagatcctctcctgttccatcgaggagggggacacggttacggccggacaggtgctctatgtgctggactccggcgctctggaggatcagatcacccaggcccgcctgtccctgaacagcgcgcaggcatcctatgaccaggcggtggacgcctgtacggatctgaccgttcccgcccatgcctcggggacggtgacggaggtctatgtccacgtgggagactatgtgaatacgggaaccgccatcgcatcactggtggacagcgccaacctcaccctgacggtgccctttgcggcggaggacgcggcggctatggccccgggcaataccgcggcgatcacctttccgggacaggcaggtaccgtcactgggacggtagaacgggtgtacgacacgtccacggcactctccggcggccgggagggcgtctatgtggagctcaccttccgcaatccgggcgcggtgctgagcgggacggcggctctggcctcggtgggcggtgccgcctgtatggaggccggaacagtggccaacgccacggagcagtccatctacgccacccagtccggccaggtggcctccctgcccatccaggcgggaaccgccgtcactgccggtcagacggtgatgaccttggagaacgccagcctgaccaacgccgtaaccaacgcctctctctcggtagaatcggcgcaggtcaacctggcccaactggaggccaagcgggcggactacaccgtgacggcgcccgtggacggcacggtgctggagcgcccgttcaagaccggcgactacgcggcggcggccacctccctggccaccctagcccagccggattccctgtgtgtctctgtggagattgatgagctgtatatcaatcaggtgggggttggccaactggcgcggatcacctttgcggacggccagacccatgaggcgcgggattacgacggggttgtaagccgtatggatgacaccggcgtgtcctccggcggggtgacggactacagcgtagagatcagcctgacccgtaccgaagagctgaaggccgggatgaacgtcacggtggagatcctggtggcccagagcgaggactgcatgagcgttccctctgaggcggtgacaggcggtgtggtccgcgtgctgcgggacggcgcgcgggagccggtggaggtgccggtggagaccggactgtccggggatggcgtgaccgagatccgctccggcctgtcgccggaggattgggtcgtcgtggatgcttattaagatggggtgtcgataggatgggaaacgaaatcaagacggtattgctgaaatcagtacaactgtacgatccagatcccaaagggatctgcgacctctttctgtgcggcgggcgggtcgctgccgtcggccgggggctagcccccaacctgcccggcgtggccgtgctggacggaagcggcctgacggcctttccgggcctggtggatcagcacgtccactttaccggcggcggcggagagtgcggcttccgcagccgtgtgccagagctgtccctcacggattttaccactgcgggcgtcaccacggcggtgggactgctgggtaccgacagcgccacccgcagccccaaggccctgctggccaagaccaaggcgctgaatgaggaggggctcacggcctattgcctgacaggggcgtatgacatcccctcccctactgtcaccggctccctgaaggatgatgtgacctacctctcagaggttctgggcgtcaaggtggcactgtcggaccaccggggcggccaccccacacttgagcagttcatccatatggcctgtcaggtgcggctaggggccctgaccgccggaaagcccggtgtggtacacatccatatgggcagcggaaaacggggactcggcctggtctatgacttgctggaggccacggatctgcccatctggcacttccgtcccacccacatgagccgttggcagagcgaggccgcggcgtttgcccggaagggcgggatggtggactttactgccaatgccgacccagaaaagtgcgccctgcctgtgctgcgcaccatggaggaggcgccgctggaacgcatcaccatcagctccgacgccggagggagcatgccgcgatggtcggaggatcactgcaccatgctgggcatgggggtgggcaagatggacaacctcctccccaccatccgctgtctggtgcgggagcaccgagtgccgcccgagcgggccatccgtcttttgacgcagaatgtggccgatgggctctgcctctcacgcaagggccgcctgacagtgggagcggatgcggatgtgctgctggtggaccgggactggaacatccacacggtactggccggcggagagatcatagtgtcggacgggcaggtggttaaacaaccctatatttcttaagaaagcaagtggacggcatttgtggcggactacccctttaaggcggactccatggagcgtgagtggcgctttaccctgaccgatccgattctggagtgtaaccagggcgcgtttcggctgtgcatctcccaaaacggccaggggcgggcggagcggattgcggaaccgtgcgccgaccagatcagtattcagacgatgaccaccatgctgatgggatataagcgcccggactacctggccaggatagggcgcctgaacgctgacgaagccaccatcgatatgctggaggatgccattgagcagcaagcaccctatatctccgactacttttaagaggacgtgtcgcttagcgccctctgccttaaaaaagcatttgcgtgcgcaattgactgcgcacgcaaatgcttttttagcctgtcctacggcggaaccgggcgattaaaccagaagaaaagagcggggagagaatttctcctctccccgcttccgggcagatgttacgccttgccgtcgcagcccagcacatggatgagcttgtgcttgaccatctccttgatgttggcccgggcgggcttcagatactcgcgggggtcgaacttgtcggggtgctcggcaaagaactggcggatggtgccggtcatggccaggcgcagatcagagtcgatgttgatcttgcacacggccagacgggcagcctggcggagctgctcctcaggaatacccacggcatcgggcatcttgccgccgttttcattgatcatctttacgtactcctgggggacagaggaggagccgtggagcacgatggggaatccaggcaggcgcttggagacctcgtccagaatgtcgaagcgcagaggcgggggtaccaattcgcccttctcgttgcgggtgcactggtcggcggtgaacttgtaggcgccatggctggtgccgatagcaatggccagggagtcgcagccggtcttggagacgaactcctctacctcttcgggatgggtgtagtgggactcctcggcggagacctgcacgtcgtcctcaatgccggccagcgcgcccagctcggcctccaccaccacgccgtggtcgtgggcgtactcgaccaccttgcgggtgatctcgatgttctcggcaaagggcttggaggaggcgtcgatcatcacggaggtgaagccgccgtcaatgcaggacttgcaggtttcaaaatccgggccgtgatccaggtgcagggcaatggggatctcggggcactcaatgaccgccgcctccaccagcttgactaaataggtgtggttggcataggcgcgggcgcccttcgacacctggagaatcatgggggcgcgaacctctctggccgcctccgtgatgccctgaacaatctccatattgtttacattgaacgcaccgatggcgtaaccgccgtcataggcctttcggaacatttccttcgtggtaaccagtggcatagagggctcatctccttcgtttatttgccacatgattctatcagttttcattgccaattgcaagaggacgtgctatgatatttacgcaaaaaccgctaggttcaccaaactaaactacggtcagggaggtacgattcatgagtgaattgagaggagcctgcatcatcgggcagtcgggaggccccactgcggtcatcaatgccagcg

SEQ ID NO: 4267 - DNA, 51535 bp, Unknown
  gut microbiota DNA sequence
actcacgaaaatagttagattacaattcaagtcctgtatcgtccaccagattagcgggggacatgacccacagaggtcatgtccccccttattgtttcgcgtggaaagagccgcccagatgggcggctctttccacgcccgttcacgcgcgccgggcggccatgtccacggccacctccagggcgagggtgatcatctgggtgaaggaggtctggcgctcggtggtggagagggcctcgccggtcagcaggttgtccgaaacggtgcagacggccagagcccgcttgccggcctccgccgcgttgcagtaaagggctgcgctctccatctctacggccagcacgcccagccggccccaggccagagtatcctccgtccggcggtaaaagacatcggagctgagcaggttgcccacggcggtctccacgcccaggcggcgggccgccgacacggcgctctccagcagcgtaaagtccgcgatgggagagaaggtgccgtccagcccgtactgcctggggtagttggagtcggtgcaggcggcctggccgagcaccacatcccgcagcttcagccggggagagatcgagcccacgctgcccacgcggatgatgttgtccacgtcgtaggtgtgaaacagctcgtaagagtagatgcccatggagggcatgcccatgcctgaggccatgacggacacaggcgtgtcccggtaggtaccggtatagccctgtacgccccggacattgttgaccagtttggcgctgtcgagaaaatgctccgcgatgaatttggcccgcagtgggtctccgggcatcagtacggtctttgcaaacgccccctgggcggcctcattgtgtggtgtacccatcgttcttcccccttatttctggtggttctattataagcggcctagcccttctttgcaaggcggaggaggaagctcagttgacattggggcgggatatcattaaaataagagggccatgccggcggcgcggcgcacggctcgaccggatatgacaatcgacctgcagagaggagtcgtcaaatgaagcaaaagaggtggaaaacggacggatatctgaggatattcgcctcttattaccggccccactggaagctgtttgcactggatatggtgtgtgccctgtgcatctgcctggtggacctggccttccccatcgtctcccgcttttccatgcagacgctgctgcccggacagatgttcacggcgtttttcgtggtaatggcggtgctggccggggcttacgtgctcaaggggtgcttttactatatcatcacctactgggggcatctgctgggggtacggatggaggccgacatacggcgggatctgttctcccacatgcaggatctgtccttttccttctatgacaaaaaccgcaccggccagctcatgagccgggtcaccggcgacctgtttgagatcaccgagctggcccaccacggcccggaggatctgttcatctcctccatcaccatcctgggggccttctgcgtcatgctcaccatccggtgggagctggccctgatcgtatttgcggtaatccccctgttcatcctgttcaccaccctgtgccgcaagcggatgatgcgggcctccactgaggtgaaggccaagctggcgggcattaacggggaggttgagtcctccatctccggcatgcgtaccgccaaggccttcgccaacgaggcggcggagagcgccaaattcgaccaggccaacgaccagttccggggggccaagcggggctactaccgggccatggccttctatcagtcgggtatggagttcttcatgggcatcctgtccgtggttgtcatcgccttcggcggattcctgctcatgcgggggcggatggatctcatcgacttgaccaccttcttcctctacatctccaccttcatcacccccatccgcaagctctccgccttcgtggagcagtttatgcagggcatggcgggcttcaagcggtttgtggccctgatgcgggtggagcccgacatccaggacgagccggacgcccaggagctcaccgacgtgaagggggacatccgggtggaggacgtgaccttccggtatgagccctccgatccgccggtgctggagcacgtcaccctccacgtccggcccggcgagactgtggcggtggtgggcccctccggcggcggcaagtccaccctgtgccagctcatcccccggttctacgatgtcaccgggggccgggtgctggtggacggaaaggacgtgcgcaccctcacccagcactccctgcgggccaatatcgggatcgtccagcaggatgtctttctctttgccggcaccatctacgacaacatccgctacggccggcctgacgccaccgaggccgagatcgtggaggccgccaagcgggcggagatctacgacgacatcctggacatgcccgacggcttccagacccaggtgggcgagcggggcgccatgctctccggcggccagaagcagcgggtgtccattgcccgcattttcctgaaaaatccgcccgtccttattctggacgaggccacctccgccctggactcggtcaccgaggcccgcatccagtccgcctttgacgagctggcaaagggccgcaccaccctcatcatcgcccaccgcctgtccaccatccgctctgccagccgtattctcgtcattgacggcaacggcattcaggaggaggggacccatgaggagcttatggccaagggcggagaatacgcgcagttatatcttgcgcagaaatcggtatccgtatagcataacctccccaaaacgggacggccctggcgggctgtcccgttttttgtgctgccgtacataaatggggcttgcaaaaatcgaacaaatgttgtatactcaaatcgaacgaaagttctatttaacccattgggtctttttttcgacccagcccgtctatacagacagagcgcgggaccgggccggcccggtccggtctatgggacagagcatggagtaaaatcggtttgtcaactggaaaaccgatgcaggagggaacgacatggagaccatctattacagtctggatgccaaacgactcactgtctgcggagaagccgcgggccgcagggccagcggcgggcaggagacggtctgctatgcctttgtcccccggccccgccgcccggtgatgcctgcgggcgggaaggtggtggatttcaccgcctaccggcaggccgcccacccggaggagtatgccccgcgggaggaggtgcccggccggccccggccggtccggcggcggcgcacgctggcgctgaccgtggatctggcggccactggcgcggtggttgtgctgctggcggcggtggtgctgcgctttttcgcgggatagaaccgaaaaattgccccggtgcggctctgcgcaccggggcaattttgtgcagagggaaaaatatgcagaagactattgacaaattgagttagcgggtgtaaactcaatttgttctgggcggttagtaaacgctaaccgcctgataaaagataattggttagcaagagttaacctgtaagggagagaagccacgatgatgcctctgacgctggcaaagcagggcgagacggtgaccattcggaagattaccgggaaggatgagatccgccagcacctggccgagcttggatttgtggtggacggaacggttacggtggtcagcgagctgggcggcaacctgattgtgcaggtcaaggacagccgcattgctctggacaggactatggccaaccgggttatgatctgaggagaggagacagaacatgaagacactgcgggatgcaaaggtaggagacactgtcacggtggtcaagctccacggtgagggggcggtcaagcgccggatcatggacatggggatcaccaagggcgtggcgctgcacgtgcgcaaggtcgcccctctgggcgaccccatggagctgaacgtgcgcggctatgagctgagcgtgcgcaaggccgatgcggagatgatcgaaatcgcctagggggagcgcttccccggatacgtccgcgccgccaaaggcggcacagcggggcggtactgcatctgtgaattagttatatcaaactcgcggaaaaggaagggactgagaggttatggagctcaagatcgcgctggcggggaacccgaactgcggcaagacgacgctgtttaacgccctgaccggttcaaaccagtacgtgggcaactggcccggcgtaacagtggagaaaaaggaaggcaagctgaagggccacaaggaggtggtcattcaggacctgcccggcatctactcgctgtctccgtacacgctggaggaagtggtggcgcggagctacctggtgggtgagaagccggacgcaattctgaacatcgtggacggtacgaacatcgagcgcaacctgtacctgacgacgcagctcatcgagctggggattccggtggtggttgcggtcaacatgatcgacctggtgcggaagaacggggacaagatcgacctcggcaggctgggggaggccctggggtgcgaggtggtgagcatgagcgcgctgaagggcgagggcggcatggccgcggcggagaaggccgtggcgctggccaagtcccaccgggcgggtgagctgccccacgtgttcacgggcagcgtggagcacgccatcgcccacatcgaggagtccattgcggggctggtggacgaccgttacctgcggtggtacgccatcaaggtgtttgagcgggacgacaaggtgatggcccagttgaatctgacgggtgagctgaaggctcacctggaggcccacatcgccgactgcgagaaggagctggacgacgacgcggagagcatcatcaccaaccagcggtacgcgtacatcaacggggttgtgaacaaggccgtgaagaagaaggcggcggcccacagcctgaccacctctgacaagattgaccggattgtgaccaaccggattctggccctgccgattttcgcggtggtcatgtttgcggtgtactatgtggccatcggcacggtgggcgactgggtgaccggttggaccaacgacgtgctgttcggcgagattgtgccgccggcggtgagcggctggctggagggcatcggcaccgccccctggctgcaggggctgattgtggacggcatcattgccggcgtgggcgcggtgctgggcttcgtgccccagatgctggtgctgttcctgatgctgtccatcctggaggatgtgggctacatggcccgcgtggcgttcatcatggaccgtatcttccgcaagttcggcctgagcggcaagagctttatccccatgctcatcggctccggctgcggcgtgcccggcgtcatggcctcccgtaccattgagaacgagcgcgaccgccggatgacggtcatgaccacctgcttcgtgccctgcggggccaagatgcccatcatcggcctgttcgccggcgccctgttcggcggcagcggcctggtggcggtgtccgcctacttcatcggcgtggcggccatcatcttttccggcatcatcctgaaaaagaccaaggcgtttgcaggcgaccccgcccccttcgttatggagctgcccgcctaccacgtgccctctgtgggcaacgtcctgcgggccacttgggagcgcggctggtccttcatcaagcgggccggcaccatcatcctggcctcctccatcatcctctggttcctccagggcttcggctttaccgaggcgggcttcggcatggtggaggacaacaacacctccctgctggcggccatcggcggcgcggtgtgcttcattttccggcccctgggcttcggcacctggcaggccaccgtggccaccgttaccggcctcatcgccaaggagaacgtggtgtccaccttcggcgtgctcttcggtctgggcgccgatctgacggaggaggaccccggcctgctggccgccgtgggcacccacttcaccgccctgagcgcttacagctttatgatcttcaacctgctgtgcgccccctgctttgcggctatgggcgccatcaagcgggaaatgaacaacgccaggtggaccctgggcgccatcggctatatgtgcggctttgcctatgtggtctccctcatcgtctaccagctcggcgggcttatcaccggcgaggtctccttcggcatcggcaccatcgccgccgccgccgccctcgttggcttggtctacctccttgtccgcagaaacaagtacgacgagaacaccctttccatttccgccgtcgccgccgcggccaagtaaggagcgcctatgaatgcaccaacaattatcattggcctgatcattttggccgtgtttgtggccattgtgggaaagggcatttacaaccgccgccatggcaagagctcctgctcctgcgggggctcctgcggcggagggtgcggccactgcgcctcgtccgggctgtgccaccctgagaagcaaccgccgacacgccggggcgcggctggcgccccttagttaaggagtcatacatggagctgaccaataccaacgtacgctatcttttgaccatctaccacctctcgcaggcccggctggaggtgtcctccaaggatatcgcccagaccctggacgtgtcccgcgcctccgtcaccagcatgatgtccattctgacagacaagcgcctggtgaccaaggagcggtacggcaaggtacacctgaccgacgacggctgccggtgggcccgggtgctggccagccagacggacaaactggccgagacgctgcaaaaccggatggagctgtcctatgaggaggcgtggaaggccgcctgcgcggcagtctccgagctgccccgccactgttttgagcccatccatgttccagacagacagagaaaggaagttttccaatcatgaagtggtatcagaatccgaaggtcctctgctttgccggcggcgtggccgccgccctggtgggagccaaggttgccaagtcccccaagacccgtgagctctgcgtggccggcatggccaagggcatgaagctccagcaggacgccagggtgaccctccagaacatgaaggaggacgctcaggatctgtgtgcggaggccaagcagaaggcggcccaggagaccgccgaagaggcgtaacgcagccatgagatatcgcatcgcatacgaccagcccggccgccttcgggtgcgcttcggcccggatgcgtttacccaggagcagggctacggcattgccgccctgctcctgggccgtccgggcgtgcgggaggccgtcacctgtgcgctcaatggcagcgtgctggtgtgctacgagggggagggccgggcggaggccctggccgtactccgggggctccggcgggacgccctgccggtggggaccgccgccgacgatgaccagctccgccaggtggacagccagtttctgggccggctcctttccatggccgcccgccatttcctgaaaaagtggtttcttcccttccctgtccgctgcgccgtgactctgtggaacgcggcgggctactggcgggagggcctgagaagcctgggcggggggcggctggacgtggccgtgctggatgcggcctccatcgccggagccatcgcccggcgggagtggtccaccgccggctcggtcatgttcctgctgggcctgtccgccctgctggaggactacacccgcaagcgcacccagaccaccctgacccagagcttggccatccacgtggacaccgtgtggcgggtggcggaggacggctccgaggaatccatccccatgggccgcctggctctgggggagcgtatccgggtgcgctccggcgccctgatcccggtggacggcactgtcacagacggcgacgccatggtgaatgaggcgtccatgaccggcgagcccctccccgtccacaagcgccagggctccaccgtctacgccggcaccgtgctggaggagggcagtctggtcatccaggccgcggccctggccggcgagagccggattcagcagatcgtgggcctcattgagaattccgaggcgctgaaggccggagcccagagccaggccgagcggctggccgacgccatcgtgcccttcagctttgccggggccctggcggtgggcctgctgacccggaatgtgacccgggctctgtccgtactgatggtggactactcctgcgccatcaagctgtccacccccatctccatcatctccgccatgcgggaggcctccgcccgccgtattatggtcaagggcggcaaatacctggaggcctttgccgaggcggataccatcgtattcgacaaaaccggcaccctcaccgccgcctgcccccgggtggaggaggttctggacttcaccggccggggggaggacgagctgctgcggtgcgcggcctgcatcgaggagcacttcccccacagcatggcccgggccgtcacccgcgccgccgaggagcggggcctcaaccacgaggagcgccacgccgaggtggagtatgtggtggcccacggcgtggccaccaccctggagggggagcgggccctcatcggcagccgccacttcatcttcgaggacgagggcgttgcctgtaccgacgaacaggccgggcggatcgccgcggccgcccgcggccgttcggtgctctatctggccatcggcggcaggctggccggcgtgctgttgatcagcgatccgccccgccccgaggccgctgaggccatcgccgccctgcgggcgctgggggtgcgccgggtgatcatgctcaccggcgaccaggagaccgccgcccgggcggtgtgtgagcggctgggcatcgacacgttccgcgcccaggtgctcccagccgacaaggcctccctgatcgagggctacaaggagggcggcagcaggctcatcatggtgggcgacggggtcaacgactcccccgccctggccgccgcggatgtatccgtggccatgagggatgcctccgacctggcccgggaggtggcggatattaccctcctctcctccgatctgcgggagctggccgccctgcgccgcctctcccagcggatgctggagcgcattaaccgcaactacaggtcgattttgaccatcaacaccagcctgctggcgctggggattttcggcatactgccgccgaccaccacggccctgctgcacaatgcctctaccatggccatcagcgccgccagcatgcggccctatctgcccgcgcccggcgggcgcggggcccagggaaaggagcctggcaatgaaacagcatagattctgggcttggggcgccgtgttctgtatgctcatgtgcatctacaccggcaagcgccgcaagtaaagcaaggcagagaaggcccctccccgccgtccggcggagaggggcctttgccgccgccgtgacaggagagcgcgggcatgcagtcaccacgccggacggcgggactgtccggcagtgagctggcggagggattgggcgcacagcgcgccgtagaacttcagatacttcttttttgcctggcgctggaggcgctggcgctcctgaaaggccttccagcaggcgcagctcttgtggcagccgctgtggtaggagggacattggctctgacagggaagcatgggggttctcctttctgcgggggcgggaggtacggttcccgtccattgtaggccggatcagagcccaactgccaccatggtgctgtaaaagggaggtaaataattggagtttaccgcatttgtagagcatgctcactaaaaataatgacaaataaaaggataaatatatacaatctaaacaaaatagagtggctgaaatcgggcaaaaggcagaataatgtgagcatggttgcaattggaagatgctcatggtatcatgcaaaacaccttgcggggtcggggctctgaccactggagactccgcgccggaggactcctggtcgcaaggaaagaaaaagaggaggaaacatgaaatgaaatcccataagccatccaaactgatcgctctggggctcgccctcaccatgggcctgagcattcctgcggcgctggcagccagttctctggtgcccgcctccaccaaggtcacggtggacggtaaggcggccgctgtcgagggatacaatattgacaacggcaacaactattacaagctgcgcgatttcgccagcgcgctggacgtgggcctgacctgggataaggctaccgacactgcggccatcgacaccggctcccactacaagcccgacgccacccagctcatcaccggcaactgggcccccgctacccgcgcccgcatccaggccgtgattgacgagaacgccaaccagggcaagtacgtggtctttgactttgacaacacctccgtcatcttcgacattcaggaggccctgcttatctaccagattgagaacctgcaattcaagatcgaccccgccgacatggaggccgttctggagaccggcattcccgacctgaacaagtccatgggcaccagcctggacggcaagaacatcacccccgccaccctggtggccgacatcaccagcgattacgagtggatctatgccaactacgagggctttgagggggacaaggacctcaactacatccacgcgtccaaccagtaccaggacttcgccgccaagctgcgcttcatgtacggcaacctgggcgactactttgatcacgccgtctcttacccctgggttggctatctgttcaccggcatgacccccgacgaggtgcagaagctggctgccgcctcccaccagtattgggcagactacggccgctatgccgaggaaacctggacctctcccgtggagctgcccggcaagaccggcattgtctcgattgactttatcaccggcctgaccttcaccgacgagctgaaggacctgtatgccaccctccagaccaacggcatcgacgtgtatatcgtttccgcctcccccatcgacaccgtgctggccgccaatgagaccatgggctacaacctgcccgaggaccacgtctacgccatgcgcaacaagctgggcgaggacggccgctacatcaacgagtataactacgactggggcggcgagggcaagtacgcccagacccagggtgagggcaagagcaccattatcaccaacttcatcgcgcctcagtatgacaacgccggccccctgatggtcttcggcgacagctccggcgactggaacatgatgaccgactggatggagagcggcgacaccgagctgggcgtcatcttcaaccgttaccgcaagcccggcagcgaccccatctggcagggctccaacgaggccgcccagtccatcggcgatcctgacgcccgctttgtcctccagggccgcgacgagaacaccggcgaactgcgccccagcgagaggtccatcctgctgggtgagaccgacgaggtgctggtccgccccgccgagtaaggcagacataagcgcaatttcatatacggcggcagccgggagtggagcctgcgggctccctcccggctgttctgatcaaactttaagatttttttgatgaaaaccgggaaccttgctctggacatttcgtctataatgttggataatggaatatataaccaagaaaaaacctgcattggaaggagagaatgaacatgaagcgaacccatagagggcttgcccggctgctgtccgcgggtatgagtctggcccttttgacgagcctggtacccggggccacggcggcgagccgaaatgtagaatacgaggtggatgcggatgaggtcctctacttggaaaaggaggacttcgataaatttgtgtatgacgaaacgtcacagggtaccgaggtggatgagctctggtttacaaacttaccctcgtccagtaagggtgtgctatattttgactatgacggccgagacgaatatgaggtcgaaaagcgagagagctttacccgcagagacctagatgatctcgcctttgtgccagatgaggactacgatggttccgtaacgatcggttttagcggtgagtccgaccagggtgagaatttttctggtacactttatattgaggtcaatggcacagggcgttcatcctctgacggcgaagtgacctatgaggtggatgtcaacgacgccgtggatctggacgtggacgattttgacgactatgcctacgacgagtcggacggcaccgaggtcgattacatcttcttcaccgacctgccctcctccagcaagggcaccctctactacgactatggctactccagtgaacgcgaagtagagaaggacgaggagttcgaccgggacgagatcgacgacctgacctttgtgcccaagcggaattatgaggggacggttaccctgtccttcgagggccgatcggacgcccaggataagttctacggcgacctggtcatcgaggtgggcggcggccggagcagcagcgccgccaggggcgacgtgacgtacgatgtggacgtcaacgacacggtggacttcgactatgacgacttcgacgagttcgtctacgacgagaccagcggtaccgaggtgggacgggtctggttcaccgagctgccctcctcccgggagggcaccctctaccgggactatgacaagcgggatcaggaggagattgacgaggacgaggaaatccgccacgacgagatcgacgacctgaccttcgtacccaagcgcaattttgaaggggcggtcaccatcccctttgagggcagggcggacgacggcgacaagttcgccggcgagctggtcattcgggtgggcgatgccggcggcgccgacattaccgtggagctccaggccggcaacggttccaccgtcaacttccagacggacgcgttcaacgaggcctgcgtgaaggagaccggcgccaatctgaactatgtgatctttgattacgactccggccgcggcggctatctgtactaccagcacggcgagtccggcgagtctgaggtgggctccggccgttattaccgcgcctcctctccccggctggaccaggtttcctttgtccccggcagcggcaccggcagctccgtgcgcatcccctttgagggggaggccaccaacggcaagtccttctacggcgaggtcaagctgacctatgtgacgctgagtgagcccactatcatcacctacacctccaccggcctggccgtggacttcaacgccgccgactttaccgccgcctgcgcggcccggggcggcaaggccctgacctccgtccggttccctgcccccgacaccaccggcgggcagctctactacaacttccacactcccacccagtaccgcggcgaggtggtttccaccgtggactactccgtgggcggcgtctacctgctgggcgaggtcaccttcctgcccaaggcgggttacagcggcgttgtaaccatcccctatgtgggtaccgatgccgacggcatcgagtataccggcaccgttcaggtgatggtcacgccctccgcctcctcccgcttcagcgacatgggcagctataacagttgggcgggagcctccgtggaattcctggccgcctacggcattaccaccggtacgggcgacggcgccaccttcagccccgcctccaccctcacccgcggcgactatatcctgatgctctaccgcacctttggcttcagcagtaccgccgccgcaggcaactttgctgacgtggacgccggcagctactacgccgaggccctggcccatgccaaggctctgggcatcgccaccgccgaggcggacgggagcttccgccccaacgaccccgtcacccgccaggacgccatggtgttcctcctgcgggccatgcaggccgtcaaccggtctgtgcccaacgcctatgacagctacctgagccgcttcccggatggcgcctccgtggcggactacgcccgcacggccatggccgccatggcccaggccggcgtgatccagggcaacgagcagggcaagctcaaccccaccggaaccctgaaccgggccgagatggccgtcattctccaccgcgccctcaccctgtaacccagctcccaagccggggccgcccagcggccccggctttttgtgcaaaatatgggacagggaggcttgaaaagggcggcttgggtatgatatagtatcaaggtattggtatcggctgcatcccttcggatgtggtcgtttttgtgagacggaaccgggggtatggacgtgtttgacggacttctgtttgatctggacgggaccctgtgggattcggtggatgccatctgcatctcctggaaccgggccctggagcggcttgcgccggagtatgccggcaccgtgacccgggcgcggctgctgccgtgtatggggatgctgctgcccgatatcctccaccgcctggtgccggagctggaccaggagcggatgaagcccattctggaggaggtgctgtcggaggaaaacgcctatgtggccgcccacgggggcgtcctctaccccggggtggagcagaccctggcggcgctctccgcccgctgtcccctctttctcgtcagcaactgccaggacgggtatattgaggcctttttccaggcccatggactggggcgctattttacggactacgaaaaccccggccgcacggggctgcccaaggcggacaacatcgccctggtggcggagcggaacggcctgaggcggcccctctacatcggggacacccagggggactatgacgccgcctccaaggcgggggttcccttcctccatgccgcctacggcttcgggcgcattgaccgccctgtgccctcggtggccgcctttgaggcgatcccggacgccatccgccgcctcactccgccgtaaggcggggcgatgtaggcatcgccccctacaacgtccaaatgcgggcttgttcccgccgtaggggcggatgcccacatccgcccggcacccatgcaccaactctatcaaggaggacattaccttgtcacaatacgagaaagaaatcaatcgccggcgtacctttgccatcatcagccacccggacgccggcaagaccaccctgaccgagaaattcctgctctacggcggggccattgcccaggccgggcaggtcaagggcaaaaagaacacccgggccgccacctccgactggatggagattgagaagcagcgcggcatctcggtcacctcctccgtcatgcagttccagtacgagggctactgcatcaacatcctggacacccccggccaccaggacttctcggaggacacctaccgcaccctcatggccgccgacagcgcggtgatggtcattgacgcggccaagggcgtggaggcccagacccgcaagctgttcaaggtgtgcgccatgcgggacatccccatctttaccttcatcaacaagatggaccgggaggcccgggactccttcgagctgctggaggagctggagaaggagctgggcatcgagacctacccggtgaactggcccatcggctgcggcaaggacttccagggcgtatatgaccggggcagccgcaagattatccacttcacctccaacggcggggccaaggcggccaccgccaccgaggtggagctgggtgaccccaacctggacggcctgatcagcgagcggctccaccggcagctcaccgacgagatcgagctgctggatggcgcggccgccgagtttgatctggaccgggtgcgccacggcaagctctccccggtgttcttcggttccgccctcaccaacttcggcgtggagcccttcctggagcacttcctccagatgaccaccgcccccctgccccggcgggcgggcgagctggtggtggactccctggacgacgacttctccgcgtttgtgttcaagatccaggccaacatgaacaaggcccaccgggaccgcatcgcctttatgcgcatcgtctccggccgctttgacgcggataaggaggtgtaccatgtccagggcggcaagaagctccgcctgtcccggccccagcagctcatggcggccgagcgggagatcatcgaggaggcctacgccggcgacatcatcggcgtgtttgacccgggcatcttctccatcggcgacaccctgtgcgccccgggcaaaaagttccgcttcgaccccatccccaccttcgcccccgagcacttcaagcgggtgcgctccctggacaccatgaagcgcaagcagtttttgaagggtatggagcagatcgcccaggagggcgccatccagatcttcaagaccccctacaccggcatggaggaggttatcgtgggcgtggtgggcaccctccagttcgacgtgctggagtaccgcctcaagaacgagtacaacgtggagctctatatggagggcctgccctacgaatacctgcggtggatcgagaccgacgacggcgagccggtcaaggaggaggatctcatcctgggcaccgacgtgaagctggtggaggactacaagggcaaccagctcctgctgttcggttcccagtgggccatcggctggaccgaggagcggaacaagaacctcaccttccacgagttcgggggtaccaagttctgataaaatcaaaaaccgcccgccggcctgcgccggggggcggtttttgatgcgccggttaccgcacgggggtgtagctggggacggcctcctcgtccgtggcctccagcttaaagataacgggccgcaggccgtcgttgcagctacaaatggccacgccgggcttgcgaatccagtctccgtagtagaacagcccctcccccgcgccgtgggccagggcgaaggcgtactggtagaccgccttccacgcctcgtcacagaagccctccggcttggcgtagtcggcgtaaaagacctgcccttcccgcagcatgggacaggccgtcagcccctcggcgccgtattcctccgccagatcccggtccagggtggttttcagaacggtaattttcacgcgcttcataacaatccctcctcgtgtgagaataggatagcaccgctcaagggcattgggcaaggggaagttttccacaagggggaccaaacgggtggaaaagtcagccctggctatggggagcgagcctggctttaccgcctgcccggtccagggccagcgccaagacggcaaagaccgccccgctgcccaccgcctgtaccagcgtgcccaggaactggggccagaaggcgttgacgccgcccagcagcaggcaggcggccaggccgtacgccgccggggagagcaggcaggccagcagaagggccgccccgttccgggggcagaggagccgcggggcccggctggtaaacaggagggccaccagggccttgatgagcagcgtggggaccacccacagaggggcggtgagcagatccgccagcccggcccccaccatggcggcacccacggcgtagggggcgggcagcagacaggccgccaggtagatcagcgcgtctcccaggtggatgtagccgccggtggggatggggatatggagcagataggcggtggtgaccgcaatggctccggcgaacagggcggccaggcagagcagccggagttttttcgattcgcgcacaggggctccctcctttttttgtctgtccccattgtacgctccgtctgaccttgttaaaagtatcagaataaatctattttaaaaggtcagacaaggcggaggaaacacacaaaacctgccccatccccataaaatagggcagggaggtggaaaaatggaagagacagtcctgcgggagcagctcaggacggtggatgaatccctgctgtttctgctgttgatcgtactgtcggtgctgctctcctactggggggtgcgcatacagcgggaggggctgtgcagaaccctccagggggatgccgagggggcggccgccctgccccgggtgtttcccatccgcctgagcgcctcggccctggtggtgggagcgctgggctttttcctctgtctggccctcaagacggagcgggagaccgcccggggcgggacgccggcggcccggcggtcggcgtgcaccaacctgtgggcctccctgtttgtctttctcgccgccctgctgcggctggacgacctgctgggcacccgggatgcctcgggggaggtcatctgaaataaagcaggcgcgccctgcggcgcgcctgttgaggatgcgggtcagtttgccggccccttggcaaaaaaggtataaaccccggtggccaccgtccggcccgtgtcgtcggtgagcacggcctcgtacaccaggacggttttgcccagcttcctgggcgtggccgtgcaggtgatgcgcgctccggacgccggggccagatactgcatggagcagtccagggtgacgcacatgtgcccggtggtgaaggccgccgtgccgcacacggtgtccgccagggtgaccagcgccccgccgtggacgatgcccatggggttgaggctggagggctgcacctccagcacgcccacggcgctgtgatccggccgcagctcggtgacgtacatgtggttggcgggggcaaagcagccgctggtattcaccagctccagaagcttactgtaggaatccatcgagaatcttctcctccgcctcctgctcggtgaggcccagggtcatgagcttgagaatctggtcgcccgcgatgcgtccgatggccgcctcgtgaatgagctgggcgtccacatggttggccacgatggcggggatggaggaaattctggcgtcgcccatgatgatggagtcgcactgcacatggccgaagcacctggcgttgcccgtcaccttggggtagaacacctgctgggactggtcctgggccaccgagcgggacaccacccggccgttggccccctcgccgtccagaatgatctccatatcgctctcggcggtctgctccccgtgggtgagcagcttctcggtgatgatggcctcggcgtccttccccaccacgattttcgtctcccgcttggtggagtccacgccgcggatctgggtgctctccagattgatggtggccccctcctccagatacacgacggtctgggggttcatgatgcgcttgccggtgccggggccctcgccgtagtggcgctccacatagcggaccttggagtttttgcccacgtagaaggtgtgcacgccgtcgtgctggctggtctcgcagccggtgttgtggatgccacagccggccacgatgtccacatcgcagtcctcgccgatgaagaagtcgttgtataccatctcgctcagcccggtctggctgatgatgaccgggatgtggaccgactcgtgcctggtgcccggcttgatgcggatgtcgatgcccgacttgcccggctcggtcttggtggtgatctcaatgttggcggtgctgttccgggagtccagcgcgccgttgcggcggatgttgtaggccccctggggggtcttctccagctccgcgatctctttcagcagtttccactcagcctgatccatgcttacctcgccccctccgacatatagctgcacccggccgaggtgttggccaggatctgggggaaaatctcgtccttgggcccgtgcttggcgattttcccgtcgcggatcatcacaatctcgtcggccaggtcgatgatgcgctcctggtgggagatgacgatcagcgtggcctcccgcttctggtggatggccttgaaggtctcggtcagcttggcgaaggaccacaggtcgatgcccgcctccggctcatcaaagatcatcagccccgacttgcgggccagaatcgtggcgatctcaatgcgcttgacctcgccgccggacagggaggcgtccacctcccggtcgatatagtcggcggcgcacaggcccacccgggtcagatactggcatccctcctcccgggtcagcttctcgctgcccgcggccagggccagcagatcccgcacccgcaggcccttgaagcggggcggctgctgaaagccgtagctcacccccaggcgggcccgctgggtgatgtccaggccggtgatgtcggtgccattccaggcgatggtgcccccggtgggccgcaccaggcccatgatggccttcgccagggtggtcttgccgcccccgttggggccggtgatgaccacaaactgatggtcagctacggtgagggagacgtcgttgaggatacccagctcctcgccggactccccctccacctggtagctgagatgctttatctccagcatacgcggtctctcctttgtactatgcttcttctcatgagatgttattttatcacggcgggggggaaaatacaaccctgccgggcgcaaaaaccacactattcgcataggataaggtgaatccaaatcatcaggaggctttgtctatggaacaagatcatttgccctgctcctgcgaccaggaggtctttgagcgggtgtggcggcgggtgatgcccgaggaccggcccgactgcccctttaccctgggcgaggacgccgccgcccctccggccgtccagccccccgcggcggctctgcctgccgtggtacatactgctccagccggcgaacaggcgccctcccggcccgtggtgggagaagagcacgacgtgccctgcctgggggcgtcctcggcggtgtacggcgcccagctccagcggctcattgaccgggaactggcggattggagggcctatcaggccctatcccgccgggcccagggaaacagcgggcgggtgctggccaccatcgccgccgacgagcgccgccacgccaagcggctttccaccgcctattttctcatctccggggtgcggtactggccggtagaccgggtacccaatccatcccccgcccccttctccgccgccctgcgggagcacttcatggaggagcagcggggggcggccgcctaccagaccgcggcggcggagactgccgatccctgcctccacgagctctttctggagctggcgggggaggaggactcccacgcctggctcctgcgcagcgtactggagcagctataagaacacccccggcgcacggctttgacgtgcgccgggggcctgcttttagtatccgttgaccacagcgtccagcaccctggccgccacggagcccgccgcgtccgcaccggagccgccgttctccaccagcaccacaaaggcgtagggggcgtcggggttgcggaggaagccggcgaaccaggcgtggggggccttgccgccccccacctcggcggtgccgctcttggcgcacacgtccatgttggggaagcgggaggcgccgtactgggccgtgacattgtgggccatcagctctgccagggcggcggcggtgtccccctccaccagcttttgggtgtgccggggcagggcgggcagggacggcaggcccagggcgttctccgtcttgagcaccagccggggcacggccgccgttccgccgtttgcgatggcccccatatagaccatgagggcgcaggggttggccaggtcgttgtactgccccacgccggcccagcccagctcgttggccgtgaggccgtcaaaatcgaaggagccggcggcggtgttcaggccgctgacccggtaggaggaggtgagccccgcccggacggtgtactcctccagcacgtcctcccccagctcgccggccagcagggcgaacaccccgttgcacgagttggccagggcggaggagatgtcctgctccccgtgggcgtgggggcaggtgatggccccgtcccccacctgggtggagccggtgcaggtccaggtgcggtcaaagaggtcgggcatgcgctcaatggcggcggtgagcaccacggtcttgtataccgagcccggcgggaaggtgccggagagaaagcggttgaggtacaccccgtcgtaggcgtcgttcccctccatctcctctgacgaggggggatacagggggtcaaaggcgggggtggacaccatgcacagcacctcccccgtctcgtagttgtacacgcccaccgcccccttgcggccggccagggcctcataggcgatgtagttgtaccgggcgtccagggtgaggtagaggtcgttgcccgcccccaggggggagtaggccccggtgagcaggttgtagccggagagctggtcggcaaaggccaccagcgccccggtgccgatgttgccctgggcgtcccccacggcgtggagggtggccttgcgcacggtggcgttgtcgtaccagcgccgggtgccgtcctcctccgtccaggagagcacgtccccgtcccggtccagcacccggcccaccgagagctgtccctggcggttgtagaggtggcggttggcggcaaaggagacccagcggccgccatttttcacgaagcggaacacaaacaggccggagcccagcagcagggcggcggccagcaggaggcagagcagggcccgcttttcaatcttcttcatcgtccgcctcccattcgtcggtggatttgggggccagcgccgccccccggcggtcctcccgccgggagggcaggcggatggcaaagctggcgttctgacgggtgtcggtggccttgaggaaggccagcagcccccaggaggcgatcatggccgtgccgccgttggacacgaagggaaaggtgacgccggtgagggggagaatgtccaccgcgccgaacacgttgaggcaggtctgaaacaccatcatggaggtggcggcgcaggcggcgatgacgtaaaaggagctccgcccggcccggcaggcccggacggcgaacaccgccagagtgagaatggacagcaccgccagcagggcgatgatcagcccccactcctcgcacagcatgccgaataccaggtcggtgtcccccgcgcccacggtgtggagccagccctcgccggggcccacccccaccaggccgccggaggcggcggccgacatggtgcgggtctgctggtagccgctgcctaccgaggcgttctgccacgcgtggccccaggtggcgaagcgctgaaggatgtagggcttgagggagagcatggtgagcaccgcaaacaccccgccgccgcagatgagggccagggtggcccagtcgccggagcggaggtaggcgataaccaggaaggtgacaaagaagatggcggcggtgccgaagtcgctcatataggccagacaggccaggcacacgccggtgagcaggatgaacaggcccaggttccgcttgcggaagagccggtccagggtggccgccccggcaaagatgtagcagattttggccagctcggagggctgtaccgagatgccggcaatggtcagccagttggccgctccatatttggtgccggtgaggcccagcaggtagagcaccacggtgaggctcagcaggccgatggccccggcggccatgagccagcggattttcttggcccggtccaggttgcgcaggaagacccccagcaccaggaacagggccagtcccagcaccacgcagaggaactgcttgaacagggcgggggtattggaggaggaggtcaccgccagggagagggtggacaggaagaaggcgatggtctccatctcaaagcctacccggcgcagggcgcggagggtgaggaagtacagccacatcacccccgtcagcagcaggaaggtgagcgggatcatcaccgtggcgttctccccctcgctgatggtgagctggagtgcggtgagggcctggaacacggtgaggagcaccagccccagccagggggacacgggccgcatggcccgccgccgctggcggcgctgggccttttcctccggggagagggggagcagcacggtctccaccccgccgatgcccaccacgtcgccgtactggacgggggcggagccctccaccggcctgccgtttaccgtcacgccaccctttgagcccaggtcgtaggccgtccaggtgtcgtccgcctggcgaatcagggcggcgtgctgccgggagaccacaggatagttgaggattacgtcggagttgccgccccggccgagaatgttctcccagtgggtcagcggctcctgagccccgttgggcagggtcaggtaggcccacacctccggcagacagggcacggtgagcagggagcggatcgtccgtatgagaatcagcagggccagcaccgggaacaaaaagcgcaccgccgtggtgaaccaagcccagacctggggattggcggccatccagtccagcaacgcctccatccgcccacctccttttcgttggaatatacagcagtatagcacaaatggggccgataaaaaagcggaaggccgtccgccttccgcattcttcaagaattctttacaatttgccctctccggcggtataatgggctcaccaatgagagaggatgtgagcccgtgtctacgattatcgacgccaagggcaagccctgccccaccccggtcatcctggccaagcaggccatggccgccggggaacattccttcaccgtgctggtggacaacaccacggcggtggaaaacctcaagcgcctggcgggcaaccaggggttcggggccgccgtcacccagggggagggggtgttttccgtggccttcacccgtaccggctgcgccgcctgtgaggaggcggtgagcgctcccctgcccgcccccggcggagactgggctgtgtttgtgggccgggatatcattggggacggcgaccgggagctgggcgccaacctgatgcgcatgttcttctacactctggcccagggggaggacaagcctggcgcggtgctcttcatgaacgccggcgtgcgcctgcccaccctggacgagcagattcccgcccacctgaagtccctggccgatgcgggcgtcgagatcctggtgtgcggcacctgcctcagcttctacggcctcaccgaccagctccaggtgggcacggtgagcaacatgtacgacatcgtcacccgcatgcagcgggcggccaaggtggtctccctgtaatggactacggcgtgatcaccttcacctccacctacggggccatctacgcccagaaggtgctgcggccggtggcggatgtgctcaccatgccggtgctgcgggagatctccctgggctgcggcatcgccgtgcgcttccggccggaggacggggcggcggtgcgcgccgccctggccgcctccaccctgcggccggacgagtacgccttttacggtgttaccggctccggggcggccctgcgggccgagccgctggacgggtaggggccgcccggcgctcagaagatccagccgatgagcagggacagggcaaaggccacgacggcgggcatgaagttttcccagcgggtgggcttgtcgagcagggccttgatgagcagcaccacgcccgcgatgcgcagcagccagggcagcaggcccatgagcagcaggaagggcaggcccaccagaaacaggatgacgggaatgagaatcacagcggccagacagatgatgcccagtgtgaacagcgtaaccatggaatcagtcctccttttgatggtaccagcttatcacacccagataaaagcgtcctaaaggcattcttaaaatcagataaaaaatccccggcgtcagggggcggggctgtgccatccgcccctgacgccggggcctttttctgcgttccggttcggccaaacggttttcataaaagtctcgcttcgaggctgctttcccggcagaacgtaatggatatcagatggatgcatagaataaatgccttggggcacgaagaaatgggcaggactgtcatgtgaaaaggataatagtccttttcttgtatgcaatttggtagataatatgatagtatgtgtgctgtggcagcattcgattaccgtgatatgctctgtggcatggaacactcctgttatactgctcctgtcggtacagcatttcttgctgccattccgtttggttttggaatgattagcggtttcatcacagactcagagcaagggagggcttgcgaatggcagatacagattacatctttcacatcagcccgtatgataccgaaaagcttttgccgcaagtgagcagggcgctcgaaaaaaggacggaaatggtttcgcgggaacgatttcccgggctatggaagcataccgaccgattccgctctatggcgcgggggcggaaaaggagcaggctacgcacaaggggaatgagtgcgttatgtctggcggccggcatttttctggctgttcccggtctgatggagccgcgagagctgttcgtgccgctgcttgtcggcgcggctgccatgggtgcgggtatcattggcctgtggcagagccgcgcgcgcaagaagaatccgtttgatagagcggcaaagatattgttggagggcaaagacaagagttccgcggagcaagccgcttcggtgtccttctcagaggaggggatgaccgttccggcgggcggcggcaaggcggaatttgtgccatatcgagagtttgaatgcgccgtcgaaacggcggatagttttcttttcgtctttggcggccgtgtcctgctgttgcagaaaatggacttaaaagcggaatgtaccggcgatttttgcagtctgatctcggaaaaagtgaaaccgtatcactcgattgcgtaaaagggcggcggcagggaaagcccatgaggctgccgtcagagcggaaaaacgcgcccgcctcattcaaaatgaggtaggcgcgttttcatgcgcagcgcgcttgacaccgcgccggggatttttgcatcaacggaagtaggccgcgccgctctcgaagaggggctggtgcttgtcgccggggatgttgacgcctacataggggccccggcgctccgagtggcccatcttgccgaacacccggccgtcgggggagaagatgccctcgatggcctccagggagccgttggggttggcgtcgatgtccatggaggccgcgccggaggcgtccacgtactgggtggcgatctggccgttggcgatcagccgctccagctccgcctggggggctgtgaagcggccctcgccgtgggagatggggatggcgtggaggtcgcccacatgggactggagcatccagggggactggacagaggccacccgggtggtgacgtaccggctctggtggcggccgatggtgttgaaggtcagggtggggcagccctcgtccatggcccggatctcgccgtagggcaccaggcccagcttgatgagggcctggaagccgttacagatgcccagcatcaggccgtcccggcgcttgagcaggtcgtgaaccgcgtcggtgagccggccgttgcgcaggaaggagcagatgaacttggccgagccgtcgggctcgtcgccgccggagaagccgccgggcaggaacaggatctgggccgcgcggatggccttttccagggccagggccgactcctccagggcggaggcggtcaggttgcgcaccaccacgatctccggctccagccccgcccgcaggcaggcccgggcggagtcgtactcgcagttggtgccggggaacacggggatggccaccctgggccgggcggttttggacttgcacaccgccggggagcgcttgtcccaggagagggtgcgcgccggggcggactcccccgcccgggtggggtacacgtcctccagcaccccctcgttgagggcgagcagctcgtcaatgggggcggagtcgccgccgatggtgatcaccggctcggcggtggtggtgcccagcctgatcgccagggggaagtcgagctcctcggtcagctccgccacaatggagcggggccagggagtgtaccagttcgtgtccacatcggaacccatggcaaagccgatcttgttgccgaaggacatgttcatgaccgcctcggcaaagccgtgctccaccgcccacgcggacttcactttcccggccttgtgcagttcacggagcttgtcccaggccgccagagggtgctcggccagagcgtcgcctacgaacaggtacaccgggtgccccgcctccttgaactcgggggagagcacctcacccgcctggatgggcgcgatggcgaaggagatcagcgtggggggcacgtccagatcgtggaaggtgcccgacatggagtccttgccgccgatggcggcgcagcccagctccaactgggcgtccagggcccccagcagggcggcgaagggcttgccccagcgggcgggctcgtcccgcagcttctcaaagaactcctggagggtcagataggccttccggtagtccgcgccggcggccaccagcttggctacggaggcgtagaccgcgtcctttgccccctggtaggggtcggcggacagggcctcggggtcgcagccccaggccatgacgctggcctggccggtctcctgctccggctccacggggaagagggcggccatgacctgggccggggtgcgctgggtcctgccgccgaagggcatgagcacgctgcccgcgccgatggagccgtcaaaccgctcggtgaggccgcggcgggaggcgcacttcaggctggcggccatctcccgcagggtggagaaggtcgccctctccggggcggcgtccgcctggggcacggacacccgggcgtgcttggccgcgccgttggtgttgaggaaggcccgggacaggctggccacggtctggccccgccaggtcatgaccatgcggggctccgccgtgaccgaggccaccgggtaggcctccaggttctccctggcggcggcggccagcagggcgtccacgtccgccggggccaccaccacggccatgcgctcctgggactcggagatggccagctcggtgccgtccaggccgtcgtacttcttgcgcaccgcgtccaggtcgatggacaggccgtcagccagctcgccgatagccacgctcacgccgccggcgccgaagtcgttgcaccgcttgatgaggcgggtgacggcggggtcgcggaagagacgctggagcttgcgctcctccggggcgttgcccttctgcacctcgctggccatggtgtccaggctggccttgttgtggctcttggaggagccggtggcgccgccgatgccgtcccggccggtgcggccgcccaggaggatcaccacgtcgccgggggcgggccgctcccggcggacgttggacgccggggccgcgcccaccaccgcgccgcactccaggtgcttagccacatagccctcgtggtagagctccgccacgtggccggtggccaggccgatctggttgccgtaggaggagtagcccgccgcggcggtctgggcgatcttccgctggggcagcttgccctccagggtctgctccaccggggtgcgggggtcgccgcagccagtgaggcgcatggcctggtggacgtatacccggccggagagggggtcgcggatgcacccgccgatgcaggtggccgcgccgccgaagggctcgatctcggtggggtggttgtgggtctcgttcttgaacatgagcagccagtcctgctccttcccgtccacctgggcgggcacgtggatggagcaggcgttaatctcctcgctctcgtccagctcggggagcaggccccgctttttcagggtcttggcgcccagggtggcgatgtccatgagggtctggggccgcctggcggccttctccgcgccgtagacctccacccgggcggacaggtaccgctcataggcggcctttacgttgtcatcggcgatctccacctcgtccagatgggtggagaaggtggtgtggcggcagtgatccgaccagtaggtgtccaccacccgcacctcggtgagggtgggatcgcggccctcctcgtcccggaagtaggcctggaggaaggcgagatcggccagatccatggccagggcgtactgggccagcacgccctccagacccgcgcggtccaaggcggtgaagccatccagcacgggcacggcggcgggaacggggtagtcctggcggagggtggcgggcttgtccagcgccgcctcccggctctccaccgggttgatgaggtagccgcgggccttggccgcctcctgggcggtgagggccccctccagcacgtagacggtggcggcgcggacggtggggcgctccccgccgtgcatcatctggatgcactgggcgcaggagtcggcccgctggtcgtactggccgggcagggcctccaccgcgagcagggtgtgctccccctccggggcgggcatgacctcatcccacagggcgtccacctgcggctcggagagcacggtggtgcgggcggcggcatagaccgccgcgtccaccccctccacgtcgtagcggcgcagcacccgcacgccggtcagccccgtcaggcccagggtgtggcgcagctctccaaacagatgctccgcctccacggcaaagccgggcttcttctccacataacagcgaaatacgttccccatactctctttctctcccttatgtgatcttccagtcggaaaattgatggaatatgttttgctgggtgggcgtcagcccgtcgatccggctccactgggtcaaaacggaccagttcttgaagcagatgaccgcgaaggggggctgcccggccagatattcatagagctgccgggccggctccgtccgccactgtcccacggcggcgcggaaggcgctgaggcggttcagcgccccggcgtcgctgtacttgccgtagttgagggcgccgccgggggtcaggaaggcggtgagatcaaagtcggcggtgagccgcacctcccccaggtacaggtcgaactcccccgccgtcagggcctgaaggtaatcgtcccaggccagggcccgcagctccacctccaggccggcgtcggtcaggttggcggccagcgtctccgccgcggccagccggtcggcgttgttgtttggggccacaaaggtgagcgccagcggtcgcccctccttctgccataccccgtcggctctggtgtagccggcagcggtgaggagcggctccatggcctggggggcgtagtccagcgtctgggccagcgcctcgtcgtagagggggctggcgggggagacaggaagggcggcgggctgggcgtggcgggagaactgggcggtggatacggcggcccggtcaaagccccgcagcagggcctgccgcacctgggcgctccggcaggggccgtcggccgtgttgaagccaacgtacagcatggtgctggtggggtagtccaccgcagcaaaggaaccagaaaaacccagggcattggtgcccgtcaggtcggtggagaccagggcaatgtcccgggtatcaaaggcatggatcagatcgtccgcctcctgaatggctcgcaggggaatggtgtcccggggcagggccttgccttgccaccagccggagcgggcttccagcgcgaggttctcccccgtgccggcgagcacgtagggccccgtgcccagggggacgcctcccgtctccttgacgatggggatgtccagcagggcgggcagagcaccgttggcgcggctcagggtgacggtcaccatgccgttggcggcggcgatgtccgtcacgccggcgaagcgggcggagtagagggggctgatgcgggccaggttgagggaggccgcgatctccgcggccgtcagggggctgccgtcggagaaggtcaccccgctgcgggggataaaggaccactggaggccgtcggccgacacggaggcggaggcgcagagcgcctcctggggctgaaactgcctgtccagggcaaacagcccctcatacagcaggccccccagggccaggttggtgcggttggagccggtgatggggtggaacccggcctctgggtagcaggccagggcgaactcggccgcctctggagagggggagacgctgggcgtgggggtgggtgtgggctccggctccggcgccggcccgcaggcggccaaacccaggcacagggccgccgtcagcagggcggctagaatgtttcgcaaacggctcggcctccttcctaaaggcgcgtcgattttctgcggaaaatctctgccgctgcgcggcaggatacgcgccttccagagggaaccagttccccctagatacgcgcctgcggcgcgataccccctccgctctccgagggaattttggattggcgtacaacggcaatggagcatccatattttatagctgcttatctcacagcgttttccccgccctgcggggaaacgaaattgaaaatcagtctttccgggaattcattttccggaaagacaccccgacccgcgccacagggcgcgaaaccgggggtatcgagccaagtcgccggcgttttcgccggcacgcaggctcgtatctaggggtcggaagcgccggtggcgcttccgatgaagtccagacggagtctcctcagacgccattggatgccccctagacgattgcgatcatcgccgcctggctcccccgctccccgtgggtgtaacggtgggaccagtacttctccggcaggcagcaggtacagtcggcggagacagcgatgtgttcgggggccagcccggcgctctccagccgcttggcgttgaggcccttgagatccacgtggaacttgccggtgggcagcacctcgatggaggacagggcggcggcccccatggcctcagtcatggcgttgggcacgtcctcgtgggtctcgaagcagcacttggagatgccggggccgacggcggccaggatgtccagccggtcgcagccgtagcagtccaccatgcgctccaccgccttggcggcgatgcccagggcggtgccccgccagccggcgtggaccgcccccaccacccggcgcaccgggtcatagagcaggatgggcaggcagtcggcggagtagaccgccagcgtcacaccggggatgtcggtgacaaggccatccgcctgccagggctccggctcgtccaggccgatgcccagatccgccgcggtgacggtgcgcaccgtgtcgccgtgaacctggctggcgcagacaatgttccccatgtccgccccaatggcggcgcagaagcggcggtagttctcccgtacccggtcgggagcgtcgccccggttcatgcccaggttgagggtggcgtagatcccctccgataccccgcccaggcgggtggagaagccgtgtgccacaccgccggcggcctcaaagccgtcggcggtgagatacaccaggccatttttgttgtgctcgatgatattcatggatttcctccatctggaaatcgaaatcggtttttccggaaactcgcgtttcgaaaaacacctcggcccgcgccgcgggcacgaagccgggggtatcaaaaccgctgtgccgcaaagcggcacggcggttttgtatctaggggccggaggcgcttccggtcaaacgccagcgaagccacattccgcttttggataccccatagactgcttttactcgtcctcgtgcatgccgcagcacttcttgtacttcttgccgctgccacaggggcaggggtcgttgcggcccaccttctggcccttcttgacgggctgcttcttaacggtgccgtcgctgcccgcgctctcgccggtgaccttggccacccgctcccgcttgacggtggtggcgcccacctggacccgggccaggaagatgcggcggatggtctcggcctggatggcggcgatcatgctctcaaacatctcgtagccttcctttttataggccaccaccgggtcgttctggccgtaagcccgcaggccgatgccctggcgcagctcctgcatggcgtcgatgttgtccatccagtactcgtccaccacccggagcatcatcacccgctccagctcgcgcatgaggggctcgcccagctcggcctccttgcgggcgtagatgtcgctggcccgctcctggagcaggtcggtgagggcctgggcgtcgtactgctggagctcctcgtcggtaaacttgaactcgtcgggccgcaggaacagaccgcggaactgggcgcacacctcccgccagttctcggcgtccatgtgcttgagctcacccatgtgggcctgcacctcggtggaaatcacggtggagagcatggtctgaacggactccttcaggttctccccgtccagcaccttgcggcgctgctcgtagatgaccttacgctgggtgttcatcacgtcgtcgtactccagcacggtcttgcgggtctggaagttgcgggactccacctgcttctgggcgttctcaatggcgttggagaggatcttcgcgtcaatgggggtgtcctcgtccacgcccagcttctccatcatgcccatgacccgctcggagccgaacaggcgcatgatgtcgtcctccagggacaggtagaagcggctctcgcccgggtcgccctgacggccggcacggccgcggagctggttgtcaatgcggcgggactcgtggcgctcggtgcccaggatgaacaggccgcccgcggcccgcacctggtcggcctccgccttgatctcgtccttgtatttggcctccgcctcggcgaacatcttccgggcgttgaggatctcctcgttgtcggtgtcggcgtagccggtggactcggcgatcagctcgtcggagagcccggccttgcgcagctcggccttggccaggtactcggcgttgccgcccagcatgatatcggtgccgcggccggccatgttggtggccacggtgaccgcgcccagcttgccggcctgggcgacgatctcggcctccttctcgtggaacttggcgttgagcacgttgtgcttgatgccccgcttcttgagcatggcggagagctcctccgacttctcgatggagatggtgcccaccagcacgggctggcccttcttgtggcactcctcaatctggttgacaatggcgcggaacttgcccgcctcggtcttgtaaaccacgtcggggtgatccacgcgctgcaccggcttgttggtggggatctccacgatatccagggagtagatggtgccgaactcctcctcctcggtcatggcggtgccggtcatgccagagagcttgccgtacaggcggaagtagttctggaaggtgatggtggccagggtcttggactcccgggccacggtgacgccctccttggcctcgatggcctggtgcaggccctcggagtagcggcggccgtacatgaggcggccggtgaactcgtccacgatgatgacctcgccgtccttgaccacgtagtcgatgtcccggcgcatcaggccccgggcccggatggcctggttgatgtggtgggacagggtggtgttttccggatcggccaggttggccacctggaactgctgctcggccttggcgatgccccgggcggtgagggtgacggtgcgggccttctcgtccaccacgtagtcggcgtccagatcggggtcctcctcctccttggtgtccacgctggccacccgctggcccttgagcttggccacaaaggcgtccactacggtgtagagctgggtggacttgtccccctgaccggagataatgaggggggtgcgggcctcgtcgatgaggatggagtccacctcgtccacgatggcgaaggcgtggccccgctgcaccatctcggtggcgtagatggccatgttgtctcgcaggtagtcgaaaccgaactcgttgttggtgccgtaggtgatgtcggcggcgtaggaggccttgcggtccttgggctggatgtcgtggatcaccaggcccacggtgaggcccaggaagcggtagaccttgcccatccactcgctgtcgcgcttggccaggtagtcgttgacggtgacgatgtgcacgccctctcccgccagggcgttgaggtaggcgggcagggtggccaccagggtcttgccctcgccggtcttcatctcggcgatgcggccctggtggaggatgatgccgccgatgagctgcacccggtagggcttcatgcccagcacgcgccaggccgcctcccggcaggcggcgaaggcctcgggcaggatgtcgtccagactctcgccattggcgatgcgctgcttgaattcgggggtcttggccttgagctgctcgtcggtgagcttggagtactccccgtccagggcttcaatcttgtccacgatgggtttgatggcgcggagctccttctcggagctggtgccaaagagctttttcaacagtcccatgcgtcttgttcacctttcttgttcctgtccccggcgcctcggctcccaggacttggatgctaattcagtttcctagtatatcatatcccatgtcaataaaaaaggggaaattatgaacaaacccagcgttttgcggttttccttcgcgcctgcggcgccagcacgcagggggcgtagatgagggcaccgggcccatagttgttgtccaggccgccgcgcctcccgctgtgattcgtccattataccaaaaaaatacggaaggttacaaattgcttttttccatttacggcccggcaggcagatggtacaataatgttgttcccatcacccagtgtaaaggagcgtaatatgaaaaaacggattgtgctgtccggcctgttggccgcggcgctgaccctgtccctgacggcctgcggcggggacaagatgccggaggagaccccggtgcccacccccatccagacatccacgccggtgcccacccccactcccacgccggcgcctgccgctcccaagtggggggatcaggtctttgccaagacctttacctccggcgacggcgccacggtgctcaccgcctccttcaccctcccgctgatacagaacaccgacgcctgccccgccggggcggccatcaacgagtggtacaaggccgagggggccagccggatgctggaggcagaggaggcctatgagatggcggtggccgactacgacgtgtccaaggcggcggggttccccttctaccctaccacccaggagatgacctaccagatcgcctacgccgacgagaaggtgatcagcgtctgccgggacctgtatgtgtccagcgagggggaggcccaccccgccgtctttctgctcagtgagcagtttgacgccgtgatgggggaaaagctggacttcaccgacttcttcaccgacgccgacgccgtacgggcgcgggtggtggacgccctgttggaccagcggagcgagctggccgcggcggtggagcaggggacgctcacccgggacgccatcaccgccgcggtgcaggtggacaacttttactgcacggcggaggggtatgtgttctggctccagggcggcgccctgcccgccatgaacagcccgctctctgcggtgctgacctatgacgccatgaaggacgtgagtgcggatggataacggcaagccccgggaggggcagctctgccgcctggtgatcgacggctacgccagcgacggcgccggggtggcccggctggacgggatggtggtctttgtccaaggcggcatccggggagaggcctgcgacgtgcgccttacccatgtgggccgcagcgccctctggggccgggtggaggaggtggtcaacccctcccccgcccgtatcttcccccggtgcctgcactacaccaagtgcggaggctgccagttccggcacatgaactacgccgaggagctggaggccaagcgcatccgggtggaggacgccctgcgccgcctgggcggggcggagatccacgtctccgccatcctgggggcggagcaggtagaccgctaccgcaacaaggcccagttcccggtggccaagggcccccgcatcggcttctaccgcccccggagccatgacgtaatcgacgtggacgactgcctgctccagggggaggcggccgcccgcctgcggggggccgtgaaggagtggatggcggagtactccatccccgcctacaatgagcgcaccttcaccggcctggtgcgccacgtgtatgtgcgcaccaaccgggccggccgcagcctgtgctgcctgctggtcaatggccggggcgtcccccgggaggtcgagctggtgcgcgccctgcgccgggccgagcccaacctggccggaatcgtgctgggggtgaacgagaagcacaacaacgtgattctgggggactcctaccgcaccctgtggggggaggacttcctgtccgacaccctgtgcggcctcaccttccggctgtccgtcccctccttttatcaggtcaacccggcccagaccgaggtgctctacggcaaggccctggagttcgccggcctcaccggggcggagacggtgctggatctctactgcggcatcggcaccatcagcctggtcatggcccggaaggcgggcatggtgtggggggccgaggtggtgccccaggcggtggacgacgccatcgccaacgcccggcgcaaccacattgaaaacgcccgcttcctctgcgccgacgcgggggaggcggcccgctacctggagggggagggggtgcgccccgacgtggtgtgcgtggatccgccccgcaaggggctggccgaggacgtggtggacaccatcgcggacatgggcccggagcgggtggtctacgtctcctgcgatcccggcaccctgggccgggacgtgaagcggttcgccgggcggggctacaccctcaaaaaggccgtggcggtggacatgttcccccgcaccgcgcatgtggaaaccgtggcgcggctggaacggagctgaggccatggcggaggagagacacatctgcgccctgctgcggcagggctgcggcggctgccccctgctggagaccccctatccggagcagctgcgccaaaagcaggcccgggtggaggcgctgctgggggagttcgggccggtgtcccccatcctggggatggagcacccctggcactaccgcaacaaggccatctccaccttctgcaccgggccgggccggcggctggacagcggcatttacgccgcgggcacccaccgggtggtgccggtggcctcctgcctgctccaccaccccgccctggacgaggcggtggaggcggtgcggcaggccgcccggctctgccggtacgagccctaccaggaggaccggggcacggggcttgtccgccatgtgctggtgcgccacagccgcgccaccggacgggtgctggtggccctggtgaccgccgcccctgtcctgcccggggccagggcctttgtctccaaggtgcgggagctctgcccgcgggtggagaccattgtgcagaacatcaatccccgccgctccagcgcggtgctggggccgcgggaaaaggtgctctggggcagggggtacatcgaggacaccctgtgcggggtgcggttccggctgggggcctccagcttctatcagatcaatccggagcagaccgaggtgctctaccgcaccgccctggacggggcggggctggacggcacccagaccgtggtggacgcctactgcggcgtgggcaccatcggcctggcggcggcggggcgggccaggcgggtgctaggggtggagttcaaccccagcgcggcccggtgcgccgcccagaacgcccgggccaacggcgcgggcaacgcccgcttcctctgcgccgacgccacggcctacctccagggcatggccgcccggggcgagcgggcggacgtggtgttcctggacccgccccgggccgggagcaccccggagttcctgggtgcggtggaccggatggggccggagcggatcgtctacatctcctgcaacccggagacgcagcggcgggatctccgcctgctggccggatgggggtggagggcccggctgctccagccggtggatctctttccccatacggagcatgtggagtgtgtggcggtgctggccaaaatccgcggaggtggtatgtgaggtacgccgcctccgaagtcaaaacagcatgggagcctggcgcgcaacgtgcggcgccaggctcccattttactttgtatgctacgcttccttcggcggcatggcggtagccacgcctttgatcaccacgtctccgtgctggttggtgcatacggtgtccagcttgacgatattcttttccggaaacagttcctggacggtacaggtcgccgtgacggtgtccccgatatagaccggcttggtgaatttcagctcctggcccagatagatggtgccgggccccggcagcttcatgcccagcactgcggagataaaaccggcccccaggatgccgtgggcaatccggccgccgaactgggtctggctggcggaaacctcgttggtgtgggcgggattgagatcgccggtgatgccggcaaacaggtatacgtccgtctcggtcacggtcttggtcacgctggcgctgtcgcccagcttcatttcccgaataagcattgtttgacctcctgttcctgcgttgttccgcttgagctggggttctgctgcgcaagccccattcgctcctcccggaagatgcggctgtccatagtcgttacatctgtgatgactggtgtgaactccatctggtcaaggatatcgcgctggatgtccacgcccggggcgacctctttgagcgcgacgccctccggtgtgagggcaaacaccgcccgctcagtgatatagaggacgggctggttatgcttgattgcgtagcggcccgcaaaggtcacctgctccacctgcctgaccagctttttgaccttgccctcccggaggagcttcagcgtaccgtctgcggctgagacctccaggccgccggcggtgaaggtaccgcagtagaccacctttttggcgttctgtgtaatgttgatgaagccgccgcatccggcgatcttcgggccaaatttgctgacgttcacattcccgtccccgtccatttgggccaggccgagaaatgccgtatccagtccgcccccgtcataaaagtcgaattgaaccggctgctccagaatgcagtccacattggtggcggcgccaaaatccatgccgccggccgggacgccgccgacggcacccacctcggttgtgagcaccatgctctccagtccctcctctgccgccacagaggctaccccctccggcatgccgatgcccagattggtcaccgcacagggggtcagttccatggccgcccgccgggcaatgatcttccgcgtacccatcggcagcggggacagagcattcagaggggtgcggatctctccggaaaaggcggggtcatactgggtgccgaaggtctgcatgtggttctccggccgggccaccacaagcgcatccacatagataccggggaggcggatgagccgtgcgtccaggcagccgtaggagaccaccttctccacctggacaatgaccctgccaccggagttatgggcggcctgcgcctgggccagggcctcggcgtagacaccctcccgctcaaaggtacagttgccgcgctcgtcggcataggtcgcgcggataactgcgatatcaatggggaaggcgggataaaagagcttttcctcgccctccagctcaatcagcttgaccatatcgcccgcttcatgggcggcgcggttcatctttccgccctccaggcgggggtccacaaaggtgtccaggccgacatgggtgatcacgccgggccgcttcgcggcgatctcccggaacagcccggagatgaccccctgggggaggttgtaggccgccagcctattctccgccgccagccctcccagcttgggcgccaagccccagtgtccgccgatcaccgttgtgcacatcccgtctacagccaggtggttaagcccccgctcgccgctgtcaccctgtccggacgcatacacgaccctcagccctctcgggtgtccgctgctcctggcggcctcctccagcgcaaccataatctcctccggatgcatcagaccgtttgcaaagccgccgaacgtcacagttgccccatcgtaaaaataggtgtctaccgcttggcgggcggttaatatctttgccatatcgtttcgttccctttctgtaacatagaatggctgttttcctgaaggcaaaagcggaacgggtcggcatccgattgcgcggtgctgacccgttcggaccggtccgttttatgtggactctgagtgatcagatcagcccgatgattgccattgttgcagcgatcagcgccagggcgatgggggtgatcacggtcatgaccagtacgtgagggtaggactccttggtggtcacgccgcagacctgggcctccataacgaaggtgggacagtggggcagcgtgtccatgcccatcgcggccatgccgacgaccttgtagagcgcctggggattgacggtgcccagggacatgaactggtcggccatggtgctgcagaagatctgggtgccgctgagggaggcgccggtaataccggaaaatacgttggttacgatgacggcggagatgtaggggttcattttgtcggcgagcatcatcgcaaagttcatgaagtactggaaaccggcgcaggcattgacgacggacgcaaagcccatcagcgcggcggtcagcagcaggggattgatgctggaggtaaagcctgtaaccaggtcctgaacaatgtggcccttgagatacttataattggtaataattagaacaatagcgcccacgcccatggcggtgttgatgccgtcagaggcgctcatggagttggccagcaccagcttaagcacaataatgacaatatagggcagaatagccaggtgaatggggggcagttccttaccgctggtgcttccggcgatgagttcggcatcgctctcagaggctacaaagccaattccacgggcacgcagggagttggaggcccaggtgaagtagaaaatgccgaagccgaaagccactacaaggagcacaattgccatcgtgggggccgcaaaggtggtgacgcccagcttttcggacaatgcgatgcacagcatagagggggcgcccggggtaacgacattcagaaccacggctccatacaggaagatggcgggcatcaggagttttgagacattggctttgcggaacatgggcacagccacgggatagacggcaaaaataataataaatgcatttacaccgccataggccaaaaggaaggtaataatcagggttccggcgacggtggctttcacgccgaggaaggcgaacagaaaatttgcgatagactcggcggcgccgctctttttcatcagctcgctgtaagccgaaccaatggtgaacagaaacaggtacgagccgaaggtacttccgagggaggccgcgtaggtgccggtcagagtcccccagaacgggagcccgctgcttacaatcacgataaccgagccgaccagggatgccacaaagccgttgacacccttaaaggtcaaatagatcaggactgcaacgccaagaaccatgccaattacgctgatgatctccatacgttttcctctctttcttatccaatgattccgtactgggaggcgctcgcttaacgctaggtcaggacagtaaaagcactatatttccattaaagaataataatggaatttaaagggcggacaagctccggaggtactctggcccgtcccaatttaccaaatcatattccgttcggcctcttctctcagccagtcccggaagtccgggtgggcaattttgaccagggcctcaacccgctccctgatattcagtccccgcagccaggcgataccatactccgtgaccacgtagtcggtgtcgtttctggaagtggtgaccgcggcgccccgcgccaggaaggggacaatttttgagtgcagcacctctttgccgtctgcatctgtggccgaataggtggaatgcattgcaatgatggatttcccgcccggggacatctgcgcgccctgtaccgtctcagactgccctccggtgccggaccactgaaggttgccgacggtttcagaggcgcactgtccggtgaggtcgatctccaggcttgcgttgacggagacaaacttgttgtttctggcaatggtgtagggatcgtttgagaaggtggaggatttaaagagcacggaggggttgttgtggacgaagtcatagagcctctggctgcccatggtgaaggagcacacggaaaaaccgttcataaagcccttctgggagttgtccaccgcgccgcactcaatgagatccaccatggtctcggtaaacatttccgtgtggattcccagatgcctcttgctcttcagctcatttgccacggcgtttgggatgttgccgataccgagctggatggtggagccgtcctctacaagagaggccacaaaggcgccaatttttttgtctacctcggtgtagggcaccagggacttggtggggatagggcggtcggactccacaagggcatccacctcggaaatatgtacctgtgtatcaccaaaggtgcgcggaaagttggggttgacctccagcagaaccagcgcaccctgatcgatcaggtcccgctcatagattgcgctgaccgagagggaaaagtagccgtgggagtccatgggggagaccgtggccagcaccacgggccggcggccctcggcctgcaggcgctgtagagactttcgcagaacggaggtggagctctgaggaacggcgctgaccagcttctttttctgcgcgtcccggagcccggcggtaaagaaccagccgttgtggctcatgatacctgccatctcggggtccttcatcgcatcataatactgaatgggaaggcaggagttcaaagtagtgccttttacccccgtctccttcaaatgctgtagcttggacaggatggcctggggctccgccgcagcctgagcggaaaacatggaatctccgtcctgaataagctccaaagcctgttcagcgctcatttgtttcttcttgtacaattcctgatactggttcacaggataacgctcctttctcgtggggccatgtctggtgcgtgggacagggcgcagaggaagggaatgaaccccgccccacacaccgccttttgaggaatttgtccggttatggggattttgtcttgcctgcttcgacaatttgattatagttgaagggctatggtttgaaaaatacaccttttttatcgccgcatgaattttggttatgcctaaaataatgttgctgttttttgaactttagccccgttttattggaaattatcctatattatagtctgttttttctctctggctagtggcccggcactctttgccgcatcccgtgttccgaaaagaaatttgcgaaaaggcgtcatgtactttataataaaaatacaattcgctcgactgttcgaatggttttttgtgtaggaggaatcatggctttgcggcatcacggcctgcggcggctgagggagtatgtatgaaacgaatgcagctagaatattttgtgcgtattgtggaggagaaaagctttacaaaggccgcagaaaagctctttatcagccagcctgcactgagcaaatcgatccgcgcccttgaggcggagcttggtgtaacgctgttcaagcgcgatccccgcgagctgagcctgaccagcgaaggggaaaacgtctactgttatgcggtggatattttgaattactggcaaagccgtaccgccgagctgttttctttgctggaacaggtaaagggttctctgcggtttgggcttccaccgtcggttgggagcgtttttttttcaaagattctgtttgaatacggctgtaaatatccgcaggttgatttgcagattgtagagggaacctccaaaaagattgaagcactggtcatgaatgatcaggtagacctgggcgtggtgattgagccatacgaaaatccgcatatgaggttaaagaccgtctaccgttctgatgtggtgctggcagtggcgcggaatcaccggcttgcagagcggacagaagtggaaattgccgagcttagggatgagccgatgctgatggtctcgaaggactatatgtttcacgaccaggtgcttgcccattgccggcaggcggggtttacgccaaatatcacgtttaccacatcccagtgggaccttttgctggaaatgacggctgaaaaccagggtgtgaccctaattgggcggcctttggtggaaaagctgtacagcggcaggatcaagtgcatctcgcttcaaaatccggagtttttgtggacgcttggcttaatatcaaaaaaatgtaaaacgctttccggcgctgcaaagagcctttggaatttttgcgatgaagtttgagggggaccagacatcacagccggctgcagacctgcctgctccatttgaaaaacgccggggacagaactgtaccgcacagtcctgtccccggcgtttttcaacattctatatgtgagagacttccgtacggggttccggagggcctattcccaatcatatacacaatatgaaggaacgccccgcctcccgttcgggaggcggggcgctctgctggccgggcacgggggacggggggaggacataggataggatgcagagaaaacggcccgacagccgctctgccaaatgctctgaaaaggagaatgccgcgtgtcagaatattgtatgcctccccttggggggtattccaccggagagtgcgccatgaaccgcatcaatgcccagccggagcggcggccctgcgtgtgctccccctgccatccggttccgccctgcccgccaattccaccctgtccgccgactccccctcccattccaggcccgaccggcccggttggaccgaccggccctcaggggattccgggaccggacggtcccaccggccctgcgggccccatgggtccccagggcgggacaggtgatccaggccccaccggcccgacggggcccactggcttgacgggggcgacgggcccaaccggccccaccggcgccgtgggtctgacgggtgcgacgggtcccgcaggcccgacagggcccactggcctgacgggtccgacgggcccaaccggccccaccggcgccgtgggtctgacgggcgcgacaggtcccgcaggcccgacggggcccactggcctgacgggtccgaccggcccgactggcccaactggcccgactgggccaagaggcgagacaggcgcagcaggcgccacaggcccgaccggcccgtccgtgaccccggcggccgcagtggcgaacgccaccagcgccacggacgtggtgacacggtttaaccagcttctggaaaacctgcgggcggccgggctgctggggacctgagcacaggcaccaaaaaaacgccgcgggcggcgctgctgcgccgcccgcggcgttcctataagggggattgctttgtgaagattgtggtttatgccatttgcaaaaatgaggccggatatgcagagcgctggatggcctccatggcggaggcagacggggtgtatgtgctggacaccggctccaccgacgggaccgcggagcgcctgcgtgccctgggggcggtggttgtggaagagagggtggagccctggcggtttgacacggcccgcaaccgctctttggagctggtaccggaggacgcggacatctgtgtgtgtaccgatctggatgaggtgtttcacccgggctggcgggcggcgctggaggcggcctggacggacgggaccacccaggcggtctaccgctatacctggaacttcaacgccgacggctccgagggcaccgtgttctggattgagaagatccacgcccgccggggataccgctggacccacccggttcacgaggtgttggagcggcaggagggctggggaccggggcggaagtgcacggcggagggggtgcagttggaccaccacgccgaccccgccaaatcccgggggcagtacctgcccctgctggagctatcggtggcggaggccccggaggacgaccgcaacacccattacctgggccgggagtacctgttctacggccggtgggacgactgtatccgcacactggagcgccacctgtccctgcccaccgccgtctgggcggatgagcggtgcgcctccatgcggtttctcgcccgggcgtggcggcagaagggccggccggagcaggcccggcggtggctgtggcgggccatcggggaggcccctcacctgcgggagccctacctggagctggcgcgcctgctctatgaggaggcggagtgggacggggtggtgtacctgtgccgtcaggccctggcaattaccgaccgccctcagacctatatctgcgaggcggaggcgtgggggagcctgccctgggatctgctctccctggggctgtaccacaccgggcggcgggccgaggccctggaggccgcccggcaggccctggccctggctccggaagatgggcgcatccgggacaacgtggcattcctggcgggctagctctcccgggccgccgccgtccggcggcgggacagcgcgtccagaagcctgggccaggccagtgcaaagaaaagaccaaacagactgcccagcacgttgttgcacacccggatggcggccgcggggccgggaccgaagagggcgctggcggtgagcagggcgcccagacagttgaacacggtgcagaagccgtagctggcgcacaggcccaggcagagccccgacaggatgcccaggccgccgtggagggcgggcgggcagagctgatagagcaggcagaacagcagggagccgcccagcacgccgcccacccggcctgccgcccgccggacggggtgggacccgtaggcggtgagaatggagctgcacgagaagcccacccacataatgcggggcaggcccagcagctccccagtgagcaccgccaggctgatgccaacggccacccggagctgccagcggcacttttcatcggcgagggaaaaggcgcggagtaccgcccggaaggggcgctccggcgtcctgtcccggtggttatggtagagcaccgcggcgcacagggcgaagcccagcagcatctccagcccccgcagggcgagtgagcgcccgctgaccggatttccatacaggaaaagatagctgaacaggtagagggaggcgttgcccagctcgggctggtcggcggtgatgagcagcagcactccgatacagaacaggttgagcagcaggtggagcaggggcccgcccagaggggccagggcgggcccgagcgtgagcagggcgaaggcagccgccatgttccgcagggtgtcggccatgcggtagttgtaatggacaaagcggcagctgagcagcagacagaaaatgaccaccgccgcggggctgttggtcccaccgaacagggcggtgagggcggagataaacaccaccgcaaaccccacacaggcggcgtcccgggccagcagggccaggagaagccgcctgcgctcggccccggcggcctggcggagcaggcccttgagctggggcacccccagctgcatcagtccatagaaggacacggctccccgccccctttcacggccgcggagtccaggcggcggttggcctgggtgatctcctccatcagccgggtgaactccgcctcccccagcccctcccgcatccggtaaaggggggagaggtaggcacggtacccgtcctgaagggcctgccgtcccgcctgggtgagagacagggtatagctgcgccggtcggtgggggagggggcggccgccactagcgcccgcgcccgcaggccacggatgaggcggctgacgttcacctgctgtaagcccatgctccggctcaggcccaggggggtcaccggctcctccgccatccacaggcgggcaagcagctccagctccgacccggtcaggggcaggcgctggtggacggcggcccgccgggccaactgccgcagctgctgcatatactctgacatttgaacccaatccggtttcacaaaatcgtcctccatatacttatctataatatatattattgataagtatattactccgccaggtgcatcctgtcaagagcgccctgcgcattgacattcccgcggagaaaatagtataataaaaaatacgtaccggggcatggccccgttgggagagaaggatacagggggcggagcgcatatgagcgataccaatgataaaattcggattgtgcaggagacggtggcgggcaaggagatcacctttgcccacgtcatcggcgggccggcccccatcatctatcagaagctgggcctgaacccggccatcgactacggcgccgccgccatcggcatcatgaacatgaccccgccggagtcggcggtgatcgccgccgacatcgcagtgaagagcggcgacgtatacctgggctttgccgaccgctttaccggcacggtcatcatcacgggcgagctggcggacgtcacctctgccctgacggagattgtaaactacttccgcgacgagctggggtatgtggtgtgcaggatcaccaagcggtaagaggcgcggcgatggggaagcgtatgacacgggaggagttcctggaggcggtattctcccggcggtatgaggaactcaagggcagggagctgcgtacggtccgggtccgggtggtgggcaaggagctctctctggcccagctcatcggcgtgacggaccggcgggtctatgagaacctggggctgcacatcggcacccatctgggggaggatcacaccggccagtccatcggcctgctgcacctgaccccgtgggaggccacggtggtggccgccgacgtggccatgaaaagcggaaacgtggagctgggctttctggaccggttcagcggcgcggtgatccttttgggcagccgggcggaggttaagagcgccctggagcatgtggtggaatttttccggacggagctgggcttcaccgtctgtgaacttacggagcggtgacaaagagagatgaagaagttatttctgatgggccggagcgaggcgggcaagacctccctgacccagattttatcgggcgaggagctgcactaccacaagacccagtacaccaacacgggggcggacatcattgactcgccgggggagtattcggagaccaagcggtgcgggctggggctggcctgcttctcctttgaggcggacgtgctggccctgctgatggcggcggacgagcccttcagcgtttttgaggccaactgccagtgctttaccaaccggccgctcatcggcatcatcacaaagattgactccccctacgccaacgtgcccatggtgcgcaactggatggtcaactccggctgtgagcggatcttcgaggtgagcaaccttaccagggagggcattcaggagctgctggactatttgcaggaggaccctgtcaggctgacgctggagcaggccaaggcgcggcagcgcctcggcctgacggagtgggaggacgcctcctgcttcgggctggcctgaccgccccggagcggagactgcccagccgggcggttcggagcgccgccgctgagcgcggggatgaac

SEQ ID NO: 4268 - DNA, 23131 bp, Unknown
  gut microbiota DNA sequence
ttggaaacggacttctgcacgtccttggcggcgtccacgaaggtctgggcggtttcggccagtcctgcctccagagcctcggcatacacggagcggtcgtcatcggtggtctcgatggtggtcagggtgaggtcgtagtgcagctcatcgccctcggcgtacattttgagctccatcccctgggattcgtactgctcaacggaagaggcgacaagcttctgcatggtgtcggtgttgaaatactcctccaggttctttttgccgcaggcggacagggtgagcatcatggacagggccaggcaggcggccatggcaagggacagaatgcgttttttcatttggttttctcctctcattcggatgatatggcaatgcagatctcctgcacagtgcccgaaggcaggcatccaaaggcggacgccgcggtggggacgtgtattttgggggagttgaaccgggtaagacgcggcggagggggatccggggacagaacggcatacaaggaaataattctactgacagtataacacagcagaggcatatattcaacaccttgtagataagaataaaaccaaatgttttttgccattcgataaaatagggtagcaggctaagggcggaggttggatggatgaaagacctaggggagcggatcaaggaatatcggacctcaatgaagatgacccaggccgattttgcctgccgtctgggggtgaccggagcctctgtgtcggcctacgagaacgggacgcggctgccctcctatgatattctgatccggattgcgaatattcttggagtgagtaccgattcgctgctggggcggcgggggatgggcagcgttaccctcgatgtaagcaggctgacccaggagcagagaggtatccttcagagaacagcagacctgtttgccgattacaaccgtctgtcgggcggcggcgtatccggggaaaaagaggagcaaaaggggagctgacggctgtcagctcccctttttggagcgaaaaagggagctgcacaggtgcagctccctcggtgcgtaccgggttcagtccgcagaggagaaggactgggaggccagctccacgccggcggcgtcaaaataggtgaccaccaccaggacggtctcattggaaacggacttctgcacgtccttggcggcgtccacgaaggtctgggcggtttcggccagtcctgcctccagggcctcggcatacatggagcggtcgtcatcggtggtctcgatggtggtcagggtgaggtcgtagtgcagctcgtcgccctcggcgtacattttgagctccatcccctgggattcgtactgctcaacggaagaggtgacaagcttctgcatggtgtcggtgttgaaatactcctccaggttctttttgccacaggcggacagggtgagcatcatggacagggccaggcagatggtcagggtcagggaaagaatgcgtttctttgcggtgttcatgttataagctcctctcagttatttggtacggattttatggatatgtatggtatacatagatcccgtcagggcgtgggtgtgtgtgcttcgttataggctttgttctgctgaatgcccccaacgataaacagaatgggggctgcaacgccgcagaccagggaagcaacaccgttgggggtaaccaccccggtcagcagggtgccaataccgccgatgaccagcagtgggattccccaacccaggaaaaagcggtatttttctggccgccggctccgggagagccccagaataccaaccgtcagatcaatgatcagcatgattacggcaatcgcgcccattacaaaaacaaatccggagaaaacagccattatctcgtcgccgccgatcaggccgtcgctctgtgcccgggccatttgatcgacatagggatacagttcggaatccatcatgctccccactgagagaaggagtccggccagcgtgacaagggcggaggcaaggccgcccacaataaacagaaggcagcctacttttaaaagagaattaggatgctcgtgcatcaaaacaaactcctttctgtttctgctttgtattaatagtaaattgttccactgctcaccagaagaaaggcaagggcaaagactgcggcccaggagaccaccagataggcaatactcaacaggacccggagcgcgggggccagattctcggaggtggacagccgaagggtcaggaaaatgccgagcacggccagcactccgccaacagcgccgttcataatctgcgccaggttaagggcagacaccacataagcccacaccgggattttgccgatgggggtgtagggcttgccggtgcgcagcatcacgccgtccaccaccagctccatggaccacaggccggacaccagcatcacatgggcgccggaaattgggagatccacctccatggtcagaaacagcagcttccgcgccggaagagagcggattttgtagcgcgttccgttgatttccacggagtaggatcgtaaacagatggtgtagtcctggccttgtaaagtgatatggtaggttttcatggtaataacacctttctgcaaacagtggtgctattatagcgtagacatagggtaccgtctacccagtttgccgattccgtcgtttaagaggtaatatccgtcgtttgggggtgctcgggcagataccagatggcctcggcaatgaagcggcggccctcaatccgtacctgtaaaaagccgtccagagaggacagggcccggcgtacactgtccagccccataccatgcagggaggttcctgcctttctcgttttaaagttgccctcgtgatcctgcaaaagcgtgccgtcaaaggtgttctccacacggaggcggcacaggcccctgtccgcccacagggcgagggacagctccttttgggggcaacgggccagtccctccaccgcgttatccaggagattacccaagatagtgttgacggtaaagaggggaagggaaagtcctgcggggaggcggagctctgcccgcacctgcgcccctgcccgccgggcctcggctaacttgaagttgatcaggctgtccagttcgggattgccgctgctggcccagagggccgagggctctaaacatttcgaaaactgttccaggtaaccctgcagtgctccggtgtcctgctggccggccaacagttgtagggcggccaagtggttgcgcatatcgtgccgcagggtgcggagctcccgttccccgcattggtaaagggctacctcgttggcataggcctgattctgctgctccagtatacgggcgcggtactgcgcgtaatagctgcgtcccacctgccggtagagatggaataccaggaggttgagaagaatgagcatcccatccacaaacagagacagccaggcagggcagtgggcaaagtaaaacaaaagtatgactatggcaatggaggtagagggaatcagaagtacggcgaaccagtagaaggggccgtccggctgaagctctttttcggaagagggacaacgcttttccaacaccagggccataataaacaggagcagggcggataccaggtttccgagcggggaggtatggacaggcattagcagaaagaccaatgtatccagcaggaagctggcggcgtagatgaccagcgcagaccacagcctttgccaatgcggagcacggtagagcagggagagcagcagcagggggagcagggaggaggccaggttcaacagggggacgccgaacaacagaaagcacaggctgttgagcacataggcacacaggtagcctgccgcctctgccgggcatcccaccctgcgctggcccagaaagagggtcagcaggcggcggtagaggtaccagtgaaacccgttaatgagcaggtaggaggcggtttgcaggtcggtcatagcaccatccccccgggagtccatctcagcaggcgtccccgcaccacccgccggtaggactggctgatgggcagctctgttccgtcgtccagagtgagccgatcatattggatgcggcggacatacagggtgttgaccaggaaggactggtgaatacgcagaaaaaactgctccgggagctggcgggccacagtgtccagcttgtcacggcacaccagttcatgctggacggaatgaacggtgatccgcttatggtagctttcaatatagcgtatggcctgggtcggcagggcgcggggcgtccgctccactaaaacggtaagcacggcctcttcgggacgggacaggcggatggcctgaaccatacaatccagcagctttgcctcgtctaggggcttgagcaaaaaattgagcggccgggtatcaaacagagccatagcgtactgctgctggccggagatatacaaaagctgtgtcacagaatcccgcagctcttcccgcagcaggcgcccaatggcaacgccgtccacggtatccagttcgatgtccaggataagcagcgcaaaccgggctccactccgcagggcggcagccagcgccgcaccggaatggaagggggtcagctccagttcctttcccaggggggaaccgctcagcgtggtacagacctgggtaagaatttccgggttgtcgtcacaaactgcaatcctatacaagccatatcactcttttccttgttgatcggggaaacgccttggactcctgtgccaggcagcaacacataactattgagaaacaggaaaataaccctactcttaattcggctgggtgccgcaaaaaataagggtatggggcctgatttagtggaatgcggcgcggggaaagatcgggctttccttttcctgcccggtgcggtatactggaggcataaacagaaggaggtgcgttttatggaagtcgggaggagcatcccccgcgtggacgccgccgacaaggtgaccggccgcgccaaatataccgacgatctctgcccccgtccggtgctggaggcgaagattctccacagcaccattgccaacggctgggtcaagtccatggacatctccgccgcccaggccctgcccggggtggtgaaggtgctgacctgctttgacgtgccggacatccagtaccccacccccggccacccctggagcgtggagaaggcccaccaggacgtgtccgaccgcaagctgctcaaccgccgcgtgcgcatctacggcgacgacatcgccgccgtggtggcggaggacgagatcaccgcccggcgggccctggagctcatccgggtggagtacgaggagtaccccgtggtgctggaggcggagcaggccatggcggagggcgcgccggtgctccacgaggagcacccggacaacgtcctggccaaaatggatctccgcacgcccatgccggagtcggacttccacagcgtggaggacgtgctggcctgccccgcctattaccagttccgggggcgctacgacacccagcaggtgcagcactgccacatcgagaaccccatctcctacgcctggatggagggggggcgcatcgtggtggtcacctccacccagatcccccacatcgtccgccgggtgatcggccaggccatgggcatcggctggggctccatccgggtgatcaagccctacatcggcggcggcttcggcaacaagcaggaggtgctctacgagcccctcaacgcctggctcaccacccaggtggggggccggtgcgtccggctggacgtgtcccgggaggagaccttccagaacacccgctcccgccaccccatctccttcgacgtggcggcggcggtggacggcgacatgcgcctgatggcccgctcctgcaccgccgtctccaaccaggggggctacgcctcccacggccactccatcgtggccaacgccgtcaccggcttccggcagctctatctggaccggatcggccaccactccacggcctacaccgtctacaccaaccggcccgcccccggcgcgatgcggggctacggcatcccccagtgcaatttcgccgtggagtgcatgatggacgacattgcccgggaaaggggctgggaccccaaggccttccggctggcgaacctcatgcccctgggctacgtcgaccccttcaacggcatcacctgccactccaccggcctggccgagtgcatcgagaagggcgcggacttcatcggctgggtggagctgcgggagaagtacaaggagcagagcggcccggtgcgccggggcgtgggcatggcctgtttctcctacaagaccggcgtgtaccccatctccctggagaccgcctccgcccggctggtgctcaaccaggacggcacggtgcagctccacctgggggccaccgagatcggccaggggggcgacaccgtgttctcccagatggccgcccaggccatcggcattcccaccgaggacgtacatattgtctccttccaggacaccgacacagccccctttgatactggggcctacgcctcccggcagacctacgtcaccggcaaggccatcaaaaaggtgggggaggagttccgagaaaagctcctcgcctacgccgccgagctatttcccgacgcatcgggactggacatccgggagcggcaggttgtggacggggcgggggaggccctcatctccctggccgacctggccatgaacgccttctactccctggagcacagcgtccacatcaccgccgaggacaccaaccactgcaaggagaacaccttcgccttcggctgctgctttgccgaggtggaggtggacatacccgtgggcaaggtgagggtgctgcgcctcgtcaacgtccacgactcggggaagctcatcaaccccgccctagcggaggcccaggtccacggcggcatgagcatgggcatcggctacgccctcaccgaggagatgaagttcgaccccaagaccggccggctgctcaacggcaacctgctggactacaagatgcccacctctatggaccacccggagctcaccgccctgttcgtggagaccgacgatccctccggcccctttggaaacaaggctctgggcgagccgcccaccatccccgtggccccggccatccgcaatgcggtgctccaggccaccggcgtggcggtaaacaccctgcccctgtcgccccagaagctggtggaggaatttacgagaggagggctgatctgacatgtatgacattgcatccatctattcggccaggtcggtggacgacgccatccgcgccctccaggccgatcccgccgccgtggtgatcgccggcggcaccgacgtgctcatcaagatccgggaggggaagctggcgggctgctccctggtgtccatccacgagctgggagaggagctctccggcgtgacgctggctgacaacggcgacgtggagatcggccccctgaccaccttccgcggcgtcaccttttccgacgtgatccgccgcacaatccccgtgctgggggaggcggccgacatggccggcggaccccagctccgggccgcaggcaccatcggcggcaacgtgtgcaacggcattacctccgccgacacggcctccaccctggtggccctggacgcggtgctgcgggtgcgcggccccaagggcgagcgggaggtgcccatctcccagtggtaccagggggtgggcaaggtggccctggccccctatgagctgctggtgaaaatcgtcatcccatacgacaactatgtcggctataccggccactacatcaaatatgcccagcgcaacgccatggacatcgccaccctgggggtgagctgcctggtgaagctcaccagcgacaaaaaaatggtggacgacgcggccctggcctttggcgtggccgggccggtgcccatgcgctctccggccgccgaggcggcggtgcggggcctgcccatcggggaggccgtcgccgccatcggcgaggccgccctggccgacgtgaacccccgcacgagctggcgggcgtccaaggagttccgcatccagctggtcaaggagctgtccgcccgctccctgcgggaggcggcccggaagggaggggccgacgtatgatcgaagtgctgcgctgtaccgtgaacaacaagcccgtggaggtgggtatcgacccccgggagtccctggccgacgtgctgcgggagcggctgggcctcaccagcgtgaagaagggctgtgaggtgggggagtgcggggcctgcaccgtcctggtggacggcacggccatcgactcctgcatctacctgggcgtgtgggcccagggtaagagcatcctcaccgtggagggcctccaggagccggacgggggcctgtcccccatccagcgggcctttgtggaggaggccgccgtccagtgcggcttctgcacccccggcatcatcatgtccgccgtggagatcgtgggctccggcaagcagtacacccgggaggagctgcgcaagctcatctccggccacctgtgccgctgcaccggctaccagaatattctgaacgccgtggagcgggcggtggacgaggcccacaggttcgtgggaaaaggggaataaagacaaacgggagacgcctgtcgggcgtctcccgttttgtgggccgatgagggcatcggcccctacgggccgtgcggaattggctcccaatacgtgcatacctggtccggggttcggttcttgcgccgtggacaatgacagtgcccgtaccaaagggggaaatagctgccatcccggtaaatatagtgctgccggtagtggacgcaagtcccgcatacctgtccgtctacaatttcatatttatacatccttatcacctaagactattttatgcaaaaagtgcataaaatgcaatatgcagtttttgcatgatatatgctgattaccggtgatgcttatgtacccgcgattggcggaactgcgggaggatcatgatctgtcccaggcggaaatggcaaagatattgagggtcagtcaggccacctattcccggtatgagaccgggcgtttggatattcccagccagacgctgattgctctggcccggtattatggggtaagtgtggattatctgctggggctggatcacaggcggtaggggggcggtacccgcatcgccccgcccggacgaaaaaaagacctgcggcatttgccgcaggtctttttgacaatcagcacatgggcttcaggtcgggggagacgatcagggtggcctcggtggcggcctgtacctgctccacagtgaactcggggttgatctccaccagctccaggcccttgtcggtcacgttgatgacgcacatctcggtgatgatcttggtgatacagtggacggcggtgtagggcagcctgcacttcttcaggatcttggggttgcccttggcggtgtgctccatggcgacgatgacttccttggcgcccaccagcagatccatggcgccgcccataccgggcatcttcttgccggggataatccagttggacaaggagccctcctcgtctacctccaggccgcccagaatggtggcgtttacatggccgccgcggataaagccgaaggaggtggcggagtcgatgtagcagccgaagggagcggcctgggcgggctgtccgccggcgtcggtcttatagcgggggtcggcctcctcgggcgtgggcttggctccggtgccgatgatgccgttctcggactggagaatcacatgcaccccctcaggcaggtaggcgggtaccagggtgggcaggccgatgcccaggttgaccacgtcgccgtccttcagctcctgggcgacgcgcttggcaataaagcccttgatctcagacttttccattacgcattccctccatccacgatgtagttgacaaaggcgccggaggtcacgacgttctcaggctggatgtcgccgatctccaccacattgtccgcctcggcgatcaccacgtcggcggcggtggccatgacgatgttgaagttgcgggtcgtgcccttgtaccagatattcccaaacttgtccacaaggtggccgttgatgagggcaaaatcggcacggatgggcttcatgagcagatagtctctgccgtcaatggtctgcttgcccaggcagaagggggagtcctccacgatggtgcccacaccggtgggggtgagcacgccgcccaggccggcgccgccggcgcggatcatctccgccagagtgccctggggaatcagatccacggtcagggtcttgtccaccatgccctgagtgcccacgtcgggggtcatgcccacgtgggtggcgatgacgtgcttgacctgatggttgtgcaccagcttggccacgccgtagaattcctcgccgttggggccggtggccatgccgcagtcgttgccgatgatggtcaggtccttggtgcccttctgagccagagcttcgatgatgtgatgggcgctgccgcagcccaggaagccgccgtacatgatggtcgccccgtcggggatcatgtccacagcctccgcaacagaaataatcttattgcgcacagtgttaccctcctagttcaaattagagtggggtgttcgcgttatagttgggaggaaggacggtccgccgcccttcctcccgcttagtttagcacttttcgaagatggtggcaacacccatgccgccgccgatgcacagggtggccaggcccttcttggcatcgggccgtttggccatctcatggagcagggtgacgatgatgcgggcgccggagcagccgacagggtggccgatggcgatggcgccgccgttgacattgaccttctccatgtcgaagcccagctcgcgggccacggcgatggactgggcggcaaaggcctcgttggcctccaccagatcaatgtcctcgatcttaaggcccgccttgctcatggcctgacggctggcgggcacggggccgacacccatgatcttgggatccacgccgccgtggccccagctcaccagcttggccatgggcttgaggccgtacttctccacggcctccttggaggccagaacaatggcggccgcgccgtcgttgatgccgctggcctggcccgcagtcacccgctgcacatgcttgtgggcgtcatccgcgtgaacctgggtgggctcaaaggtgtggacaatctcgtcctccaccccctccggacccacggggaaggcgcccttcagcttgcccaggctctccacagtggtgccggcgcgggggaactcgtccaccttgaactccaccatttccttcttcttcttgaccatgacgggcacgatctcgtcgtcaaaccgtccggccttctgggccgcctcggtcttctgctgggaggcggcgccgaaggcatccagctcctcgcgggtgatgccccacacgtcgcagatgttctccgcagtggtgcccatgtggtagttgttgtaggcgtcccacaggccgtccttgatcatggtgtccacgaccttcttgtcgcccatgcgggcgccccagcgctcggcggggagggcgtaaggggcggcggacatgttctcggtgccgccggccacgatgatgtcggcgtcgccgcacaggatggcgcgggcgccctcgatgacgctcttcatgccggagccgcaaaccatgcccacggtgtaggcgggcacggagtagggcaggcccgccttcacacccacctggcgggccgggttctggcccagggcggcggtgagcacacagccgaacatcagctcgtccacctgctccggcttcactccggcgcggttcagcgcctccttcaccaccacggcacccagctccgttgcgggggtgtccttcaggctgcccccgaaggagcccactgccgtccggcagcagttgaccacatacacttctttcattgcagtaaacctccagatcgtaatttcattttctccccataccgaaaaatacccttcgggtttgattatacccctccgtttttaaaaaatcaaccactggtaaattggtaagggcaggttttttaaaaaaacaaaaccgggcggttcgggttttgccgaaccgcccggcctgtctcagccgcgccccgttgtggattgggcgtagacggcgtcctccttctgaatctgggcctgggtgaccagcgtgccgtccagaccgcaggcctggagtacggccagggtgtgccgggccccggactggagggtgatgcagaccgtgtagccgtcctcctcctcgccgccggtgcgtccggcgggccggaactccaggtatagatcgttgtagtagcagttttccagccggtcccggttctccagcaaatagcggcggcccagggtaccctcggccagatcggcgcggacagcctcctccagtccggtcagggcggaggcggggacaatcgcgctgtccgtatcggggttggtgagccaggcgtccaccagccggtctccctcccgctgcgcgtggaagtaagattcaccagccaggccgggggcgttgagcagggcgtccagccgggcggcgggggtgcccggcgtgtccagctcggactggctgaggggaacccggtatttccgggtcagataggagccgtccatgagggtataggaaatgtccacataggtccagccgtcggactggatgctcaggccgctgccgtcctccgaccaggtgctctcccagcccgcttcctccagctcctccttgtgcgttacaatggactggtgcaggccggtaagggcttccagctcctccggggtgtccagggtgagggtggcgtagcccaggtcgtcatagggggcggactccatgccggacaggtgggcgctctgtacctcagcggcgtcgggcacccggccctcaaagccggttatatcgaactccatcgcgcacatggcggccgtcaggcagcacagaaagaccacgcagcccttccacgcgccccggaatacccagaagctcttgcacagcagcatctcggccacaaagcagcccgccgcgccccacaccaccatgagaaccaggagcgtccacggcccgcggggcagcagagggtccaaaacgtagtaaaagacagtgctcagtgtcacagcggtgcagaaggccacaccgtatttgaacaccgggcgcacccagcggatgctgaccacgtcgccggcgctctccaaatgccggcggcggtaggccgccagggccagccctgccagcaccagcccgatgagggcgtacagggaggcatagcccagaccggcaaagtagggatcgcccagcatgctgtttccggcggcgtccgttatggtatcatactggacgtgacaggcctcggagagcagcagcaccggggtgagccagacgcccagcttctccagccaggcagcgctggtgaagccgaagagaaattcctcggccatacggctgaagacccagcacagcccggcggccaggccattgagaaccacatagaaggcgggcagggccagcacgtggccggtgaacatggcgcagaacacggcaaaggagtagaagaagagcccgaacaggctcaccaccaccagccaggtgaacaggctgctgaacaccactgtgccggcaaagacctccgccgccagggccagcaggaacaccgccagattgggcagcagcaggaacagaagccccgacaggtagttggtgaggaacaggccctcccgccgcaggggcagggcgtgaagcatgcccaccgagcggctggcatagaggtaggagaacaccgccatggcgcacagcaggccgaacagagcggtcagcgtaacggcggcgctcgggccgccgtccaggtagttcaggggcaggctgcgggccattcccccgtcccaatgtatccggttggacaaaatattgaggggcagcaccgccagccagaacaggccgtacagcgaccagatgggccagaagcgggcgaaattcttgcgcagcagggtaaaattaaagtacgatgtcgcggaccgcatagtcctcacctcccagctcatagataaagatctcctccagggtcaggggcagcgcctccatcagaatgggggcgaaggcggccagacggttggtgatctcggtggcgttgccccggatgatgagggtgtggatgcgccccacctgggagacgtggagcacctggaggtccccgggaagctggggcaattccttctcctggaacaccacctgcatcttgaccacgttctcctgcagggcgctcaggctccgctcaatgagcaccttccccctggagagaatgcccacatggtcgcacacgtcctccagctcccgcaggttgtgggaggataccagcactgtggtgccgtggtcggccacgtctcccatcagcagggaccacacctgccgccgcatcaccgggtccaggccgtccaccggctcgtccagcaccaggatgtccggccggcagcacagggccagccagaaggcggactgcttctgcatgcccttggagagccgccggatgggctgtttttccggaatggtggtaaacacgtccttcagcgcctcgtagcgcttgacgtcgaaccggggatagaagccccggtaaaagcgcatcatgtcccgggtggaggcggagaggaaatagtaaagctcgtcggggatggaggcgatgcgggacttggccgccgggttttcgtacaccgggttgccctcgatgagcaccgagccgctgtcctgccggtagacgccggtgacgtggcgcagcagggtggacttgcctgcgccgttggggcccacaagcccgtagatggacccgtggggcaccgtcatggtcagtccgtccagggcccgaaacccgtcaaagctcttgaccacattttttgcttcaatcatagctgcgctcctctctcacagtctgccgggccgccgcctccagccgcccggccagctcccccgcggtcatgcccaggaacagaagctccgccgccgaggcgtcaaattcccggagcaggcggtcccttctggctgcattcacgtcggcctggggggcggcgaaggagcccttgcccgccaccgtgtagagatagccctcctgctccagggactcataggcccgctggatggtgttggggttgatggccagcgaggaggccagcgcccgcacggagggcagtttgtctcccgcctggagcgccccggtcaccaccagatggcgcaggccgtccctgacctgctcgtagatgggccgcgcatcccggtaattgagttggatcataccgtcgtctcccttccggaaactgtattacatgaaatagtacacttagtatacacgccgccggaggggaagtttttaattatttctgacgtttttttaaaacagcccgcagtcccggggcagaatccgccaaatttccagtgacaacagggcgggataggcgtataatagaaccaccttatcaagagaaagcgggtgacacccatgaaccagagggcctggatggagtaccgtgcctgtgtggaggagctgctgttttcgtctcaggtgcagcatatgaagtccatccggcaccaccccggcgtgtcctgctatgagcacagtgtctttgtgtcctatgtggcctggtatctggcggaccggtggggggccgacgcgcgcaccgctgcgcgggcggggctgctccacgacctgtatctctacgacccccgcaccctgccctcctaccggcagtgctttgcccatccggtcgccgccgcggagaatgcggccgcgctgtgcggcggcctgaccgcccgggagaaaaactgcattttggcccacatgtggcccctgtcccgccgggcgccccgcagccgcgaggcggccgcggtctgcctggccgacaagctgtgcgccacggctgaaattatgcagatctggcggaacctgggcctgcgccgggcggttttgagcggcgcgtgagcaagcctgtctctgacaggcttgcttttgttttttaaatggggacggcgaggggccgttttgcaaagaaaggaacggaaaaaggggcgggaaattgtgcaagcctcccaagagcgaaaaattacccgctttttttgaaatttccgatgcattttcagtcctgctttgctataatctgattgcaagaaatccatgtttttgaggtgatttcaacatgaacgcgactggagcggtcgtattcctgccacgggagggcaacggcccgtccctgatgctggaggagctcctcttcgatcccgcggccctgtggctggcggagtcgctcagggccgccggagtggagcggtttttcgtggtctgccacaccgacgaccaggcccgggcggcggcctgcttccccgccggcaccgagtttgtcaccggcggcagcggcgacgcggtggagcagctgtcggcttttctcaacgccctggagggcaaggtgatcgtgatcaccaagccggtgctgctggactggggggatgcccggacgctggccggcctggagaacggcggcgtactcgacagcaaggacaccggcgtgtaccgcatcgacggcggcctgctgtcccagactctggctgagggcgttggcctggaggaggccctgaaggagaagggcgaccgcttcaacagccgcggcgtctggttccagggcgcctatcccatccgctccggctggaacggccgcatggaggctgagatggtggcccggcagcacggtgtgcgccgcctgctggaagccggagtccgcattatggaccccagccattgctatgtgggtccccgggtgaaggtgggggagggcaccgtcctgctgcccggcacaatcctgcggggggagaccgtcatcggccgggactgcgaggtgggtcccaacgccatggtgcgggactgcaccgtgggggatggcgtcaccattaacgcctcccagctcaatgagagcaccatcggcgacggggtgaagatcggccccttcgcgtacatccgccccaactgccacgtggggcccggcgtcaaggtgggcgactttgtggagctgaaaaactccaccatcggcgagggtaccaagatctcccacctgacgtacgtgggcgactccgacgtgggcggccacgtcaatttcggctgcggcaccgtcacggtgaactatgacggcaccagcaagttccgcacggtcatcggcgaccatgcgttcatcggctgcaataccaacctggtggcccccgtgcgggtgggggagggggcgtacaccgctgcgggcagcaccatcaccgacgaggtgcccgccgactccctggccatcgcccgcacccgccagaccgtcaagaagcagtgggccgccaagcggcgcaaccgcagaaagtagctctttcccgccgccgcgggatacaggatagagaaaaaatgtgagaggatgttacaagaatgatcgcacacggtaaggacatcaagatcttttccggcacttccaaccgccccctggccgaggccatctgcaaggaggtgggcacggagctgggcaacgccgaggtgggcgccttctctgatggggagaactttgtctccatctatgagaccgtccgcggctccgacgtgttcgtggtccagtccaccagctccccggtcaacgacaacctcatggagctgctcatcatgatcgatgccctcaagcgggcctccgccggtcgcatcaccgccgtgatgccctacttcggctacgcccgccaggaccgcaagaccaagccccgcgaccccatctccgccaagctggtggccaacctgatcacccgcgccggcgccgaccgggtcctaaccatggatctccacgccaaccagattcagggcttctttgacatccccgtggacaatctgctgggcaaccccattttcaccaactatctccacgaccgctttaacggcagggaggacgaggtgatcgtcgtctcccccgacgtgggcagcgtggcccgcgcccgcgccttcgcccagaagctgggcatgggcctggccatcgtggacaagcgccgccagaaggccaactcctccgaggtcatgaacatcatcggcgacgtccggggcaagaaggtcatcctcttcgacgacatggtggacaccgccggctccctctgcggcgcggcccaggccctggtggagctgggcggcgcggtggacgtcatcgcctgcgccagccacggcgtgctctccggccccgccgtggagcgcattgagaagagtgtcctcaaggaggtctacttcctggataccgtgccccccaaggctggcgtcgcctgcgacaagatcaagtatctctccgtggcccacatgtttgccgaggccatcgagcgcatctacgaggaagtgtctgtctcgaaactctttgtataagacggacaggatagtacaaatatggcggggggcggagcgttgctccgcccccattgccgcatggaggaaaaacgttgttttttgacaaaaatcggggcgccggggctgaatggctggtggtgggcctgggcaaccccggcgaaaaatatgagaatacccgccacaatgtcggctttctcaccgtggacgagctggccgagcgggcccgggtgcccgtgcagaagctgaagcaccgcgcccttaccaacaccttggaggtggggagcgtcaaggtgctgctcatgaagccggtgacctatatgaacctgtccggcgaggcggtgggggaggccgcccgcttctataaactcccaccggagcgggtgctggtcatctctgacgacgtgtccctccccgtgggcaagctgcgcatccgcaagggcggctccgccgggggtcataacggcctcaagagcatcatccagcacctgggtaccgaccagttcccccggatcaaggtcggggtgggccagaagccccacccagactatgacatggccgactgggtgctctccaaattcgccggggaggatctcaagaccatcacagaggccatccgtaaggccgccgacgcggtggagtgcctcattcaggaggggccggacaaggccatgaaccgcttcaacggctgaggagtgcgccatgatcacctttcgagaaattgataaaagcaactatatggaatgcatctgcctaaaggtgaaggacgagcagcgcggctttgtggcggataacgcccgctccctggccgaggcccggtttgaagagggcctgtatacccgggccgtctattccgacggcgtcatggtcggatttgtcctgtttgattatgaccccgagcttccagggtggtgcatgagccggttcatgatcggcgcgcagtaccaggggcggggcctgggcaaagagaccgtgctccgctttctggactttatgagggaacacatgggggtgcgggagctctacctccatgtggagctggagaatacggcggcctatgggatgtatcaaaagctgggcttccgcgccgtccgggagatccagtatacctttgacggggtggtctaccgggagcggcggatgaagatttgcctctgagactccccgccgcccatcccacgccgggcctccgaacggcccgcgcccacaacttccgatcttttctgtgccgaggtgtcctatgaagccactgctctccgccctcaacgacatacctgaataccgctccctgctggcggccatcgacaacggggcctgtccggcggccttttccgggctgtcggcggtgcaccgcgcccacttcgccgcgggcatccgccaggagctgaaccgccccgtggtggtggtgtgcgccgacgagggggaggccgagcgcatggccagggatctggccgccctgtcgggggaggcggtgcgcaccctctctgcccgggagttcaccttccacaacgccgcggtggtgtcccggcagtacgagcaccggcggctgtccaccctgcgggccctggcggcgggggagtgccccctgctggtctgtacggtggagtccattctccagcgcaccattcccaaaaccctgctgacccaggcggcccaggttctgcggatgggagagcggcacgacctgggggagctggccggcaccctggccgccgcgggctacacccgctgcgagcaggtggagggcgtgggccagttcgccctgcgggggggcatcctggactttttctccccggcccaccccaagcccgtccgggtggagttcttcggggacgagatcgacgccatgggcctcttcgatcccgacacccagcggcgcatcgagaatctcggcgcggcggagatcctgccggcggcggaggtgctgccccagtttacccctggcgggtacggcgggctgctggaggggctggaccgtctcatttcccaggcaaagcgccgcaaggggagcgagacactggtgcagacgctggaggaggaccgggagcggctggcggccagcacggccttcccggccatggaccgctacatcgccctgatctaccccgtcatggccacggcggcggattacttccccgaggacgcggtggtggtgctcagcgagagcccccgggtggccgagcggggaaagagctacctgtggcagttgggagaggacgccaaggccctgatggagcggggagagctggccggggagctggctgacttcgcccgcacctttgaggagctgaccgaggtgttggccgactggccggtctgctacctggacgccttcacctcctcccggtacccccagcggccccgcaccctgctcaacctgctgaccaagcagctcccctcttacggcgccagcctggagaccgccgtctccgacctggcccactatgtctccgacggattccgcaccgtggtactggtgagcagcgagcagcgtgccctcaacctccaggccctcctgcgggagcagaagatgaccaccgccgtggatttccagctccacgagctgcccggctacggcaaggcggtgattgccgtgggggggctcaccgccggcatggagtacccggtggggcgcttcgccgtgctcaccgaggggcagtccctgctgggcaaaaagcgcaggagcaagccggtgaccaaccggcagaagctgggctcctacgccgacctgtctcccggcgacctggtggtacacgagcaccacggcgtgggccgcttcctggagatgaccaagatgacggtggacggggtgcagaaggactacgtcaagatcgcctacgccggggccgacgtgctctacgtccccgccacccagctcgacctggtgagcaagtacatcggctccggggaggacgcccaggagacccgcaagctctccaggctggggggcaccgactgggagaaggccaagacccgggccaagaaggccgtcaaggatctggccaaggggctcattcagctctatgccgagcggcagcgccagcccggcttcgccttctcccccgattccccctggatgaaggagtttgaggacgagttcgagtacgccgaaaccgacgatcagctccgctgcatcgccgagatcaagcaggatatggagcaggcccggcccatggaccggctgctgtgcggcgacgtgggctacggcaagacggaggtggccttccgggccatcatgaagtgtgtgctggacggcaaacaggccgccatcctggtgcccaccaccgtgctggcccggcagcactacctgacggctaagcagcgctttgccaagtacccggtggagatcgacgtggtcagccgcttccgcacccaggcccagatgaaggacaccctgcggcggctggagcaggggggcatcgatctgctcatcggcacccaccggctctttcagaaggacgtgaaatttaaggatttgggcctgctggtcattgacgaggagcagcgcttcggcgtccagcacaaggagaagctcaaggagctgtccaagcaggtggacgtgctcaccctctccgccacccccatcccccggacgctgaatatggccctctccggcatccgggacatgtccaccctggaggagccgcccatggaccgccagccggtgcagacctatgtgctggagcacgactggggggtgctctccgacgccatgcgccgggagctggagcggggcggccaggtgtactacctccacaaccgggtggagaccatcacccgcaccgccgcccgcatcaaggagatgctgggggaggacgcggccgtggcggtggcccacggcaagatgagccaggaggagctcaacgacgtgatgacccgcatgagcgacggcgaggtggacgtgctggtgtgcaccaccatcatcgaaacgggcatcgacatcgccaacgccaacaccctgatcattgaggacgccgaccacatgggcctggcccagctccaccagatccgcggccgggtaggccgctccacgcgcagggcttatgcctacctgacctaccgccggggcaaagtgctcaccgaggtggcctccaagcgcctgggggccatccgggagtttgccgagttcggctccggcttcaaaatcgccatgcgcgacctggagatccggggggcgggcaatgtgctggggccggagcagagcggattcctgctcagcgtgggctacgacatgtacctcaagctgctggaggaggcggtactggaggagcggggcgagaagccggagcgccccaccgagtgcgccgccgatctcagtgtggccgcctccatcccagaccgctatgtgccctcgccggagcagcggatggacctctaccgccgcattgccgccatccgctccgaggcggacgccgacgacgtgatggatgagctcatcgaccgctacggcgatccgccccgcacggtcaacaacctcatctccgttgcccttctccgcgccgatgccgcccggaacgggatctcccagatcgaccagaagggcgccaacctgaatttctatctggaccagttcgatctccagcgggtgagcgccctgtgcggcctggagaagtaccgctcccgcctgctcttctccgccggggagaggccctacctggccctgcggctcaaaaagggggaggacgccctgaaatttggccgcaggctggtggaggactatgcgaagaccgccccggatcagacagagggatagagcgggggtggactccccctgccggcggcagccggcgccgcgtgtgcggcggagctgggcgggattcacttccgcccagcgaa

SEQ ID NO: 4269 - DNA, 831 bp, Unknown
  gut microbiota DNA sequence
ccatgagcgagctgaagaacaagacgatcatcactgtggccactacgggcgcctggcccaccaaggccaacaaccccaatgtgcccatgaccccggaggagatttccgaggacgtgtacgcctgctggaaggccggcgcggccatcgcccacctgcacatgcgggacgacgaggggcacggcaccatggacaaggagaagttccgcaagaccgtggagctgctgcgcgccaaccaccccgactgcgacatcatcctgaacatgaccacctccggcgacatccacgccgacgacaccacccgccagatccacctgaaggagctgcgccccgagatgggttcctatgactgcggctccatgaactggctgcacacctccctgttcctcaacccccctgccttcctggaggagctgggcaagaacatgcaggagtggggcgtcaagccggagatcgaggcctttgacccgggcatgattgccaacgccgcctactacctgaagaagggcgtgctgaaggccccccttcacttccagttctgcatgggctgcgccaacggcatccccggctccctgaagaacctgatctttatgaaggaaaccatggagtccctgtgccccggctccacctggagctgctttggtgtgggccactgcgcgttggagatgctgtacggcgctgtggcgctgggcggccacatccgcgtgggcatggaggacaacgtgatgtacgccaagggcgttctggccgagagcaacgtgcagttcgtggagcgcgcccgccgcgtcatcgaggagtacggcaagcaggtcgccacccccgccgaggcccgcg

SEQ ID NO: 4270 - DNA, 2538 bp, Unknown
  gut microbiota DNA sequence
ttgtgttcaggcgcgtgcaatgccctgctctctggcctcctgtgcgacggcatgggccacggtgtcggccacggacttgtccagggcggagggcaggatgtagtcggcgctgagctgctcgtcggtcaccagggcggccagggctctggccgcgcggattttcatcccctcggtgatctcccgggcccgcacggccagcgcgcccttgaagatgccggggaagaccatgacgttgttgatctggttggggaaatcgctgcgcccggtgcccaccaccgccgcgccgccccgcttcgcctcgtccggcatgatctccggggtggggttggccatggcgaacacgatgccgtccttcatggtggacaccatctccgccgtcaccagattgggccgggacacgcccacgaaggcgtccgccccccgcagggcgtcggccagggcgccgtgctcgtgattccggttggagatgtgggagatctcctcctgtccggcgttgagcccctcatccccctcgcagatgatgccgttgatgtcgcacatgacgatattgccgaagcccatggagatgagcagcttgccgatggcgatgccggcggcgccggccccgttgatgacgatcttcatctgccccatctgtttgccggtcacccgcatggcgttgagcagggcggcggccaccacgatggcggtgccgtgctggtcgtcgtggaacacggggatgtcgcacacctccttcaggcggcgctccacctcgaagcagcggggggcggcgatgtcctccaggttgatgccgccgaagctcttggagatcagggcgatggtctccaccagcttgtccacgtccttggtgtccacacagatggggaaggcgtccaccccgccgaactccttgaagagggcgcacttgccctccatcaccggcataccggcggccgggccgatgtcccccaggcccagcaccgcggagccgtcggtgatcaccgccaccagattgctccggcgggtgagggtaaaggacttctcatagtcctttgcaatttcccggcagggctcggccacgccgggggtatacagaagggacaggtcgtcccgggtctcgatgtgcctgcgggccaccacttcgatcttcccccgcagttcctcgtgcagcttgagggattcctgattgacgtccatagtacgtttttcttcctttctgcggcccgctcagaccatctcttcggggtggaacacctcgtcgaaccgctcggcggtgaggaagcccaggctgacgcaggcctccttgagagagatgtgctcggcgtgggccttcttggcggtcttggccgcgttgtcatagccaatgtaggggttgagggcggtgaccagcatgagggagttgtgcaggttgtggcggcatttctcccggttggccgtgatgcccacggcgcagtggtcgttaaaggagcggatgcagtcggtgagcagccgcgcggactggaggaagttgtagatgcacaccggcatgaacacgttcagctcgaagttgccctgggaggccgccaggcccaccgccacgtcgttggccatcacctgtaccgccaccatggtcaccgcctcgcactgggtggggttgaccttgccgggcatgatggaggagccgggctcgttctccgggatctggatctcccccaggccgcaccgggggccggaggccagccagcgcacgtcgttggcgattttcatcagatccgccgccagggccttgagcgccccgtgggcgaacaccagctcgtccttactggtgagggcgtggaacttgttgggggccgtgacaaagggcttacccgtcagctccgataccgcctcggccacggccgtgtcaaagcccttgggggcgttgagcccggtgcccacggcggtcccgcccagggccagctcccgcaggccgggcagcgccagctccaccatcgccctgtccttctccaggctggtccgccagccgctgatctcctgggccagggtgatgggcaccgcgtcctgcaggtgggtgcgcccgctcttcaccacgtccccgttctccccctccagccgtcggaaggtctccaccagcccgtcaatggccggcagcagcttgtcctccagcgccaccgccgccgcaatgtgcatggccgtggggaaggtgtcgttggagctctgggacatgttcacgtggtcgttggggtggagcagcttcttccccgccagctcgttgccccggttggccaccacctcgttcacgttcatgttggactgggtgccgctgcccgtctgccacaccaccagcgggaagtgcccgtccagcttccccgccaccacctcgtcgcaggcccggctgatcaggcccagcctttcatcgtccagcttccccagcctgtggttggccagcgccgccgccttcttcagaattccgaaggcccgcacaatctcctccggcatcttctccgtgccgatctggaagttctgatagctccgctgggtctgcgcgccccagtagcggtccgcaggaacctccatctc

SEQ ID NO: 4271 - DNA, 33181 bp, Unknown
  gut microbiota DNA sequence
gcgccgcaagatagccctccggaagcggaaccacggaaatgtaggggcggcccctgtatgcgggagacggcggggcgctactccagagggaggatcaccctgcggtagatacgccgcaggaagatcacacagagggccagagaagccagctccgcgataggaaaggcccaccagacggcggtgacgctgccgctgagggacaggaagaatgccgcgggcaggaggatcaggagctgacggacaatagagatcatcatgctcagcaggccattgcccagggcctggaaggtggaggagcagatgatgctgaagcccgcaaagacaaaacacaggctgatgatgcgcagggcgggcacaccgatggccagcatgtcggcggacgcctcaaacaagccgagaatatccgccgggaagagctgaatgaccaccaggcccaccagcatgatggccacggccaggagggcgctgaatttcaccgtgtccaccaggcgtttacgcttacgggcgccgtagttgtaggagacgatgggcaccatgccgttgttgaggccgaacaccggcatgaacacgaagctctggagcttgaaatacacgttgaacacggccacggcggtggacgagaaggcgaacaggatctggttcataccgaaggtcatcaccgagccgatggagttgagaatgatggacggcgcgcccacggagtagatgtttcggatcaccgggccgttggggcggaagccccggagggttgggtggatatcgtggttgcaggtgaggttgaacagcaccgccaggacggccgccacgatctggcccaggacggtggctgcggcagcccccgccacctccatgcgggggaaggggcccaggccgaagatgagcaccgggtccatgatgatgttgatgatggccccggtgccctgggtgagcatggtgtagaaggtgcgcccggtggcctggagcagccgttcgaacataatttccaggaacagcccgaaggacaggccgccgcagatgcgcatataggcggtgccggaggagacgatatcggggatatcggtctgtacagcgatgaaggggtgggccagggtgagcccggccaccgtaaagaccagcgtggagagcaccgccaaaaacacgccgttttccgccgcgcggttggcggcatcatagttcttctcccccaggctgcgggagaggaaggcgttcacacctacgccggtgcccacgcccacggcgatcatcaaattctgaaaagggaacaccatgcccactgccgtcagggcgttctcgctgagcttggccacgaaatagctgtccaccacgttgtagagcgcctgcaccagcatggcgatcatcataggcagagacatggagagcaccagccgccggaccggcatggtgcccattttgttttcccgcagttcttctgacataaccgacctccaaacaccaaaacagggccgcagcaaactgctgcggccaaataaaagtgattggttttattttactggaattgcggcggttcgtcaatccttttgtggaatcagggcgttttttcaaacaaggagggacggcccaggtcggtaaagcccgcggccttggcgtcgggggagcacaccacgccccccagggagtaggagcagtggagcaccagaagccctccgtcctctccccggccggccacgatccccacatgggacaggtcgggatagaaggccagatcgccggggagggcgtcggcccagtccaccggggcgcacagggcccgctgggcccgcacgccgttgcccacggcggcaaaggcggcggggtctccggcggcgttgacggcgcaccaggatacgaagccggagcagtccagcccgaaaggcaggctctccccgctggtgctgctgcccggggcggtgaccaccgccgggacgccccagcgcgcgtcccaccccaccgcgtccgacttgccgccccagaagtagcccacccgccccaccagggcggccccgctctccacaaaggcccggcgcaggggggacagctccgccggaagggcggcggcgatgcgctcccccacctcgccctggggcagcggcgtggggacggatgggaccggagtacggaggagcagccccgccagcaccccggtcagcaacagaaggacggccaggtggggccggatggagccgctacccctccccatgctccagccactccagcagggcctccagattgcgcacggtgccctcgtttaaatagtgctccacctgctccaccagctccagctcgtccgtggagccgttgagcatacagaaaaagcggtggagcacctcgtgccggtggagcagccagcgccccaccgaccaccccttctccgtgggctggatcaggccgtacttttcaaaggccaccagccccagcgcgcggagctgatacaccatcttggaggccgaagaaggacgcacgttgagcccctccgccagcaggccgatgcgcgcacagccgtccgcctccgcctggcggcagatcatctccaaataatcctccatcgcccccgtaagggcgtgttgactgcgcatctgatagcccttctgggtgtaaaaatccggttttccctcctgggacatgcacacacgcctcccgtcctccggcaccctttcggggccgcggcaataggatagagcacggaaacaaagtttcctcaagctaatgtatgtaaggagaccggcgatatgaatccatcttctttgaacagcctccgcgtgggccagagcgcccgcgtcagccatattgaggccgagcccgccatgcgccgccgcctgctggacatcggcctgatccccggcacccgggtgacctgtacggcggtgagtcccgccggcgatccggcggcctacctgatccgcggcgccgtcatcgccctgcggggccgtgacgccgggggcgtgtacctgggggacgccctatgggactgaccagcacctccaccggcgccggggcggcggacaccgccctggtgctccggcgtgagcggcccgacgaccgcatcgtggccctggcgggcaatcccaacgtgggcaagtccaccgtgttcaacgcccttaccggcctgcgccagcacaccggcaactggccgggcaagacagtgaccagcgcccagggccgctgtgagcggggcggccggggctatgtgctggtggacctccccggcacctactccctcatggcccactccgccgaggaggaggtggccagggacttcctttgcttcggcggcgcggacggggcggtggtggtgtgcgacgccacctgcctggagcgcaacctgaatctggtactccagaccctggagctccagccccgcaccgtggtgtgcgtcaacctcctggacgaggcggagcgcaagggtgtgcgggtggagctggaggggctgtcccgccgtctgggggtgcccgtggtgggcgccgccgccggccggggggaagggctggaggcgctgatggcggcggtagagggggtgatctccgccccggagccgcctacccctgttccggtgcgctacccgcccccggtggagtttgccgtggcctcccttcggcccctgctggagccccgcctgaggggccgcctccccgcccgctggacggccctgcgcctgctggagggggacggggcctttctggaccggctttccgccgctctggagtgggacccccgggcggacgccgccctgtggggggcggtcgaggaggcccgcgccgatctggagcggcagggcctgggtggcggcgcctggtgcgagcgggtggtgtccgctctggtggagaccgccgaggccatcggcgcggcctccgtcacccagctccggtccgccgccgggcggcgggagcagcggctggaccggctgcttacctcccgcgccaccggcatccccctgatgctgctccttctggccggggtgctgtggctcaccatcaccggggccaactacccctcccagctcctgtccgacggcctgttctgggtgcaggaccggctgagcgacctgtttgcctacttaaacgccccggcgtggctccacggcgccctggttctgggtgtctaccgggtgctggcctgggtggtgagcgtcatgctgccccccatggccatcttctttcccctgttcaccctgctggaggacttcggctacctcccccgggtggccttcgtcctggatcacgcctttcagcgggccaaggcctgcggcaagcaggccctgaccatgtgcatgggctttggctgcaatgccgccggggtggtgggctgccggatcatcgactccccccgggagcggctcatcgccattctgaccaacaacttcgtgccctgcaacgggcgattcccgccaccggagaaggggcaaatcgccccgcccggccagcagggcctccagggcctcccgccgggcggcggcgtcggccgggacggccaggcggatttcaacgtgtctcgggtgattgctgcgcatatgcctcgcctcctgttccacaaggctatgctcctgagtggaaaaaaagagcggcgcgggcagcgcccgcgccgttaaacggttattttttcctggcggattgcttcaggttctcgtgatcctccagcagagcctgggaggccaggtcgaaggcggcggcgtcctcgtaggcgttgaccagctcgctctcctgcagatcgctgtagtcgtgctctttgccgcggtagaccagcttgagcaggaccggggtgaggatggtggtggcgatgaccatcagcaccaccgggccgaagaactcctccttcatcagtccggcggcaatgccgttgttggccacgatcagggccacctcgccgcgggagatcatgcccacgccgatgcgcagggcgtcctggttggagtagcggcacagcttggcgcccagtccgcaccccaccaccttggacaccacggcccagagcaccagcagcacggcgaaaagcaggatggtggtgctcatctcaggcaggaccaccttcaggccgatgctggcgaagaagatgggggacagcagggaataggacagggtatcgaagcggtcctggaggtaggccacccggcaggtgttggcgaagatcaggcccgcgatataggcgccggtgatatcagccacgccgaagaccgcctcggcaaagaaggagtagagcaggcagaaggcgaaggagagtaccacaaagcggcgcttgtcccggctgtaccggcggaaccaccagtccacgaaccggtgcatgaccatccataccaccacgctgacggcgaagaaggcggcgatcttccccagcaccacccacacgttggcgccaccaccgcccaggctggtgatgacggtcaggccgatgatgcccaacacatcgtcgatgatggccgcgcccagaatggcactgcccgagcgggtggagagccgtccgatctccttcagggtttccaccgtgatactcaccgaggtggcggtgagcaccacaccgataaacacattctggagaaaggcatccggcccccggttaaaggcggcagccagggcaaagcctcccgccagagggaccagcacgccgatgagggcgatgacaaaggccgcctttcccgaccgcttgagctcgcccagatcggtctccagtccggcgttgaacatgagtacgatgacgcccagctcggccagttggtccatcagggttgtctcttgcagcactcccagcatggccggccccaacagcaggcccgccagcagcgcacccactacctgaggcagggcaaaccgcttggtgaggatgcccagcaccttggtgctcaagagaatgaccgcgatttcaaagagaaaatgataatccatgaacattacccctccctgggtgtggaatcaccggggcgcgaaaaagggagaccgcccgtgcggtcccccgtcgcgctctcaagactcaagacaccggctccccggccgaaaacttctccgccgcccggcggaattcgccctccagcaggcggtcaagccggcccacgatctcctccggctcctccctcatatcgtcggagagccagcccatcatcatgccggcaatggcgtacatgtagaaatcagcgaggaaatccagctcccgctccggcaggggcaggtcccgtgcactctccgccaaagtggaggcggtgatggcacgggccaggctgaaaaagtggcagtccaggtggtcccgtccgctggagcggtatacgtgatagatggccagatggttgtcctgcacatagcggaaggcggcccgcagggcgtcctgccagcaatccgccccccgcagcgcctctgaagtctcatgctccagaaaccagcgcagcaggtcgtagatgtcctgaaagtggtagtagaaggtctggcggttgacctcgcactcctctaccagctctttgacggtgatatcatccaaaaatttcttttgcagcagcttcttcaatgcgttcgccaaggccagcttggtgctcggggccaatcgcctcacctcccaccgggattccatagaagcctactaggtcacattatagcacagggaggatgggaattgcaatcctatccaaagtatgctatgatgggccgagcaacaaaaaggagagaccgttatgatcattgattatcagccccggggcgtctgttcccgccgtatgacgctggaggtggaggagggcgtgatccgctccatccgcatccagggcgggtgcgacggtaacctgcagggcatctcccgcctagtggaagggatggaggtgtccgaggccatccgccgcctggacggcattcgctgcggcgggaagcccacttcctgcccggatcagttggcccaggcgctgaagcagtacaagggggagtaagagacaccgggacgcatggcgtcccggtgtctctgcgtctgggggagccggtgaagctaggcaatctcctggtacgtcagctctgccgggttcagggagagcgtctggccatcgtagcgtaccgcccctgtgagctctccgatatcattgaggcccctgtcatcggtcacgcccaggaagatccggagcccgtctccctctgttccgaaatatacctgactgcccacataccggccagcaggcaggcccagctccgccgcggccacatcgtcggcatccagcatcccgcccagagtaagggcccggccgtcctgttcaaaaacgtacagagaccagacattcaccccggtgccagtgcccgtacagagcatcgccgccagctcgtcggccccgtccccgtcgtagtcccccagggcaagctgggcgggtacggcctggggcccggtgtcatagctcaggctggggaagcaggccagcacgccgtcccacgccaccagcagaccgtccaggccggtggccttcgggttgaggccatagagggcgatcccgttttccggcagctccccaagcaggcggacggcgtcggtctgccagccgctggcgtccgctggcagagccaatcgctcccaggtctccccccggtccccgctgtatagcaccgcattggagaggctgttggagctgtagccggtgagcagcatcaggacatccgagccgctggcgcacatggaggacagctcccactctcccgccagggggagggtgatctcctcccaggtgaggccgccgtcagtggtgcggaagatgggcgcgtcgttgaaatagctctgacccaggaagccagtgtagctgtcgatgaaataggtgtaggaggggtaccacatcatccgggccgggtcgggccgcccagtctcctgccaggtgcgccccccgtcgcgggtgcggtagacgtaggtatccgcgccccctacgccgtggccgatggcgaacacgaaccagccgttgaggccgtcgctcatgccgccggtgccgctcagaagaccctccaggctctccgcctcgtcccggcccgccaagtcctgtccggcccactcggcgggcacggggaccagggtgtccagctccgtccactccgtatcgccggggtagcggatgcgcaggccctcgtcatcccactccggccgtggggtataggcgtagagcgtgaaagcgcggctctcggttgtgccgtcggcccaggtgtaggtcagggtataatgctgggtctggtcggaggaagcgcccggggcgcgaccgcccaaatattccaggcggacaccgatggagccgcccccgccgctggacaggctctcgcccccctgacccgtggagccgccgtccgctccctgtcccgccagggcataggagaccacgttgtccgggatggtgatatgcagaaaagagcccatagccgccgtggcggaggcgtccccgtctaggtcgacacgggtatcccccgccaccaccaccggctcggtgagggggccagggggcaccgaaggcagattgaggcggaatgcgtactccagctcgtgggtgcggattccctcctgccaggtgcaggagaggacgtacagccgggtctccatgcccgcgcccggggcatcctcccggctctccagccggagcagccagccattgcccgccccatagggggaaagtcctacctcccgggcccggacagcctgtccgttctccaccaggtattccgtcatcgtccaccggctgggaaatgccccattgtccagatagaggctcacccacggtctgggcgtggaggcggtgcgctctgcctccggcagctcctccggccaggttgccgcttccggcacgcccatgttgaccaccgtctcaccccctgcgccgccggggccatcctgctccatctgtatccgcagggtgggatactggccgttcacagtgggatcggggaagggtgggtcattgagcagcagcagccccagcgcgaccgccagcacaaacagcaccgccgccatccagggggcggcgggcttccacttcagggcccgccgtatgcggtctttcacccccgtctccccgaagccggggggcagcaggggcccccggttgggcgaggccagggccagcagggcggcggagtactcccgcgggctgccgcaggcgctgccgagcaccttctcatcgcacgccacctccagatcccggcccagcaatacccaggacagccacagcatgggattgaaccagtgcagccctgccaggagaaagtacacggccttataccggtggtgccccagcttgatgtgggcccgctcgtggagcagtacccaccgcagggtttccccctccaccccggcgggaacgtacacacggggggtaaagaacccgaacacgaaggcggtggggatgcggtcgctctcccaccaccagcccatctgcgcagagccccgccaaacggcggtggccagccgccgccgcagccgcagccaggcgagggccatgtacccccacaccgccagcaccccggccagccagagccacgccagcacgtccagcaccgagagcccctccgcggccggggccgcctcctccggggcgggaaccgcctccgggagggcgaagctgggagcgggctccgccgggggcgcggggttgggcgccgcaggcaggagtacgatctcctccgtccgggccagggcctccgtctgctcctgtaccgctggagtgagccagcccagcacggaaaaggggccggtgaccagtcccacggggaggagcatgcggacggccaccaccagccacaggagctcgcaggccagggcgggcaggcggagccgccggaacagccaccgcaggggcagggcgatgagcaccaccccggcggccatcaggctcatctgaagcaccgtcagaaacagctcagtcatggcccccctcgctttcgtcgagcatccgccgcagctcgtcggcctcctgtggagagagtttcttctcccgcagaaaggcggccacgaaggcgggcagggaaccgccgaagccccgttccaccaccgccgcgctctcgtactggcgcacctgctcccgcttcaccagcgcggtgacggtggcgtgctcgtttttcaggaacccccgcccggccagcttgcggatgaggttgaacaccgtggactttttccaccccagctccgcctcgcaccggcgggccagggcggtggagttcaccggctccaggctccacaccagctccatcagccggtactccgcgtcaaacagcttatactcctccattgcatgcacctcctcacgtttggtttgttgaaagaaaccttttctcaaggctagtttatccgaacaaacctcctttgtcaagggggatatttccactcctgccgcgtacacatagggcgaaagggggcgtggcggatgcgctttgccatctacagccgcaagtcggtgctcaccggccggggggagtccatcgaaaaccaggtggagctgtgccggagctatctggcggcccactatcccggcgtaaggccggaggaggtggcggtctacgaggacgagggcttctcaggaaaggatttccagcgtccccagttccgccggatgctggaggacatccgccgggcgcggccggaggccctggtgtgctaccggctggaccgggtgagccgcagcgtgggcgactttgccgacctcatccggcggctggaggggtggggggtggccttcctctgcatccgggagaagttcgacacctccacccccatgggcaaggccatgatgtacattgccagcgtcttcgcccaactggagcgggagaccatcgcccagcgggtgcgggacaacatgtgcctgctggcccggacggggcggtggctggggggtaccacccccaccggcttccgggcggagcggacggcggaggtgatcgtggacggccgcgcccgcaccgcctgccggctggtccccgaccccgcggagtggggccgcgccgcggccatcttccggctgtttctggcccggcagagcctcagcggcctgtcccgcgccttggcggaggagggcatcaccgcccgcaccgggcggcccttctccctgcccggcctgcgggagctgctgcaaaatccggtgtactgcgccgccgacggcgacgcctgggactattttgccgccctgggggccgacctctgctttccccgggcggactgcgacggccgccggggcctgctggcctaccagaagcgggactactccggcggccgcgccccccgtaacccggtggaccgctggatcatcgccctggggcggcaccccgccctggtgtccggcgcgacgtggagggccgttcaggagctgctcaccccggaccgggccccggtggtgcacaaccggcgggccctgctgtccggcctgctgttctgcacccggtgcggggagaagctgcttcccaaggcccgaaagggcggttcttacgactacatctgccgggccaagctgcgccggggcgcggcggcctgttcctgccccaacctgtccggcgcggcggccgatcaggcggcgctggacgccctctccgcccagtttccccgcctggccccccggctggaggagctggcccgggaggaacagcgcgccgcgtgccgcatcctcctccagcgggccgactgggacggggcggacctggccttcaccctttgccgcctctgagtgtttgcccttcccccggtggcccattcccgaccctcattgcaatcatcaccatgttctttgtgggcacatccggcggccccggccgcggactgctggccgccctgctcctcaccggggtgatcctgctgggggtattcctcaccttcggggtttcccgcctcttgtcaggcacccttctccgcggcgtgccctcctccttcaccctggagctgcccccctaccggcggccccggatcgggcaggtggtggtgcgctcggtactggaccgcaccctctttgtcctgggccgggcggcggcggtggccgccccggcgggcctgctgatctggctgtgcgccaacgtgcaggtggggggcgacagcatcctcaactggtgcaccggcttcctcgaccccttcgcccgcctgctgggcctggatggggtgatcctcatggccttcctgctgggcttcccggccaacgagatcgtgattcccatcatcatcatggcctacctctccaccgggagcctgctggagttcgacagcctggacgccctgcggcagctcctggtggaccatggctggacctggctgacggcggtgtgcaccatgctcttttccctgatgcactggccctgctccaccacctgcctgaccatcggcaaggagacgaaaagcgccaagtggaccctgctctccatcgccatccccaccggcatcggcatggcggtctgcttcctggtggcctccgccgcccgcctgctgggcctggcatgagggttaaggaaattttaactgtacaccggtggaaaagggtgctatcctataaaagatgcttgaccttccacttcgtggaaggtgtatggttctcttggaaccaagcaaaaaggaggaattggacatgaaacgaatcggttccctgctcaccgccggggccctggccctctccctggtcacgctgcccgccggcgcggcggaggccgcaccggcgctggaggagaccgcccaggccgccgcccaggccgccctgacggccggcggggcccagagcatccagtacgccctgtggcaggatggggagatcatcctcaccggccacgcgggaaattattcccgcacggagaaccgcgccctcaccgatgacattctgtacggcgttggctcggtgagcaagacctacaccgccgccgccgtcctcaagctggtagacgaggggaaggtggagctggacgccccggtgaccgcctacctgccggacttcaccatggccgacgggcgctatacggatatcaccgtgcgcatgctcctcaaccactcgtcgggcctgcccggctccaccatcgccaacggcttcctgctcaacgacccggacaccctggcggccgacaccctgctggaggagctgtccagccagaccctcaaggccgatcccggcgcgttcagcgtctactgcaacgacggcttcaccctggccgagctggtggtggaggcggtcagcggtatggactttgacgactacgtgcgccaggccattctggagcccgccgggctggaggacacctggttccccggcgaggacttcgaccagagcctgctggccaaaacctactacggggcagacgagacccgcgccctccccgccgagaccgtgggcgtccacggcaccggcggcatctacgccaccgcctccgatctggccgccttcggcggagcggtgttctgtgaggacgggattctcagcgcggacgccattgccgcttccatggccgacgagtacgcccggggcatttggccggaggacaccgaggatgtggtttcctacggcctgggctgggacagcgtccactggtacccctttgcctacagcggcattcaggccgtgaccaaggggggcgacaccatcctctaccacgccgggctggtggtcatccccgagtataatatggccgcggcggtgctctcctccggcggcgtcagcacctacaacgagatggcggccagccagatgctcattgccgccctggccgagcagggggttacggtggatcagacgccccacacccttcccgccgccgagcgggcggagatgcccgccgagctgatggactacgccgggctgtacggcgactccacctcggcggttatgctcaccgtgaccgccgacggcgtcctctccaccggcaacgcgcccctgtactactacagcgacggctccttccgggacgagaaccagatggtgatgctcaaattcgtggaggaggacaacggccaaacctacctctggcagaaggcctattcctccatccccggcctgggggagcagcccagctcgtcttacatctacatgaagctccccgacaacccggtgtccccggaggctcagtccgcctgggacgcccgcagcggcaagctctacctggccctgaacatgaagtacagcaacatccagtaccccctggccctgccggtcgccgccgtggccaccgacccggcgaacatgcccggctatatggtctttgaccgcatcgtggacgccgactgcgccgagggcgtggcccagatccccgggctctacggccgggactggcagaatatcaccatgacggagcgaaacggtgtggagtacctctccacctgcggcgggctctatatggatgccgccgcagccgagcccctcttcagcggtgcctcctcttggtccaccattcaggccgacggctatgcccgctggtatcaggtgggttccgccgccgcgggcaagaccatgaccgtccaggtgccggagcacggcggcttcgccgtctatgacgctgccggcctgcccgtggccgcttcctgggcctggggcgacacctccgccgtcctgccggagggcggctgggtggtcttttccggcactcccggcgcccggttcgtgctgagcctgaccgctgacgaagaaaagtaaaaatttctctttacaaacggcgcaaagattgctataataatctggcacgttgatgatcacgtgtcagacgcgcccgtagcgcaattggatagagcgtcagattccggttctgaaggctgggggttcgagtcccttcgggcgtaccaaaagaaaatgcgacttgtttcgacaagtcgcattttcttttgggtttcgctcccgttggtcgctccacccttcggtgattgaaatgctcgggcgaagtgaattcgccctgcgccaaggttttgcctgtggcaaaacgcttgtacggcgcaaaggcgccgccgaccaaacggtcgattggatacttctcaagtaaaatcgcaaacaacctgagaggatttggattgctaccccttgccataaaaataaccacaccgaaaggtgtggttatttttatggataccgtgaggacttcacatgcccggcggaagtgaattccgcctgcaccaaggttttggccttcggccaaaacacttgcacggcgcaaaagcgccgcgggccagaaggccgcttcagcgaaatgctgtatctttttcgtatgcatatgccaaaaagcaggctctccgctgccgcggaaagcctgctttttgtatagactgggtgccgcatacggccaatcgggcttcgtgcgagtgctcgccctctagagaagggactccttgctcggacttcgggcgtacccacctgaatgctcctactcgctctgaagaaccggagcattttcgtccgcagtttttattggtatcccctctgcctgcgggaatgggatggcacccagccgtccattgctaccgcactaggacaatattctttgcaataccgggcaattttttgctctagcatgatgtcagatcgcctgtggccggattatcgatgcattttcccttcttcgtaaagcgggagccatggcatgggcagtcccaggtgtgctcctgggaattccatttcagcgcgcagcccatatggggacatcgcttggttgtgggggccagcaagccgacggccgcctcaaatccattgacgaccagttgagggcggaggactgtgcgggaaggcgaaaacacctctgcgaaagggttggtcttcccctgcacaaggtcactcaatagcatggcggataccatagaagatgtcattccccatttgttaaacccggtagctacatataagtttgatgtggaggaggaataagggccgatataggggacgccgtccaaactcatgcagtcctgagtagcccactggtacttctctgtagcacccggataataccgccgggcaaactccctcagctctctccatgctccgccccgctttcccgtgcgatgcccgccgccgcccaccagcagcaaatcccgtgcgtttcggaatgacatcccctcctgcgcctcatccacatacataccgtccacatccggggcgttttccagggcaatgacgtaggagcggtgctgatacagctttagaaaatagctgccgtgtttgttgaggaacgggaagtgtgtggccacgatcaccgcctttgccgccactttaccgctgtccgtcacggctgtcgtgccaatcagctcccgcaccggcgtgtgctcatagatgtgcaggccctttgcaaggcagcagacgaacttcaggggatgaaactgggcctggttgtgcaccctgacagcgccagccacaggaaagggaagtggaagatgctccacaaagtccccgtggaagcccagcctttccatggccgacagctcctgttccagctttctttgctcttccaacgcatagacataggcatctttttcctcaaaatcacagtccataccagaacacagctcccggtatttttgcagagccgccttctgggcgcagaggtactgtcccgcccggccgatgccgaatctgcgcagcagcttgtcatagataaggccatgctgaatggtaattttagcggtggtattctttgtgataccgccgcacaccgtttccgcttccgtcagaacatagggtactccggcgccgtgcagcagataggcgcacaggatgcccgccataccgcccccgataatgaggacatcggtggaaatatccccctttaggggggcaaaatccctgtgctctccggtctgttcccacactgatttcatatgctttcctccccaattcatgtcttggggatagtgttttgcagccttggttttttcatacctgatttagagaacaagctgatgcgtgtatccacaggctcagaaaaatgtatacaacagaagcagacggacggcggcctgttttttacaagccgccgcccgaaatcagagcgctgcacagagccgcgctctactgattgatgatttccgctttgcaggtggagacaaaagcagggtcgctgctgttgggccctaccacaaccaccatcccaaattcattgcgtataatacttccattggccacggtctgccctccggcattgatggcgacgccggttgtgcccaccggcaaataggaccggatggcagcctcacagtcggcatcgcatcccgtgggaggtggaaccggtacgggcagataggtgatggcattgttataggaggcactggtaatgcgcaccgaggcaatacgacagatggagacagcctcctgaggcaccccctggctgttgactagctggagcagtccggcattcggcccggcagggagcagcgaaccgaggcgaccactgctgttatttccgctatccatagcgactaccgcattatcactcggatagagctggatgagctgctggagcacattccgcatctgttgaacacaggcgcagcccaccgcagcggcagttggaccagtggggccggtaggaccagccggcccggttgctccaacaggccccgtacttcctggcgctccgtctctgccctgcggccccgtcggtccggagagaccctgcggcccggtagggccggtctcacccgctgtcccagctgggcctgtagcccccatgggtccggccgggcccgtcggcccggtggctccaacgggccccgcactccctggcgctccgtctctgccctgcggccccgtcggtcccacagcaccagtagggcccggactacccggaatgccttgcgggcccgtcgggcctggcggccctaccggccctggtacagggcagcagaccggacaacacaccgttctttgcacctgctcatcaaaatggccgttcggccgataaatattcataacaactggcacgacccctttatagcatagttgggcactcgcccatatcagcatatgcagcggcaccgcgcccggacataggtactcaacaggcaaaacaaaattctgaaagtatcaggcgtgaaaagcacagcggtccatagcctgcacacaggcctggatggcggctgaatccggcatggcaggaatggcgcccttggcggttgttgtcaggccgcccgcagcattggcgacacgggtggcggatacccactcctccagggtgagcgcctccagtgcggtccggccccggcctgggatctgcgcaagcagggcgccccaaaaggcgtctcctgcccctgtggtatccacggcgtttacgggaaaggcgggcagagccccctcccctgacggtgtgcggaaatacgccccctccttgccccgggtaataaagaccgcagacggtcccatagcctgaagcttttcggccccaccaggcagggtgctctctccggtaagcagacacatctcctcttcgctcaccttcagtatatccgttagctccagggcggcacagagcgcgcggcgcgcagcttccacactaggccaaaggaaaggacggtagttgggatcatagctgataagagcccccgcctccctggccctccgtgcggcccacagggtggttccgcggcaaggctccttggtgagggagacggagccaaagtggaatatccggcacccctccaacagggtgtcatccacctcctccggccggagcatcacatccgcccctggatctcgatagaaggagaaggagcggtcgccgtactcatccaattggacaaaggcaagggtcgtgggcacccggtcatcccgtcgcagggcggagcagtcaataccggctttctccatgtgctcctgaagaaagcggccaaaggcatcccggcccaccttgcccacaaaggcggtgcttctgcccagcttggatgccatagccagtacgttggccggcgcaccgcccgggttctggctgaacagaggcattcccatctcattgatgccggcgggcgtaaagtcgatcaaactctcgcccagtgctactatgtcatacatgtattcacctcatatcagcgcggcgggcggctcctgccgcccgccctgccccttggtcattcttcacaaggagctacatcgatcaggatcttcatggtggcctcccggttggcatcgatgtattgataggctttctgatagtccccgaaggcaaagtgccggctcatcaggggcttgagctggattttcccctcactgaccagacggatggcgtccacatagtcctcatgccggtacatcatggtgctgtccagatccagctcgtggtcattaagcagggccagatccacatgggccattcctgcgtatactgcgaccagaaccagcttgctgcccttgcgggcatactggatagcctgtcccatggtggtatcgttgcctgcgcagtcgtaaataacatccgccttgtccggaccgaagcactctaccatgactttaccaaaattacgtgtccgagtgttcactgcgaagtccgccccacagctccgggccagctccagccgggcgtcggagatatcggtaatgagcacctgggccgcccccagagccttgcagctctgggccagcagaataccgatggggccggaacccaaaatggccactttggcgcccgccagctccggaaagcgtttagctgcatgaacggccacagccagcggctcaatcatagccccttcattaaaactcattgtgtcgggaagcggagtaatcttagccgcatccaccgcaaaaaattcgctggcggtaccagtggtctggaaccccatcaccttgagttcctcgcagagattgtattttccatggcggcaggggtagcacctgccgcataccacctgtggctcgatggtgacacgctgtcccacccggaggctggtgactccctttccaagcgcggcaatctcccccgacacctcgtggccttgggtgacgggatatttcgtaaacgggtgttcaccgtgatagacatggatatccgagccgcacacgccgatgcgcatgattttgaccagtacctcaccggcctttggctcagggattggaacctcccggaattcaatgacccccggggctgtcataacctgctgcagcatgccttttcctcctcaactcttttcacagtaccaccgggggccgccagcactgatgagtatgatgttgctgttggcggtaaagtccccggtacggatggcaaattttacttggcgtgtcagttcgtcccgaaagtagggatggccgaccacctggcagggcagctcaggtggaaaacatgccttgaactcccgctcgcggctgggactcacatccagggtggcctggctcagaatgataccctccacactgaagtgcttgagcagctccttgagcacatctaccgctgtggggacgttttccgccagcgagaggtcgattaccctggtgctgtccgggatagccagaccggcgtcagcgatcagcagccggtcggtgtgtcccatccgggccagttcggccgcaatatcccggttcaggatgccagtctccgtcataataccaccctccccctatttgcggtcgtagcagctcatgagcagctcatacatctctggaatggtggcgacacggggattgttggcatagtcgcccagtacctggccgcagtctgcaatctcccggatatcctctttggtcacgttcagctcccggaagttgatccaaaggccgatcctcttaaggaagcagtcaatggcatcgcagcttctctccgcggccacagcatcgctctcccgctccagggagggctcaaagatccggcctaccgtggcgaacttgtgctcagcggcgggataggtataccgggtaaaagcgggatagaagactgccagagactggccgtgggtgacatggggacagtggccgccgatctgcatgcccaggccgtggggcaaagtgacaccggcggatgcgttggtgagaccgcccaaggtgtcggcccaggccatctggctgcgggcctccaggtcggagccgtcggccagcgccctggggaggtatgcggcgataatacggatggcatccagggccatgcactccaccagcgggttggtgttgacggagagatatgcctcaaaattatggcagaaggcatcaaaaccggtctgcgcagttacgctggcgggcagggaaagggtaacctcgggatctacaatggctgcgcgggggaaaatattcttgttccagatagcgcttttgtccttggcgctggtcttggtaatgacggcacatggggtggtctggctgccggtgccggcggtcgtgctgatggccagaatgggcagcgtttgctccgttgggcctgcggtgtggcagttgtaatcccaggcggtaccgggatgggtggcctccacagcgatggccttggcggtatccatggaggagccgccgcccaaaccgatcaccacatccaccccctcggcctttgccagctccgctcctctggtgaccagttcagtggttgggtttgggatcacgccgtcatagtgcacacaggccacacctgcgtcagacaggctttttttgaccttggcgtacagttctgccaccgcagggaactcggggacggtcaccagcatggcctttttcccatagcgggcagcaagggcccccgcctcggtgacgcggccggcgccgaagatgatctcggtgggggcaaaataatcaaagtgcttcatttcattcactccttttgattttgtttccagagaattgggctccggcacaagcaggctgggtgctgggcagtaaatgccggagggggtacacttcgtttccacaaaaagggcccgcaggagcagggcgtgtggctctgtcctgcgggcatggtatcagagggctgcccttttatttggggtagtactcgtccacgttctccttggtcacgatggtaacgccggtgtccacgttctggggcagcgccttggcggacaggccgttggcctcggtatagaggaacatcatgctccagaagcccatgttatacatcccctgggcaacagtggcgtcaatctcaccgtttttcactttgtccagcacggtggtgtccacgtcgaaagccagcacacgcagatctttgccggactcagccacggcggtagggccagcggtaccggcgataccgtccacgcagaacaggcctaccaggtcatcgttggcctgcagggccgccgacatgttgtcggtggcagcggtggtgtctccggcgtcgttaaccttcacgatctcgatgccaggggcgttttcggcgcaccaggcctcaaagccctgaacacggctttcgctgttctcggcgcccacggtatagaggacggcaatcttaccctcccctccgcacaggggtaccaggtactcagcggcaatgcggccggcttcggaattgccggtggacaggtaggaggagcggtcggaggtgggagagtcggagtcaaagcacaccacagagatcccctgctccttggcagagttgatggtatccgccagggcggtggagttcacgcaggtgactgcgatgcccttgggactctgggcaatgacctgctccagaacagccacctgaccggccacatcagagtcggtttggccggtatacttggtagtaacacccaaggcgtttccagcatcctccatgccctcaaagcagtgcttccagtaatcgatgccggacaggaaactgaccatgtagtactcgtcgctttcgttgccgacgaacgctccggccgcagcctgcgtgccgtcccctccagcgttgggggagtcttcgggtgcttcggccggggagcagccgaacagggacagggagagcgccagtgcaagaataagtgccagtgcctttttcattgtgggttcctccttttatttttcttggcggtattgcctgcgcccgcgccgggcgccggatcacggattacggccgcagggcaggtttcctgcgccccaggcccagcatgcgctggaggaagctgttgccgctttttcggtggctcatatagtcgatggtaacggcgatgaccaggatagcgccctggacgaaatcctgccagtagacggacacattcatcataaccagggcagagtccacaatcttcagcaggaaaatgccgagaaatgtgcccaggataccgcccaggccgccggtcatggaggtgccgccgatgaccgcggcagagatagcggtggtttccgcgcccttggacagctcaggggtggcaacattgaagcgtgcgagagaaaggataccggccagtgctgagagcaaggcgatgaccacatagacgaagatcttgacccggtctacattgataccggagagcttggcggcattttcattgctgcccacatagtagatgttacggcaggcattggacttcttggtaaagataagggccaccacggtgaccagcaggaagatcaggaacagcacggggatgccgaatacatcgccggtggccagaaagcggaagctgtccggcagatagccggacaccgacaggggggagcctgtggtgataatgtaggccacaccgcgggagaggttcatcatggacagggtgacgatgaaaggcggcagtcccaccttgctgaccataaagccgttgaacagtccgcatacggctcccgcagccagagcagccaggcaggccacccagatgttgacccccatcaaagccatctggccggcaatgacgcacgtcatggcggccacgccgcccacgctcagttcaatgcctcccagaatcagagccagggtcagtccgatggagagcaggccgtcggtggccacactcagggcgatgctcttcatgttggagggctggatgaactttggattgacgatggccacgatggccaccacaagcaaaataatgagaaatacgctcatctcgcgctgccggagcaaccgcttcaaaagctccggtcccgtccgctttatctcgctcttctgtttcattgccgcaactccttttccgcaagctgctcgccggaggcaagcttcatgatattctcttccgtcacctcttcgccttcgaggaagcccgccaagcacccttcgtgcatgactgccacccggtcggacacgccgatgacctcaggcagctcactggataccacaatcacaccgacgccgctctctgccagttgacgcagaagcgcgtggatctcccgctttgcacccacgtcaatgccgcgggtgggctcatccatgatgacgacctttggggccagagaaagccacttcccgatcaggcacttctgctgattgccgccggacaggctgctgatggggtattcaatgcccggaattttgatggccagttgctctacaaatcggttggccaagcttcgctccagcttgtcgtccagccaaatgccatgggagactcccttcatgttggcgctggacatattgtttttgatactcatctccagaaacaggccctgggttttgcggtcctcggtcaagtaacagatgcctgcatccacagcgtcacggtaggtgtggaaggcacagggcctgccgttgagcactacctggccggaacggatgggatcaatggcgcacagaccgcgcataacctcgctccgtcccgcgcccaccagcccggcaaaacccaggatctccccccgccgcagggcaaaactgacttcgcggaagatactgccggtgaggccgttgacctccagaaccggatcgtccgctgcgatacagctgctcttggttgggtagagatttcccagctcacggcccaccatagcgcggatgatatcgtctgcacagatatctccggtgtccatggtagtgacataggtaccatccttgaacacagtgacccggtcgcagatttcaaagatttccgccatgcggtgggagatgtagagaatgctgattcccctaccgctcaattcctttaccaaatcaaagagccgggcagtctccttttccgtgagggaggaggttggttcatccagaatcagcagcttgcagttgagtgaaaccgacttcgcaatctcaatgatctgttgttcagagacagtcagctcactgaccagcgcgctgctgggaaaattggcgttgaactgcttcagaaccatgtcggcatccgcccagaggcgtttgaaatcaatcattccccccttgtggggcagacgcccgatgaagatattctccgccgccgtcaggtgggggcacaggctcaattcctgatgaacaaagcctatgccgatatcctgggcttctttgggactcctgggggcaataggcgcgccttcaaacaagatctcgccctccgtgggcggaaacacgccgccgatgatgttcatgagggtagatttcccggcaccattctcaccgcacagcgcgtgaacctcgccaggccgcacctggagctgtacctgatccagcgcccgggttccgggaaagacctttgtcacaccccgtacctccaaccgatactcgctcatacagcctcctcctgttcttttgtcagcgataagcccccctgcctcagcagggtcttcaactgaatggccgccgcgccgattgccgtcccatactcacccagattggacacccgcagcttgaccctgcgcccggcaaagcgcatccggcggatcttgaccactttttggatctgttcgattaaaagcgactcatttgacattccgccggccagtacgatcttctcgggatccagcagatttatgtagctggcaatgccgatgccgatgtattctcccgccctcctaaccaagtccagtgcggccacatcctgctcccgggcggcagcgaacacagtcttggcctccacccgctcaatattgccgcctgccaactccagaatacgggttttgactccgctggaaatcaggttacgggcctgctgggcgatcgctcgcccggaggctaccgcctccaggcagccgttgttgccgcaggtacacagcggcccatccttctccaccgtgatgtggcccagctcccctgatgtcccagaggcaccgacgcacagctctccgttttcaatggccgctgcgccgatgccatagccaaggttgatgcagataaaatagtgataccccacacctgaaccaaagaattgctcccccagcgccatagcccggttggagttctccagccgcataggccagcggatactggtccgttgtaaaagcagccgccccagcggctccaaaagcgctacatcctcccaatgaaaattaggggaaaagagtacccttccctggtccaggtccagaatccccggcacacccaccccaacgcccaggacccggtggagcgggataccgctctcgcgcaatagctggtcaatcagctctgcggcggtctgaatgaccgcgtcggcatcttccggtaccggaatgggacgatttgcctttgcaacaggcattccattgagatccatcacaagcgccctcagcacggttggagcaaagtcgatcccgacgctgtaatagcagtccccagcaaactcatacatttcggggcgctttccggacgcgccctcctgcctcccacaggagcgtacaatacggttgtccaacaactcatctgtgatcttgattgcggtcggcaggctcagccccgtccggcgtgcgatctcagccttgttgatagcgcctctctcccagattgttttcagcaccagcctccggttcatcaaagctaaagtgaatttatcaacacgcacgtgaaaactccttttcctctgcccattcccctttaaaatacccccaacgctcttatccttttatactaagttaagttaactaacttaacgaggcaattgtagcgctatgcataagaaatgtcaatccctcttttctatttttggcgtttcgaatgatgcatctgaaaaccttttgtatattataccgaaagatttttgaatatagcataaaatcaggggcggcattttagcaaaaatgccgcccctggtttgatccaccggaatcaatagtaatgctcaagtcttggcacccgccagccgttgtaagagataatatgggccgccccaatggccgttccatagtcgccgcgggttcccaaacggagcgtcacatggcgtcccgcctgccgcatctgccgcatttgcatactatgggctacccggtcgaaaaacagcggaccgtttcttgtcaggcctccgcacaaaacgatacagtccggatccaggatattgatcgccatggccagtccgattccgatatagtcagtagccttgtccacaatcgagagggctaccgcatctcccttggccgccgcctcaaagaccagcttggcgtcaatccgctccgatgcgccgccgcaccgctcccgcaggctggtagggagaccactgcaaacggcgtctctggcctgcagggcaatggcctcaccggaagctaccgcctccaggcagccggagtttccacaggcgcagagcggaccgtctttgcagacagtgatgtgtcccagctcaccgctggtgccgctgctgccgtagtagagctgattgttctgcatcagagctgcaccgataccgtgtccaatgttgacacataaaacggtatgggtgccgctctctccgccatccccgcgccagccactctccgctagtgccagtgcccgattggcgttttcgaccaacacggggtaggacagccggctctgaagccagctctgaagcggaatatcgctccagccaaagtccggggagaagagaatatgcccggtatcccgctcgatgaggccgggcatcgccacccccactccggccaaccgatccagtgcaactccggattccagcagactgctctgaatccgctcgcacaaccggtccacaaatgcttcaacaggctggacctcccccgtttccaccatggttccgtatactaccttctgcgccaaattcatcagcaccagtcgtatggtcccacggccaatatccacccccatataatattcgctttcgggcaccacgcttaacaattccggcggttttccgccgctgctctttccctttcccacagctctcaccagaccgcgattaatcagattttccgtgatggtcatgacggagggaaggctcagcccaacccgttttgcaagcgcagcacggctgatggggccctccagaatgatcgtccgcataacgttgctcttattggtgggagctgcccgatagcggtcggcccacggggttttgggcatagtgatacctcctttttttactacttttctaaagtatatcgcattcaaatatatatcacaagtaaaccgtaccattttttgcagatcaagacgattgacaatatctcagccgtgttttaaaaaccgttctaccaaaagtctaccagaaatgccttggaatcctttgggttccaaggcgttttcacttttcccgctcccgtattgtctaccaaacgtctaccatagcaaccttttgattctgtttccccgccttttatatctctatcccccgaaatgtgcattgtttcctcccctgaaaggggcgtcatacgcccctctggctcaaaattcagaaggaggaaatccaaatgagaaacctcaagcgggctctcagcctggctctggcggcgatcatgctggttggcatgatggttgtctccgccagcgctacgggcctcgacgacttttccgacaaggacaaagtcgtcaacaaggatgccgtttccatgctcactactctgggcgtgatcaacggcaaggaagacgggtcttactttgaccccaccggcaacgtgacccgtgccgagatggcgaagatgatcgccaccgtcctgaatcagggcgccgatgtggacggcctgtatgtcgggatgaacaccggcctgaccgacgtgaagggccactgggctgagagctacatcaactactgctacagcctgggcatcatcgccggccgcggcaacggcaagtttgaccccgccgctaccgttaccggcaacgaggccgccaagatgctgctggtggccgccggctacgacgcgcagctcgagggcctgaccggtgccgactgggccatcaagaccgcctctctggcctctaccctgggcatctttgacaacctgagtgtagctacctctgatcctctgacccgcgacaacgcggcgctgctgatctacaacgctctggacatcgagatgattcagaagtacgagaacggctatgccatcgccttcaccgaccaccgcaccctgctgagcgccaagtacggtgtttacaagattgagggcgtggttgtctccaacgaggaggccgcgctgaacaacaccgacagcgactttgcctccgccaagggcaagaccaccatggagaacgtgaaggtctacgcctccactacctccaacaccaccaccggcgagtacgaagaggtgaagggccaggtcgtgttcaacgtgtccaccactgccgacatgctgggcaagaccgtgaccatgtacgccaagaagaccaccgttctctccaactccaccgtgctgggcgtgtacctcgatgatgccagcaacgtggtcaagaccaccgctgacacgcaggacaccatgaaggacttcctgaagggcaccggcctgtccaccgacaaggacaccgcctactatgtcaactacggtgtgatggacagcgaggccgacgccactgaggcgctgggctttgacgccaagaccggccgcttcaccaacgtcaacggcaagaccaatgcctacggcgtggagatgaccgccatcgacaacgacggcgacggtattgttgagtacgtcctgtacctgcaggagactctgacccaggtcatcgccaagagcgactccaaggagaccaccactctgaacgccttcaacaagaacaaggccatcgacaacgagaacatcgtgaccgacgccaacctgtctgagggcgatctggttctggttgcctcttacggcggcaagtaccatgtctccacccccaacgttgtgaccggccagatggagtcctactcctccagcaagaccaaggagcagaccatcaccgtgggcggcaccgagtaccacccctcttacatcctgtttgcggcggatgcggccgacaacacctacgagttcaacgtgctggactgcggcaccaaggacggcgtggactttgacatcgactacgacttcatcctcgactccaatgacaacgtgatcgcttaccgtccctcctccaagggcgtgggcgactatgccctgatcctggattccggctacgatccgggccgcaccaactccaaccccaccggcgaagtgaaggttctgctggccgatggcaccgagaagctttacaccctgaacttcgacgcctccgcgcagaacgtgggcgagcagctcttccccaagctgacctcctctcagcagaaggacaacggcattgaggagctgaagggcttcctgggctcctccgttcaggacaacaccaccaccaagcccgatggtacgctgccctccggcggtaaggttcactactccagcaagcagcaccagtccggtttcgctgctggctatgtcattgagtacagcctcaacgacaaggatgttctgaccatcaagtccatcgtgggcgacaaccatgccaacgcggatgaccactacagccccgccaacgtgaagagcacccttgctgccgactatgataccggcgctgcccgcatcaagtacggcaccagcagtcaggtggccgtggacaagaacaccgtggccttctacttcacgaccgtgaacggtgaggacaagtacggcgtggccatcggctacgacaagatgtctaacgtagacaagaacaccgcttttgtggcccagaccaccaaggccaatctgaccgacgtggttctgttcgacgctgagggcgtggccgccgagaaggactacgcctatgtcctgggccgcaccagcagctcctccggctatgtgaccctgaacgtgcttctgatggacggcaccgcctccaccctgaagctcaccaaatccgactacgactccctgttcaagggcaacagcgactttgagactgcctatgcctacaccatgaacggcgagggcgtggcggatctgactgcccccggcagcagcggcacccacgttctgaccggctatgccgtgaagctcaacgacggcaccgtggctgtctacagcgacaagaagctcaccaagctggttgacagctactcctacgacaagaatatctggaacgtggaggacgtgtccgctggcaccaacgctcccgccggcgctttctccaccggcgttgcgaaggagactgtcctggttctggatgccgacgagaacacggtccgcgccgcgtacatcaagagcgtcctggacggcactgaggtgccggatcacggtaccggctccctgtccgacggtgtgatctccaccagcaacgagaccatgatcagcgacatcagcaaccagaccatcaccctgaccaacgacatggctgccagcacctccggcagtgtcaccaccgcccagaacaaactgaccgccgacgttctggtcaacgccctgcagggcaatgtgaagggcgtctacgaagaggtgttcggcacctacaagctggttgccactaacccctatcccgttgtgaccagcgctatgtatgtcggcgtcgacaccaacaagggcatggtctactacaagatcgcctttgccaaccccaaggcccctgtgatcaccaccgacctgaccaccactgccgtcaccggcacggagctgagggtcgtggctaacgcccccgacaagggcaccctgtcctacgagtggcacaaggtgtccggcggcagcgattccgtggttggctccagcagcgccacctatacggccagcgatgccggtgagtactacgtggtcgtcaccaatacccgcaacagcctgaccgctaccaccaagagcgccacctgcaacgttggcaccaaggtggatgccgcgaagcccacgtttggcactgatctgaagtccaccggctatgtcggagacaagctgacggtcaaggccagcgtagccgacaatggcactgtgtcctaccagtggtataagaacggcatgcccctctccggtgagactggcgagtcctacacccccactgaggctgggaagtactatgttatcgccaccaacaccaaggacgatgtgaatggcgacaagactgcccagacgaagagcgccgagtgcactgtgagcgtcaagattggcgcggctgatatgaacctttccattaccgctccgacgaacggtgccaccattgccgatgctgctctgacggacagcgcttctagcagcaaggtcgagattggtactcctacttgggaaaagagtgatgacggaagttccggctgggccagtgcaaccggaacctttgagcagaagttctatcgtgccaccgtcacacttactgctaaggatggatttgcttttggcgagtccggcgactatagcagcctgactgttaataatggcagggccacgtcggccactgtctctgatggcagcctgaagctggttattacttttgatcaggttcagtaatctccccatattttaaaaagttccccgggccaacggcccggggaactttttatggtatctggccctccagaaacgccagatatggataggtctttcccgactcgttgatccggtcgatcgccccatcttcatggactacccgaaacccctgctggataatctcaattgcacctgccgccgtctgccggcttgccagcagcagcccggagcggcccggaagcagcacagccgagggccggaaccccagcgggatgctctgactcgtcccatttcccaggaacgcgccgcaagaaagctttgccttttccgccgctgcggcggccaactccgcccggtcggcctgtcccagcttttcctggagtgcggccgcaatccttcggaagtcctcattaaaatccgtccgcaggaagctatcctccggctcccactggtgcaggtggtaatattccgtataatttgccatattcgtcccatctcctcccggcacaggcaaatcccctgcgtccggcacacagccgaacgcgagggctttgtcctgccggatggcccgcgggcgggtgtgggcacccgcccctacatacaagcgccacaagacaccccatcaaaaacggacccccgaaaatgtaggggcggcctttatggccgcccgcgggcggggacaagccccgcccctacagataagcgcca

SEQ ID NO: 4272 - DNA, 2068 bp, Unknown
  gut microbiota DNA sequence
cggagcggggcggcgctttgcgccgtacaagcgttttcccgaagggaaaaccttgatgccgggcgaattcagttcgcccgggcagatgaaggggccggggcccccggcgggccttggcccgctggggcaagcgcaggcacccaggcggaggacgcgctgaccatgaagcggctgtaccaggccgcctgcggctgacggcgggcggtgcgggtatccgccatttacgtgagagaactatacagattgcatgtaatagaagggaaggttttaccatgaatcatctgaaacagattgcggccaggctgccggaatatggcctcgatgccatgctgctcaacagcgagcccggggaatactatgccgtgggcttccacggagagggcaatgtggtggtgacggcgcaggggtgcttttacttcaccgactcccgctacattgaggctgccaatcacctcatcaccggcgcggagatcgccatgaccggccgcagccgcaactaccgggctatggtgcaggaggtcgtcgaccgctgccgcatccggaagctgggctttgaggagggctatctgtcggtggcggactataacctctggaaggagggcctcaccgccgagctggtgcccgctcagaagctggtggacgccctgcgggcggccaaggacgacggggagatcgccctgatgacaaaggcccaggagatcaccgaccgcgccttttccgagattctgaagtttatccagcccggcatgaccgagcaggagatcgcggccaagctccagtacgatatgctccgcttcggtgcggagaagatgagcttcgaccccatcgtggtttccggccccaacggcagcctgccccacggcatccccagcgccaagcaggtgcagcagggcgagttcatcactatggatttcggctgcaagtacggcggatactgctccgacatgacccgcaccgtggccctgggcgagcccaccggggagatgcagaaggtctatcagaccgtgctggaggcccaactggcgggcatcgccgtgacaaaggccggcgtgcccggtaagagcatcgacgccgccgcccgcaaggtcatcgaggacgcgggctacggggagtatttcggccacggctacggccacagcctgggcatcgagatccacgagtcccccaacgcgaacactcgggaggagactttgctgcctgtgggcgccgtggtgtccgccgagccgggtatctacctgcccgggaaattcggcgtccgcattgaggacgtgacggttttgaccgctgacggctgtatggtcctcaccaaatcccccaaagagctgattattctgtaaaaacccttgcaaataagggaagaatggggtaaaatagcgtagctgaattttgagaaaccttattttggaggatgaataccaatgcctacgattactgccagtgatttccgcaacggcgtgaccttcgagatggacggtcaggtgatgcaggtggtggagttccagcacgtgaagcccggcaagggcgcggcctttgtgcgcaccaagatgaagaacgtcatcaccggcggcgtgaccgagacctccttcaaccccaccgccaagtttgagcaggcctatgtggagcgcaaggacatggagtacagctacaacgacggcgatctgtactacttcatggaccccgagacctacgatctggtacccatcggcgccgagctgctgggcgacaacttccgctttgtgaaggagaacatggtctgcaagatcaactcctataagggcaagatctttgcggtggagccccccactttcgtggagctggagatcaccgagaccgatcccggcttccgcggcgacacggccaccaacgtgaccaagcccgccaccctggagaccggcgctgagatcaaggtgcccctgttcatcaaccccggcgacaagatcaagatcgacacccgcaccggcgagtatctggagcgctgcaaggcctgatcgcctgccggacttctgcggaggcggaagggcatcggcgggtgtcgggggccccgcgcagcggggcgcgcctccggcgc

SEQ ID NO: 4273 - DNA, 4862 bp, Unknown
  gut microbiota DNA sequence
ttcttgagtgctggagaggcaatcggaattccgtgtgtagcggtgaaatgcgtagatatacggaggaacaccagtggcgaaggcggattgctggacagtaactgacgctgaggcgcgaaagcgtggggagcaaacaggattagataccctggtagtccacgccgtaaacgatggatactaggtgtggggggtctgaccccctccgtgccgcagttaacacaataagtatcccacctggggagtacgatcgcaaggttgaaactcaaaggaattgacgggggcccgcacaagcggtggagtatgtggtttaattcgaagcaacgcgaagaaccttaccagggcttgacatcccactaacgaagcagagatgcattaggtgcccttcggggaaagtggagacaggtggtgcatggttgtcgtcagctcgtgtcgtgagatgttgggttaagtcccgcaacgagcgcaacccttattgttagttgctacgcaagagcactctagcgagactgccgttgacaaaacggaggaaggtggggacgacgtcaaatcatcatgccccttatgtcctgggccacacacgtactacaatggtggttaacagagggaggcaataccgcgaggtggagcaaatccctaaaagccatcccagttcggattgcaggctgaaacccgcctgtatgaagttggaatcgctagtaatcgcggatcagcatgccgcggtgaatacgttcccgggccttgtacacaccgcccgtcacaccatgagagtcgggaacacccgaagtccgtagcctaaccgcaaggagggcgcggccgaaggtgggttcgataattggggtgaagtcgtaacaaggtagccgtatcggaaggtgcggctggatcacctcctttctaaggagatttcaacggaagtagttttctgttgtaacgtcctaaggtcagctttctggagcgaatggctttcacgttgtttaatttagagggtacactctcgggtacccgaacagagcccagcgaagcgggtctgttcgggagaggagacgcaagggagcgcagtgagggatggccgtgagggcgtcacgaacggagcggactttgcgtcgacgacgacgggcccatagctcagctggctagagcgcacgactgataatcgtgaggtcggtggttcgagtccacttgggcccaccaccaaaaccctgggggtttagttcagctggtagaacacctgctttgcaagcagggggtcaccggttcgagtccggtaacctccaccagattaagagcagattttaacactcaaggaattgagtgttaaaatctggccttaaaggctggaaggcggcaccttgaaaactgaacaatgtaaatcgaaagtacaagagcaagcaacagagggcaaaacagcaatgttgtggaactaagatagaatggcgaaagccgttctagtaagggtaaaaacaatggagctaattgcaaaacttctgtgatgcctgcataattcatgattttgagaacagctcagagatgagactgttctacaaggtcaagctagaaagagcgcaaggggaatgccttggcatcaggagccgacgaaggacgtgacaagctgcgataagctgcggtgagctgcacataagctttgacccgcagatttccgaatggggaaacccggcagagcaatactctgtcagcgtgcgttgaatcaaataggcgtacgcggggaaccgcctgaactgaaacatctaagtagggcgaggaagagaaatcaaccgagattccgctagtagtggcgagcgaacgcggaagagggcaaaccggaggatttatcctccggggttgtggacagttttttagcaactggaactaggagaacggtatgggaaggccggccatagcgggtgatagccccgtatccgaaagggaaggttgtgcgactggatccagagtaccgccggacacgtgaaacccggtgggaagctggggggaccaccctccaaccctaaatactacctgatgaccgatagaggagcagtaccgtgagggaaaggtgaaaaggaccccgggaggggagtgaaagagaacctgaaaccttgtgcttacaagcactcaaagcccgttaaagggtgatgaggtaccttttgtagaatggtccggcgagttattgttactggcaagcttaaggcattcagtgccggaggcgcagggagaccgagtctgaatagggcgtatgaagtcagtggcaatagacccgaaaccgggtgacctatccatgggcaggttgaagtgggggtaaaaccccatggaggaccgaacgcacgcccgttgcaatggtcggcgatgacctgtggatagcggtgaaattccaatcgaactcggagatagctggttctccccgaaatagctttagggctagcgttggcttagattaccggaggtaaagcactgaatgggctaggggccgataaggttactgaaccctatcaaactctgaatgccggataattgatggccagcagtcagtctacgtgagataagtctcgtggacaaaagggaaacagcccagacccacagctaaggtcccaaagatacgctaagtggaaaacgatgtggagttgcgaaaacaaccaggatgttggcttagaagcagccactcattaaaagagtgcgtaatagctcactggtcgagtgactctgcgcggaaaatataacggggctaagcgtaacaccgaagcttgggctgcacagcaatgtgcggggtaggggagcgtcgaatatggggtgaagtcgcagcggaagcagcggtggactgtattcgagtgagaatgccggaatgagtagcgagaattatgtgggaatcataatggccgaaaatctaaggtttcctggggaaggttcgtccgcccagggtaagccgggagctaaggcgaggccgaaaggcgtagtcgatgcacatacggttgaaattccgtagccaccgaaccttaagtacactgacacatagagatagcgggacccgggcgttggttgacccgggcgtaagggaccgaactttagtagggaagtccgcgatgctctgtggcgagaaaaggtgtatggtatgctaaggtgcccgtaccgcaaaccgacacaggtagatgaggagagaatcctaaggccaacgggagaagggttgttaaggaactcggcaaaatgaccccgtaacttcgggataaggggagcctcctacgggaggccgcagcgaataggcccaagcgactgtttaccaaaaacacaggtctctgctaaatcgaaagatgacgtataggggctgacgcctgcccggtgctggaaggttaagaggagatgttagccgcaaggcgaagcattgaatcgaagccccagtaaacggcggccgtaactataacggtcctaaggtagcgaaattccttgtcaggtaagttctgacccgcacgaatggcgtaacgacttgggcgctgtctcaacagcccacccggcgaaattgttgtactggtgaagaagccagttacccgcaactagacggaaagaccccatggagctttactgcagcttaatactggaaatcggtaaatcatgtacaggataggtgggagacttggaagccagggcgtcagctttggtggagtcacccttgggataccacccttgatttgctggttttctaacctgcggccgtgaatccggtcgggggacactgttaggtgggcagtttgactggggcggtcgcctcctaaaaggtaacggaggcgctcaaaggttcgttcagcacggacggaaaccgtgcagtgagtgtaaacgcataaacgagcctaactgcgagaccgacgggtcgagcagtaacgaaagttggagttagtgatccggcggtatgcaagtggaagtgccgtcgctcaacggataaaagctaccctggggataacaggctgatctcccccaagcgtccacagcgacggggaggtttggcacctcgatgtcggctcgtcacatcctggggctgtattcggtcccaagggttcggctgttcgccgattaaagtggcacgcgagctgggttcagaacgtcgtgagacagttcggtccctatctgttgcgggcgtaagagatttgaagggagctgtccttagtacgagaggaccgggatggacgtacctctggtgcaccagttgtcctgccaagggcatagctgggtagctatgtacggacgagataaacgctgaaggcatctaagcgtgaaactccccctaagattagatctctcattcgaaagaagtaaggcacgacgtagactatgtcgttgataggccggaggtggaagcacggtaacgtgtgtagctgaccggtactaataagccgagggcttgaccttaacatggatgattgcaggcgcttgcgaagtgcggaagatttacattgttcggttttgagggtgcagcaccctggatggtggcgacaagcgcctttagctcagctggtagagcaactgactcttaatcagtgggtccccggttcgaatccgtgaaggcgcaccaatggcccgttggtcaagcggctaagacggcggcctctcacgccgcaaacgtgggttcgattcccgcacgggtcaccatcatttttctcttgacaaagaggaagaaaatgaatataatgacttatcgttgagaagaacggtaaggagaagaaagttgttagagtttcttttgcttacttttcttttcaaaggaaagtaagttggtgttgattgcggtgagggtccacccgttcccatcccgaacacggaagttaagctcacctgcgccgaaaatacttgtctggagacggaccgggaagataggtaacgccgacaca

SEQ ID NO: 4274 - DNA, 94909 bp, Unknown
  gut microbiota DNA sequence
gtgtccggcgctcgaagccaatctgcggtttacttgcccagctgcttagcgatctcttcggcgaagttctcctgcttcttctcgatgccctcgcccttctcaaagcggacggcgttcttgaaggtaatggttccgcccagagtcttggcaacggaggcgatatactgctccacggtcatggcgttatccttcacgaactcctgctgcagcaggcagttctccttgtagaacttgcccagcttaccggcgacgatgccctccttgaccttctcgggcttggaagccatcttaggatcgttctccatctgcaccaggaggatctttttctcctcatccagggtggcctggtcaacctggctcttgtcccaaaagcgggggttcagggcggcgatctgcatggccacgtccttgcccacggtctccacctgttcggcagtcaggccagtctccaggtttaccagcacgccgatcttgccgccagcgtggacatagggcacggagatgccatcggtaaagaaagcaaagcggcggaccttgatgttctcgccgatgacgagcaccatctcctgctgctcctcctgcacggtgcggccgttgccgtaggaaagggccatcagggcatccaggtcggcgggcttgttggcggccacaacggcggccacgcccttaacgaagtccacgaacttctcgttcttgccaacgaagtcggtctctgcattgacctcgaccaccacgccgacgccgttcaccacggtggcataggccatgccctcggcggcgatgcggcccgcctttttctgagaggcggccaggcccttctcgcggaggatctcaacggccttgtccatgttgccctcggcctcagtgagggccttcttgcagtccatcatacccacgccggtcatctcgcgcagggtctgtacgtcttttgcagtgattgccatgatcacattacctccatctcaaatatcaaaaggagcgcccgcccgcgcgggcgggcgctctcaacatcacggtttggggccggaattactcggcggccgcttccttctcagcggaagcctcggcagcgtcctggccctgcttgccctcctggatggcgttggccatcacgccggagatcagcttgatggcgcggatggcgtcgtcgttgccggggatgacatagtcgatctcgtcgggatcgcagttggtgtccacgatggctacgatggggatgtgcagcttgcgggcctcattgatggcattgcgctccttgcgggggtcaaccacgaacagcgcgccggggagcttcttcatctcgaccacgccgcccagatacttctccagcttggcgatctcgcccaggtgcttcatgacttccttcttgggcagcatgtcaaaggtgccgtcctcctgcatcttcttgagctggttcagacgctccacgcggccgcgcatggtcttgaagttggtgagcatgccgcccagccagcgggcgttgacatagtacatgccgacgcgctcggcctcttccttgatggcctcctgagcctgcttcttggtgccgacgaacagcagggtctggccggactcgcccagggagcggacgaagctgtaggcctcctccagcttcttcacggtcttctgcaggtcgatgatatagatgccgttgcgctcggtgtagatataggtggccatcttggggttccagcggcgggtctggtgaccgaagtggacgcccgcctcgagaagctgcttcatagatacgactgccatggtaaaaattcctcctttatttgttgattcctccacccggttcatccgaagccggccaacctcccatttggaaagcacctggcccatcgtccgcgggtgtgcgtaatcacatgctttggtataatatcacatcgttccccgttttgcaaggtttttttcattcccgcgcaaaaaagggcccggatagctccgggccccttcataaagtatatactcagtccttcctccagtaatagttgacctcgttccagtaggtttcattttgaaaatgccaagggccgaaatcaaactggattagagtgccggtccggtcctccccttcatagattcggctgttatcccctgtaaagaccagattctgtatttccgccacatcgatgggggactccagttcgaaacggacatgatccgcccggaaaaaggttcgtcctgcatcatcgtgaaatacgtcctgaacccctcccaccttctcaaaccgggtttgaatcttgcttccgtctgacatcaggacgtacatctgccaagggccatcctgaccgaaggccgcgtcataggccgccccgtccgggatcaccagatccatgctgacgctgataggcgagatggtcaggttctctgccaccgccagagtcacgccgttcagattcacaccgcaccggccctggaagtcgtaatgggtacccatgccaaccagggggacgatcagatcgatgtccataccatccagcatggtgacccattccccctgatactgcatacacagggactggatcccggaaaacagacagtatgcggcatccttcggcatcggatctatatgcccacgaatgataaactccattttgttgtctgtggggtcgctgtcctccacatagtctattgcataccccgcctcgctggagccgataaagctggtgcagctctcgtccctataggctccgaagccgattcccctgccgtccggcccgccccagaggacggcgcggttgaagccctcctccacctggtcgggctcgggcagtaccgtcccctccggcgcggcaaactccaccaggatatagaactgttcctgatccgccgccgcctccttcacggtgacggtggccccggagccgttcttgtcctcgaacacctggttcatctgtacaatccccaggttttttgcctgttcctcgctggtgatgccgaacagctcccggaaggctggggacaccccggcaagtgagacggcccccaccgctcctgtcaggagtgaagcggcggctacgatggccaccaacccgcgataggggaagcgtgggcgcttctcttcctgcccgctcctccgctccagcaggcggcaggtcagcgcctccttttcctccgccgagaagttcagccgctccaactcatcccgatagcctgccatagcccaatccctccaatacatgctttaatttcatccgggcccggctcatccgggtccgcaccgcatcggcccgcaggcccaggatctcccctatctcgttggtatcatatcctaaatagtagtagagcaccagcacctcccggtacttggcaggcagacgctgcacctcttccagcacgccgccctcctccggctgaaacgccgcaggctcggccacggcatccaggcccacagtgcgggtgcgccagggactccggcggacgtttttgcaggcgttgaccgtcacccgcaccatccaggcctgttcgtgcttctcattttcaaaggcacctggatattccagccgcttaagcagcacctcctggcatacatcctgggcgtcgggcacagaattcaggatggaataggccagcctcaagagccggtcggagtaggtctccaccagccgggcagccagcgcctcctccgtatgctccgccatgaatctccctcctttttctccgttcggaacgcgttcacctgaaatacacctcacggctcccaaacgtgacaccctccagcagaaaaaatgccccggttttcaccggggcggcggaacgtatctcttttttaattatcattcaactgcgcactcatggcctggtcgaagtgctggttgatctgcttggtaaactccacggcggcgttgtaccccatcttcttgtggcggttgttcatggccgccacctcgatgatcaccgccaggtttcggccaggccgcaccggcacggtgagagagggcacctgcacgtccagaatcgtggtgtagaggttctccaggcccaggcggtcgtacatggccccgtccttccactgctccaggttgatgaccatatcgatctcggcctcgtccttgacggcgctcataccgaacaggcggcacacgtcgatgacgccgatgccccgcagctcgatatagtggcggatcagctccggcgcagtgcccaccagccggtcggtgacgttgcgcttgatctccactgcgtcgtccgcgatcagccggtggccgcgcttgaccagctcaatggcggtctcgctcttgcccacgccggactcgcccagcagcagcacgccctcgccgtacacctccaccagcacgccgtggcgggtgatgcggggagccagataggacttcagcgccgcaatgatgttgctcatgagtacgctggtggtgtccgggctgcggaggatggttcggtcgtacttctcggccatctccatacactcggggaagggctcaatctcccgggaaataatcagggccggaatgtcctgggagagcagcagttcgaagctctcccgccgctcctcggaggtcagcccctccagataggtggtctcaacgcggccgatcacctggagccgcttggcgtcaaagtagtcgaaaaatccggtgagctgcaggcccggccggttcacgtcctccgtccggatcgacacatcctcgtaccccgccccgcccctcaggacctccaggcgaaattcctgaatcagttttcccagctttacgctgtaaaggctctccattggcgctgcccccttgcggtattattagttatagtataccattctcccctgctcctttgcaacacactttggaagaaagggattttttgaaaaaaatgcttgcaattttcgaaaagctctgttattatatcattcgatgctttatcaagctatcctgacgagcgaggaggtataagcgaatggccaaatgtgaattttgcgataagggcgttgtgttcggcatccgggtgtcccactctcaccgccgctccaaccgtccttggaagcccaatgtgaagcgcgtcaaggcgattgtcaacggcacgcccaagcacgtttatgtgtgcaccagatgcctccgttcgggtaaggtcacccgcgctgtgtaagtttgtaaaaaagggaccagcctttggctggtcccttttttctttggaacgattgcgcctgtccccacatagcatggggacagaatggaggcgtattccatggctgatgctctgtgccgcctgccccgggtcctgctggatggccgccctgccgcccgtgcactgctctgtggcagcaacgcccaccccggcctacggggcgaggcgctgttttatccctaccaggacggaaccctattgctgatacgcgccctggggctgcccggggacggcttttatgcctgccacattcacgcgctcggcgactgctgcaccgggggcgacgtggcctttcactgcgccggtccccactacgatccggaaggccgcgagcacccgaaccacgcgggagatctccccgtcctgctctccagcggcggccgggcgctctccctcgtgtataccggccggtttcagcccgggcaggtgctgggccggtcggtggtactccacgctctgcccgatgactaccgcagtcagcccaccggcgccgccgggggccgcattgcctgcggcgtcatctcccctgtggcctgagccgggcccgcatggcttgtcatgcgggcccggctttctgctctctattatctattgtatcttgttttgctatcccacggtcaccacccgcaccacggcgtccccgcccagtgcgccgctgtagtacacggtcagctccgctccgtaggatttggcggccgagagggtcgtccagcgcccggtttcttggttgtaaacctctaccccgtcgctgacgggcacccgaaggccttccaccaccacggcctcctctccgtcaaaatcagcccggctcacatcggccttcttcaggctcacaacctccacggcctttccctcggacgacaccgcgatgccacccatggttccgctcctgaccgtctttcccgtgatatatgcctggctggctccgctgctgttctccacggagacggttcggttggtataggtcatgctgccgctgcccccagtctgctccccggcggtcagcagaccgtaggtaaatgcgttcccggtcacatcgtccagcaggaggaggcagaccttcccgttttcgtctgtggcgtaaaagtcgatttgggaggcgggtacggtatccgtcagaatatcctccagggcaatttccgccaccacgctggagccggcccgctcgtagagcttcacatcctccgacagcggaaggctccccagggtgccgtccgacggatccagggcatactggctcccgccggacaccggataggccgacagggccccgatcccggtggagctgacccgaaccagctcacccacaccggcgccgtggacgctgagctcacccgccgcagtcagcccgcaggtcagctccaccccgtcctcctgaagcacgccgtagagctccgcccgcttctccgagggggcgcaggcagagatcacctctcccgccccgttcagggtgacggtaatccggtcgcccaccgcgaaggcggacagcccggccgccgccccgtccgccacctccagctccacgcccagcagcgtgatggaggcgggcgatgcggcgttggggctggcattctcataatagccggtcagcatgaccccctcataggccgccgcctcggaggccacgaccagatcgagcgccccggagtccgtataatacagcgtcacctgctcccggccctccagctcataccagcagtcgccgtaggtgctgaccgcgccgtccagcagcaccctggttccgctggagatggcatacgttccccctccggcggcggtgatgccgtccgccgccacctctgccgggcggagggtgcgatgggacgaatcgtccggcaggaagcccaccgtctttcccgcctcgtccaacagcagcgcgcctttccgccccaccaggcgatccggcaccgcctccgcaggctcataccagctaatcgtctgattggcatagacctccaccgtgcccagggtgccgtccgccgcctcggcgttattgtccagcagcactgcaccggttaccttggaggcgcagaggttgtcgatgtaatcctgtccgtcccggtctgtctgccgcagcacgcgatagagcagcagggccgcgtctccccgggtcaggccggctccgccgtctgcgggcaggccgtccagaagccccagtgccccggccttattcagatagtcctccggccagaaggggccgatctcctccgccgtatagcccagcaaacggagaaccacagtcaccgcctgtcccaccgtcaccggatcgtccgggccaaagcggccgtcgccatagccggcagccagcccctcctcacaggccagattgatatagggggcggcccagccgccgcctggcacgtcggaaaaccgggtacggtaggcgcttcccttcgcctgatccccgtgtccctccgtcagaatggccagcttacagaactgggcgcgggtcagcgcgtcgtccgggtggtagcacccgtcggagtacccggagacaatacccagtcctgagagcacctccaccgcctcggacagctcctcgccgctcacatccgaaaaggccagggcgggcgccgccgcgatcagccccaggcacagccccgccgccagcagcagcgccagaatacgttgtttcatctgtgtttctcctctcgattagtcggcgcgcagggcgtccacgggctgcaaaccggacgccttggccgccggatagataccgaacacgattccgatggcgacagagaaggcgaaggcgcccgccgtcaccagcgcgtcgggatacaggatcagatcatacatggccttccccaaaatgagcgagagcaggtaacccagggcgatgccgatgaggccgcccagagcgctcaggatggcggcctccaccaggaattgtcccacgatctcccgccggggcgcgccgatggacttcttgatgccgatttcccgggtccgctccgtgacggtgaccagcatgatgttcatgataccgattccgcccaccagcagggcgatgcccgcgatgccgcccagtaccacgctcatggaggtcatctcctccgtgctctcgctcatggcggagttgccgttctccagctcatactcccccacgctcgtgtcgatggtctcccccaggaaacgctccagcttcgccatcactgtgtccatgtggtcggactgatctaccttgacagaaaagtgggtgagctgggcggtgcccagtatggcccgatccagggagtaggggatcaccgccatgtcgtccatggagccctcctcgcccccgtccttctggtagtagatccccaccacggtgaagggctcaccgccgaagtagacggtctccccgatgggatccgcatattgaaacaggctgtccgccacgtaggagccgagcacgcacacccggctgcgccggtcgacgtcaaaggcgctgatgtcccgcccctccttcagggtgtagttcccgcagacggagaactggtcgctgcccaggtagagcgtcccgctgtccagcgtggtggtgcggtatttcatgggcaggcttgtggacagatcggggctcacccccagcaccatatcgcccagctctccattcccatagtcatagagggcgtccatcacatccacagaccggctggtgtcgtaccagttcaccgtgacgttgaccttgttgacgcccagcttctcatagtaggcggtgatgtccgcgttgtagccggacaccagcgccaccagcaccagcacggcggtcacgccgatgatgatgcccagcatcgtgaggaaggagcgcccctttttctcccggatggagtccagggccatgcgcagcgcgttcatggcgccacccgcgccggcggggcgctccagtccaccagcacgccgtcccacaggctgtcgtggacgattctcccatccttcacccgcacggtgcggtcggcctgggccgcgataccgttgtcgtgggtgatcaggatcacggtggttccctcggcgttcatctggcgcatgaggcccagcacctgctcgccggttctggagtccagcgccccggtgggctcgtcggccatgaggatgggcgagcgggcggcgatggcccgggcgatggccacccgctgctgctggccgccggagagctgggccggccggttgtccgccttggcggcgatctccaccttttccagcgcctccatggcccgcgcccgccgctccgccagcgggacccgctggtagagcatgggcagcgccacattctgccagacgttcagggacgggatgaggttatagccctggaaaatgaacgcaatctgccgggagcggatctgggacagctccctctgggtgcgctcccggatcggggtgccgtccaggagatactccccccgggtgggcacgtccaggcagcccagaatgttcatcatcgtggacttgccggagccggaggtgccgatgatggccacaaactccccctggtctatgctcagcgtgaccccatccagcgcgttgacctggttttcctgcccctcggcgtaaattttatagacgtccttcaattgaatcaggctcatacagaatcccccttctcagcccatggggccgccgccgggcatcccgccgcccatgccgccaggcattccgccgccgaaatccggcatctctccgccgctgaagtccggcatttccccgccgcccgggaagccggattgctcctcactctggccctggctggtggtatccccgccgctcggggccgtctgctgatagcgggtgaacacctccaccccctcctccacgccggagaggatgcgcacatactggctgttggacaccccggtttccaccggcacggcatagaacccgtcgggcaccacgccgtcctccagctccaccgcgttgtccggcgccgcgtccgccttgacgaaaaggcaggttccctggctggtgctcttgagggccgcgatgggggccagcaccccctcggactcgtcgcccacagtgatggaataggagacgttgacgccggcggagagggcgcccccgctgggaatggtgatggtgatggggaaataggccacgccgttggagttggtggcctcatagctgatctccgtgacggtgccggtgtaatgggtgtcgctctccgcccccgactgggtaatgtccacctccatacccatggcaatgccgtcgatgtccagctcgtcaatgttggcggtgatggtcatggagtccaggttgtagagcaccactgcggtctgccccgcctcccgggggctctccccttcccggacattgaccatgatgatcttccccgccagctcggcggtcaccgcatagtcggagcgcttttcctccgcctccgcgatcttctcctggagctggacaatcttttcctgagtctgggtgatctgcttgttcaccgactccacctgcttctggtagtcggccccgtcgagctggacgaggacggccccggcgctcacctgctcatagtccaccgccccgatgccggtcacctcgccgcccacctcggcggtgagatcctggctgcggcggtactccagctccccctccaccgacggatagagcttttcgcccgagtccgccaccagatagccggcgcccgtcattccctcggtgaaggcgcccggattgtccagggtgacggtgacggcaaagcagtgggtgccctccgccgtcacccggtccaccatctgaatgtcggtgacggtcccctcctggttgagcatgaggctggccacggacaccccggccttcatgcccacgtagacctgatcctcataggcgtagctgaaatactgggtcaggcacatctggctgtcgtccacaagggtggccagcttggttccggcggccacattgtcccccacgtccacggccacatcggtgatccggccggcaaagggggctgtcacagtgagggcggcgatctcctcctggagctgggcgagctgttcctggtaatcgtccagctggttttcctgctcggtgatctgatcctgatactcctcaatctggtcgtccagctctgaatcgtcctgggtgtagagcagatcacccacctccaccgtgtcgccggcggagacatatacgccggtgatctccgcctccgaggcggtggtgtacgtaacgctgtccgccggcatggtggttccggtgccggagagcgttgtggacaggctgccataggtggtctgctccgtcaggggcgtctgctcctccccgctgaaaaacagggcctttcccccgagggcggcaccggccgccagggccagaaccagcagcagcgccgccccgcgcctcaccgtcagccgccggccgggcttccgctcgggcggcgcactcccctccgctttcttccgcagtgccatcaactgcatgcaatcgtcctccccttctgttccggtttcggaggccagtatagggggagaaactgaaattactctgaaaagggccgcgtgagattgttaacactctgtaaatccttttgttcgccgccccgcctatcatatatttcagacagatttcagttctctcctttataatggagaaaaacgcaggaaaggacagaaggtatgcgcatcttgattgtagaggacgagcgccgcctggccgaggcgctgggccagatcatggcggagcagcgctatcaggccgacgtggtgtttgacggggcggatgggctggactacgccctcaccgggcagtacgacgccatcgtgctcgatgtgatgcttcccaaggtggacggctttgaggtggcccgccgcctgcgctgcgcccacgtctccacccccattctgatgctcaccgcccgggatgagatcccggacaagatcgcggggctggatcacggcgcggacgactatatgaccaagcccttcgacatcggggagctgctggcccgggtgcgggcgctcacccggcggcagggcgaggtgatcggcgagcagctcgccgccggggatctggtgctggacacccccacccgcagcctgcgctgcggggaaaaatccgtccggctgggcttcaaggagttcgacgtgctccgcctgctgctggccgccccccgggccgtcattcccaaggaggacatcatctccaaggtatggggcctggagtcggaggcggaggacaacaacgtggaggtctacatctcctttctgcggaaaaagctggcctatctgggttcccgggtgagcatcggcaccgtgcgcaaggtgggctatcacctggaggtgcctgcggtatgatcaagcggctgcggcggaaattcatcctgatcaacctgctgctggtgggcctggtgctggcggtggtgttcatcctctttgtgggggcgaacgtccgtcgcctggcggggcagagcgatgccgccctccggctggccctgtcctggcaggagggggaggggccgccccgctttgaaatcggcggcccgccgccggaggagcgcgagccggacggggcgcaccgcttctccctgatcccggtttttgtggtcaccgtgaaggacggggccattaccggcctcaacgacggcggccaggtggacgtttcggaggagaccgccgccgaggcggtggagcaggcccagtcctccggcgccagtcagggcgtgctcagggagcttcgcctgcgctttctggtggagcgcaggcccgacggcgagctccgcatcgcctttgccgatctgggctgggagactgcctccctgcgcaatttgtccctgctgtccctgctggtgtgggccctggccatggtgggtctctttttcgtgagccttgtcctctcctccgtggccctgcgcccggcggaacgggcgtggcagcagcagcgccagtttgtggccgacgcctcccacgagctgaaaacccccctcaccgtcattctggccaataccggcctcgtcctctcccatcccgaagacacggtggccgcccagtccaaatggctggagtacacccacgacgaggcggagcagatgaaggagctggtggacgatctgctctttctggccaagtcggatgccgcccgccagccggccgcccgggcggagacggccatgagcgaggtggcgctgggctgtctgctccccttcgagtcggtggcctttgaggcgggcgtggcgctgaagcaccggatcacccccggcctgtccctgcgcggagacgaggggcagctccgccggctggtgatgatcctcctggacaacgccgtgaagtacgccgggccgggcggcaccgtcaccttcaccctggagcgacaccaggagcggctgcggctggcggtacacaacaccggcgagcccatcccgccggagcacctgccccacctcttcgagcgtttctaccgggcggacgccgcccggaaccggagcgggggcggctacggcctggggctggccattgccaggagcattgtggagggccatcacgggcggctcaccgtcaccagcaccgccgcggccggcaccaccttcaccgccctgctcccccgccggtgacggttttgcttgtcagaacggcgcggctgttgtaaaatgggcctgttccagaagaagttggaaaggagaaaccaattcatgtccgttactgtaggaagcaagggccgcgccgcgtgcgtggtcaacgatcagaacaccgccgccgccgtgggcagcggcctgctgcccgtgttcgctactccccagatgatcgccctgatggagaacgccgccgtcgacgccacccaggcctccctggaggaggggcagggcaccgtgggcacccggctggacgtgagccacgatgccgccacccccgtggggatgcaggtatgggccgaggcggaggtcaccgccgtggacggccgcaagctcacctttgccgtcaccgcctacgacgaggccggccccatcggcaagggtacccacgagcgctttatcattcagaacgacaagttcctggccaaggcccaggggaaaaagaaggggaattgatatgtccatcgagacgggccgggcctatctgcgggccagaggctatgaagaccggattcaggaattcagcgtatccagcgccacggtagagctggcggcccaggcggtggggtgcgaacccgcccgcatcgccaagaccctctcctttgcggtggacgggggctgcgtgctcatcgtctgcgccggggacgccaagattgacaacaccaagttcaaggcccagttccacaccaaggccaccatgctcaccccggagcaggtgctggacttcaccggccacgccgtgggcggcgtgtgccccttcggcatcgataaccccgctgtgaccgcctacctggacgtgtccctccgccggtttgacacggtctaccccgccgcaggcaacgccgcctccgccgtccggctcagttgcggagagctggacatcctgtccaacagctccggatggattgatgtatgtaaaaactggagctgattggacactcccgcccttctgtccaatgacttttccgcccgccgggggtatactagagcataaagggggttttcttatgcgggaattttttcataatatgaagcttagctttcttctggccgcggtgctctacatcatcctcggcctaatcctgctgatctggcccggcgtcagcgccaccgtgttttgttatgccttcggcggcatcctgcttatttacggcgtggtgaccatcgtcagctttttccttcgggacagccggcagggcagcttcgtgttcgagctcttcctcggtatcgtcgctgcggccctgggcctgctgttcctgctccgcccggtcatcgtggcctccgtcctgcccgtgatcctgggcctgttcatcgtggtggacggcctggtcaacctcaaacgggcgctggagctgcgccggatgctctatctccgctggaccgtgcccctggtgctttccgccgtatcggcggtgttggggctggtgatcgtctttcagcccttcctggccgcggaggccctggtcatgctcatcggtgcggtgctcatctatgaggggctgtccgacctatggactatcttccgggtaagccagtggaccaaggagtaccgcaagcaccacccggtggatgtcgaccagatcgattttgaataaaccaataaaaagcaactcccgggcgaacgcccgggagttgctttttatattgacatttcactttaacgtttatataataatagacattaaaataaaatgtttgttgtgtggtggttgtcatggaagaacaggaattattatggtcgtcctcccagcaggagttggtacggggtatcgccctgcgggatggacagtaccgctgcctcctctgcggagtcgccttcccccagggggaggtctttccccgcgggggccgcttctatgatgccgaggccatggcagccctccatctccgggaggcccatggctccgtgctggagtatctgctccaccggaaccccggtctgctggggctgtccgaggttcagttggagctgctccgcatgctcgcggagggctgcacggataaggaaatcgctgcgcagaagagggtttccccctccaccgtgcgcaatcaccgcttcaagctccgggaaaaggagcggcaggcccgactcttttgggccctgatggagctactgcgcaccagccgcatctccagcccggtggataccggcttttgccacccccatcccactgcgtccatggttgatgcccgctacgccgttactgaggaggagcggcaggccatcctggccgcctgtttcgacgaggccggcgccctgcgccagtggcctgcccgtgagaagcgcaagttggtcgtactcagcgccatcgccgagcagttcaagcccggccgacagtatacggagaaggaggtcaaccggctgctgggccggatctatgaggactttccctacctccgccgcctgttgatcgaatacggctttctggagcgcaccgcctccggctccgcctactggcgcaaggagtaggcggtgggccgggctgtcggcggccgggccgccgccctcctgctggccggacggacggtctcccggttcggctcctccttttatctggtcgccctgcctctctatgtgctcgagcgcaccgggagtctgggggcgtccggccttttcttcaccctgaccagccttccgcccctgctggccgttcccttcctggggccgcttgtggagcgcacccaccggaaaggattgctgatcctctgtgattttggtgccagcgcgctctgtgcccttctcctgcttttccccggtcccccgctcccctttcttttgacgggcaccatgctttttcacctgctgtcccatttgttcgaaattgcatccaaggttctcttttcggagctgtgtccaccggagcgcctctcctccctcaatggaatcaaaagcctgctggatcacggcgcggcggtactggcccctgcggcgggcgcgcttttgtttggactgtgtggattccgggccatcctcctgctgtgcgcgttggcctacggcctctccgccctccaggagtgcttcattccctacgcgccgcgccccatccagcaggcggaaccgccccgcctgcgggccggtattcgatatctgctgggccggcgggaattgttctccctctttcttctggtgatggccctcaacttttttgtagccaacagcgaggagatcatcttccccggcattctggtggagctgtaccagtttccagagtcccaatacggcctggcggtctccgcctccaccgccggaaccctgctggccagcctgttcctgatccgggcggcccgcctccgccccctggaacacctgcgcgccctgtttctggtcaacagcgccctgatggccgcccttggtctggccgcgccccttctgcgttccgctccaaagctttactttgtcctcttcttcaccttccagcttttgatcggctggctcaccgcctgcatcaacgtcccgctgatctcctatttccaaacccgggtaccgctggaacagcaggggcggttctttgccctgctcgccttcttctccgggatactgatccccctgggcatctcctataccggagtcctggccgactggctgggtccaggcgcggcctatgcctgcaacaatctctgtgtcattgttctggtacttctggtaaggcttccggcctgaagcggacaaagcccgcaggattttatatcccgcgggctttgttcgttgtctcttattcccaggtctgaaactggccgtccagcaccgcgcggcggtggaagatgacgaagtcgggggcggcgtcggggcagtgcccccggatggccgccaccaccagctccgggttgaggccgggattctgggcccggagcaccaggtccagggcgatggtgtcccgccgctcctccacggtggccctggcgatcaggggaatgaggtccacctcggtaaagccgctcttggccttcttgctccttttggtcatcaacagggagtcccgggccagcaaatcccggatggcgctctccgcgccgaagggggcccccgcctcatactccagggtgacgatatagttgacgtagcacagctccttcaccggccgcaccgcctcatagcagcgctggacggtgatgcccgcgggcagggcggcgttcatcttcgccggcacctgatccagcggggtgtccagcacctggcactccagtacctcgcacccgctggagaagcccaccgacaggggcagagggatggagacaaaggcgtggggattgaagccctcggtgtgcttgatggcgatccccgcccggaggaaggagcgctggaaggtgcgcatcagatccagatgggagataaacttggcggtgtccgccttgctgaacgctaatctatgcttcggcatcgcatttccctcccggatagagcttgtccgccccgcagccggtacactgtacccggcagtcgggggtgatcaccgcctgataggcccgctcccgctcccgccacaggaagggcgtggtcacgccggtggaggtgaccgaccagggcagcacctcgtccttttcccgcacccggttggcatagaaggcggggtccaggccgcaggcgtcaaaggccgccatccagcggtcaaagtcaaaatactcgctccaggcgtcgaacttggcgccttggcgccaggcctcctcaatcacgtcggccacccggcggtccccccgtgagaacactgcctccaggaaactggtgtccggatcgtgccagttgtagcggatggaacggccccgcatgttgtcccgcagcagcttgacccgccgccggtactcctccatgctcacctgggcctcccactggaaggcggtgtggggcttgggtacaaagcaggcggtggacacggtgatggtcaccccccgcttggggttgggggtgcactccttccacgccttgtataccttctcggccagctcggcgatgcccagcacatcctcgtcggtctcggtgggcaggcccagcatgaaatagagcttcacgctgctccacccgccggagaaggcggtgcggcaggagcggaggatctcctcctccgtcacattcttgttgatggcgtcccgcaggcgctgggtgcctgcctccggggcaaaggtcagccccgacttgcgcacatgctgcacccgctccatcaggcccagggagaagttgtccgcccgcagggagggcagggacagggagaccttgttgggctcacaccactccagcaggccgtcgcacagcccctccaatgcccggtagtcgctggtggacaggctggagagggtcatctcctggtagccggagtcccggcacgcctcgacgccctgctggaccagccgctggggattgcgggggcgcaccggccggtaggcgtagcccgcctgacagaagcggcagccccggatgcagccgcggaacacctccagcatcacccggtcgtggacgatctcggtggagggtacaatggtcttcaccgggaaatagctcttgtcaaagtcctggacgatgcgcttggtcaccctggccggagccccctccagcggggtgacggcggccaccgtgccgtcgccgtgatagctcacctcgtaaagagagggcacgtagacgccgggaatccgggccgcggcggtgaggaactcctccttaccccagccctcctcccgggcctggcggtagagctggataatctccacactcacgtcctccccttcccccaggacgaacagatccacaaagggggccaggggctctggattaaaggcgcaggttccccccgccaccacgatgggagacagctctgtccgctccccgctacgcaggggaaggccagccagatccagcatgttgagcacattggtataggccatctcatagcccagggagaagccaatcaggtcgaaatcggcgatggaatcgccgctctccaggccgtacaggggaatcccctcccggcgcatctcctcctccatgtcgccccagggggcaaacacgcgctcacaccacaccccatccatctcgttcattagcccgtaaaggatacgcacgcccagattggacatgccgatctcataggtgtccgggaagcagagcgcgtagcgcacatccaccgcgcgccggtccttgaccactgcgttatactcccctcccgtataccgggcgggcttctgaacccgtgggaggatgtgttccaaagtacgattcatgccgaaccctctccatgtatctcgaaatcaatagaaaatgcagtaaattgtattatactatgtcttttcccgccttgcaacccccattcaaaaggaattgcattccatctttccgtctacccggccagaagggcagcgcataggcacaggagaaccaatgcagccccgttggccgcagtgaacagcagcagatagcgccccggcctggcccccggcgtacgcaggtagaccttaagcgagatgaggctggccagcgaggcaatgggggtccccaacccgcccaggttggagcccaccagaaggccgcgccagtccgctgtaaatccggacaggagcactgctgccggaacgttgctgatgatctggctggtcaggccggtggtcagcgccgtgtggccttccatcaaggaggccagggcggcatgtaccgggccgcaggccccgatgtttccggcaaacaggaagaagcagaaaaaggtagcaagcaggccatagtccaccctgcgaaacaatccccggtcaaagagcagcagaccgcccgccaccacggccaacagcgccggatagggcagcacccggaataccgacagcaggcagagcgcaaacaggcccgccatcagccccagacggcccggcctccgaagctccgcctgttcctgaaaccggacctgaattccctcatcccggacacacaggagggatgcggccgtcagcgcagccaggctgaccagggtcagcggaagcatggtcccaaaaaactgttccgccgtcaattcgtagtcggcataaagatagagattctgcggattacccaccggggtagccatgctcccaaggttggcggccatggtctggagcaccacaaggggggccaggtattccgtccgtccgatcagccccagcaccagaaccgcaaatggaacaaaggtgatgagcgccacatcgttggtcaccaccatggacacaaagaaaggcagcagcactagggcaaggctgaccaggcgcatccgccgctcccccgccagcaaccgctgggccagcactgcaaaaacaccgcactcctgcagtcccgccaccaccgccatcaggcagaacagaagggtgagtacccgccagtcaatatagttcagataggccggcgagggcggattgagaagcgtggaaactgccgcgcaaaccgccgcgatacagagtaccggctccttccgcagcagggccagccacctccccctcttctcctgaaccatccattcatccccttccaagtgcaaagaaaaagccaccccggcgggtggcctttctctcatgttcgacagccgaatgccatacattagtttactcgcttcccgctctgtggtcaagagcaaagcggcccgccgccccgctctttcacgagtgccggaagtcctccaccacgtcggccagatgtaccggtgacaatcccgcgctgttgcagcattcggccagccggtttacctcctggaagtccgtggatatccgtcccacgcaaatgccattcgtcccccgaattccgtacatctgcgggtgggaggccacatccaggaatacacaatacgtcttgtggttgtttctcatgtaagctctctcctcattcctaatacttttcggtgataaacgactgaattcgaccaggttctctcctttgccgtggtatactaaccgttgcccctttcaaggtcagtgtttttcgaccatccccctatcttgtatttccttccgtgctaatccctatattatgtatttcgagaggaatgtcaatacaattcggttattttgaccggttcaccggatttttttaccacatccggttaactcatgttcgtacaggaggggtgttccatgtccatgaccgaaaaactggcctacatcaagaagctgcgccacctgaccacggaggagatcgcacagcagtcaggcgttccgctggggactctgaacaaaatcttttccggtcaaaccaaaaatccagccgtcgggcctgtggacaagatcactcaggtcctgcgcattcccatacactaccttttagatgacgagcttccgattgaataccatgtcagcacctccacggacgatgggattttactgctctcctcagaggagattcaatttctcatgaaataccgggatctggagcctcacagcaagcgggcggtggataccatgaccgaacttctcaatatgccgcctggccggttggcaggaaatctgccggtcaagcggaccttttgctatgtaaccgctcctcccggggactccaacccattgggtgactccttttttctgcggcctgtactgatccccgagacagatgccgccgcccgtgaggcagactttgccgttctgctcaccaacggcagtatggagccgctctactccgccggaaccattctgctctgcaaaagggagcatgcctcccgccaggaatatggcctgtttcttctcaatcaggaggcgttcattcgccgcctgtactataaacggggcatcaccaaactggtcgcccctaatctgaacttcaaagacattatcatccatgagaacgactctctgaagtgtattggtactatcactggcatcgcacacggatgccggtgggaatagccgggtccacagcccaattcgggctgtggacccgttctgtttacgcccattttctgagcccgtctctcaaaatttacattttaactcttgacactttcgctgcgtcggctactatatggaaggaggaagctatggactttacataaggggatgtcgtgcgatgaataagaaaaagtggatcaaacgcctgctgatcaccttggccgttctgctctgcggctttgccatttttgaaatcatcgtccatgtgctgatggactctgagatgagcagccgggacgattggaacatccagttgggagagcgtatgtataccagtgaggagcggggcgtttccctctactccgccccctgcgaggccagcattcccgtctcccggatggtgccggatgagtatgaggaggacggcttcacctactacgacgagtcggttcagcaccggctggggcaggagctgatggaactggtacagcaacaggggaacgccgccatcgacgcgccgctggccctcctaaatccttttggaaccgggagcaacgggctcctcctcgccttccagacggaccggaaaagcgaaatccgctataccatccacaccaccagcgcagaactgcctgactataccgccacagcgcagggcttgggggacaagcagttcagcaggaagcactgcttcctgctggtgggtctcgtcccgggcgagacccaggaggtgacactggaggccataggcgagtggggcaaggtacaggagcgcgccaccttcaccattgagatgcccccctccagctccggctatgacagccggcttacatacaccgacggggacagcgccgccgcactgagcaacggcctcttctacgccaccggactgggcgattattacggctacaccttcttctttgataactccggcgtgctgcgctatgagatggtactggagggcttccactccgaccgtttcctctacaccgacatgggactctacacctgcgtcagcagccgaaaaatcgcgctgttgacccccattggtcaggctatccgcatctatgacctgggccagtatgaactgcaccacgacatcaactgggggccggacggcaccattctggccctggtcaacgacacggaacaagacaccgtgatggatgtggttgtcgagttggaccccgaaaccggcgctgttaccgagctcgtggatttctccacactgatggacggctattacggcgccatgacccatcccgttcccctcaccggctcctccttctggcaggccggcgaggacgactggctccacctcaactccgttcaatacaggcaggcggacgacagcatcctggtcagctcccgggagacctccaccattgtgcaggtatccggcgtccacagcacaccaaccctcaccgccctgatcggcgatcccgcgttctgggcggggacggagtatgagtcgctctcctatcagccccaaggggattttgtcccccagtacggccagcatgacgtggagctggttgaggatgacagcctgccggagggacaataccttctgcgcatgtacgacaacaactattggagtctgagcacccgggacgactacgagcctgagctgcccgacagtgttggaaccagcctcacaggtgggtctggaatccactcctatgtgacctattatctggtggactccaacgccaaaaccttctctctggccaagcagtttcccgtcacctattccagcatcgtttcaaacgcccagtcctttgacggcaattatgtggtcaacagcggtgtggcccatgaattcggcgagtatgacagcgaaggcaacctgatccgcgccttctcctacgactgtatgatgaatggctaccgtgtcatgaagggtgacttcgagggcttttggttccgggaggcgtcataaacaggcaacagacaagggagcgccgcagattattctgcggcgctccccgttttttgctcatccatcatctggtgcaggcaggccagcgcgtcggacaggccgccgatttcgtcaatcagtcccaggcgcaccgcctcctccccgtagatcacgctgccaacatccgcggccagctccccggtttggagcatcagccgggtgaagtcctcccgttttacacggctgttccgggtgacaaactgaataatccgctcctggatgcgcgcaaagtagttgaaggtctgggataccgcgatcaccaggccgttcagccgcaccgggtggatggtcatggccgccgacggggcgataaaggacctcttggccgacaccgccagaggcacgccgatggaatgcccgccccccagcaccagggagacggtgggcttggacatggaggcgatcagctcggcgatacccaggcccgcctcgatgtcgccccccacggtgttgagcagcaccagcaggccgtccacctcgtcgctctcctcaatggccgccagcaggggcatgacgtgctcatatttggtggtcttggccgaggagggcagaacctggtggccctcgatctgtcctacaatggtcagggtgtggatggtcccccgctccgtccggatggtggaggagcccatatccacgatctgctgctggcgctggtcgccgccctcctcgcttccggtctccgcagtctgcttcgtctcatccatgcccataccctcccaaaatgtcgtttggattcagtatgagccggcgggggcaattttatgcaaccgccgcagcgcgccttactccggaagccggtccagccagcaccccggcccagcggtgccgtcctggttcatcggcagatagcgctggccgatcgcgatacctgttacctccctcggatcgatggctctcgggaaataccatacgatatcctcaccccagcggtccttgtttccaggagcgtaataggtcagggtgtcctcctccgtgaaaaagactgtcctgcggtcgcagtttccgttatatgggatcaccatggtactgccgtccgtcaaatagacggtaagtggaaacccattgcaggtggggtagtccggatcttcaaattgagcgtgtgtctttaggctggtagccgtcagggtgatctcccgtatcacctgcctgtttagcttctcctccagcgcaatcgtgcgctcctgcagcagctccagcgggaagctcagggtccactccccctcaatgggctgccccatggtcagctcgccccatatgtggtcaatgcggaactggccgaaatgctccgccgtcagcgtacggaaccggatatcgtagtacgatattccttcccactggaatgtggtgtggatctccccaatggcgcccacctcccactccacctgcggcatacccgtctgcaggtagccgtattccccgccgacgccgtccgccagccggagttgaatgtgaaaggccccgtcctggtcaaaccccatggaggacaggctgcacagctccgtgcccaattccgccggcgtctggccggggaccagcactgttctggtttcctcccgtttctctcccgatatgtacttctctgtcgctacggtcagggtatccagccgctctccggtcagaagttcccacggaagatgtgcgaaaaatggctccaccgaggggagaatacgggaaaattctaatgtatagacatcccctgtctccatctggcacggagcgatatcgtccagcgcgagggcaaacagtgccgtatcggcttccgcgtcgtaggcaatacagggatcgcggtaggattccagggcagcactttcgtgcagccgctcccccgccagatcctccgcctccaggtatgcagtgcccccattcttatccgccaaaacccgcactacccgcagctcgatgccctgatccgtagccgacaccccctctacctcctgagcgtagggttcaaagctgccgaggaattggatcagcgtttcccgtagagagggtgagaccgcgacggcggtcacggccagagcggcgcagatagccgccgccataaggccggtgcgcagcggacggcggcggttttctctctccgtcatgcgccccgccgcggccaaaattgcctcccgccgctccatactcaggtgaagctccgagagcaccgtctccagctcggcgtgcatgctctgcttattcctgctcatagtaccaccccttcagacgttccctcagcagtccccgggcccgtgagagccgtaccgtcacggtggagaccggaacgtgcagcctctgggcgatctcccaggccttccactcctggtaatagtaaaggatgatcacttcccggtattttggcgggagggcctgtatggcccgtaccagggtgtcgtccggcggttccggtccctccatgcgcaggctgtccaggctctcctgcggtgcccgcagaagcctccacgggctcctgagctggcgcttacacacattgatagcgatacgcaccagccacgtctccacggcacagtctcctcgaaaccccggccaagccctcagcgcacgcagaaaggtgtcctgcaccgcgtcctccgcctggctccggtctcccagatagagcgtacacagccgtagcaggtggtcgccatgctcctccagcagaccggccagatccatggtctctccgcactctgagatgaaaggcttctccacatcccgtcccccctttcacttcctgtctattagaccatgttcctcccccctttgctacaaaaacttttcctactcttcatccgtactagaaccggacggcaacaggctggcatgcaggattgcgagcagttgcgccgtacacggcttttgggagagttcccggcgggccagagtctccaaaagcggccggtttgaattccaaatcacacggcccacggtacggatatcccgctccactgccttccagttcgttccgtattgctttgctacatccgggtagagccattttgtcaccagcagcagacgttccggctcctctgcacagagctggagcgcccgtaccagataagaaaatccggtatagttggccgttgcgcccagccgatacagcagatgatatgcgtcctccgaatgaattttcatactgtccctcccccatcaggcgtgtcgcgcttcctcaccatcgcagagcgcccgcgattcttcccgagatttctgtcctccttcggagagctgcagaagtgtggagagctccattcccagtatggccgccacccgatccagggcgcgaagcgtcgggttcgcacggccgcgctcaatcctgcgcagataaatcacgctcatctccgcctccaacgccaacttttcctgtgtcagcccctttctctcacgcagtacaacaatgattctaccgatttctacaaagttcaacataaaatctctcctgtttccatagcataggagagatcaccagatttgaccagattatatagtatcggtttctctttttttagttttaactttctttttgccgtaaagcaagcgcacctgcggccatcccgcaggtgcgcttgcttcctatgcaaatttacttctcgtagaacgccttgattcccttgtaggtcatatagcagtccagcttacccactgtctcgaagggggcgtgcatgctcagcacgggcacacccgcgtcgatggtgtcgatgtcgcgctcggccatatagcaggccacggtgccgccgccgccggcgtccaccttgcccagctcagccatctgccacaccacgccggcctcatccagcaccctgcggatataggccaccacctcggcagaggcgtcggaggcgcccgacttaccgcgggaaccggtgtacttgcacaggccgatgccgtagttcacccgggcgctgttgcgcttctcatagacctcggcgaagttggggtcgtaggccgcggtcacgtcggtggacaggcagaaggacttctcgtagcaggccttcagcggcacccgctgggcgtcgcacaggtcgctgacaaaggtatcaaaggctgcagatttcatgccgctgacgccggccgagccgatctcctccttgtccgccagcatgcagatggcggtcttaccgggggtgcccagggccagaagggccgccagacatgcaaagccgcacactcggtcgtcgtggccgtaggcgccgatcagggagcggtcaaagccgatgtcggcggccttgaaggcgggcaccacctccagctcggcggagatgaaatcctcctccacgatgtggtacttctggttcaggtagtccatgacggccagctttacccggtcggagccctcgtcgtccttaaaggggcggctgccgataagcaggttcaggctttcgccggggatggcctcgcccaggggcttcttggactgctccacgcccaggtggggtagcaggtcatcaatggtgaactgggggtcctccggcgcgccgccgatggacacggccacggtggagccgtccttcagggccaccacgccccggagctccagggggatggtcacccactggtatttgcggatgccgccgtaatagtgggtcttgaaaaaggccagctccgcgtcctcatagagagggttgggcttgagatctagccggggggagtcgatatgggccgcgccgatgttgacgccctcgctgaggggtctggtgcccaccacggccagcatcaaggccttgccccggttgatccggtacagcttgtcgccaggattgaccgccatgccgcgggtgaagggcttgaagcccttagcctccgccaggcgcaccgcctcggttacgcactcccgctccgtcttgcctgcgtccaaaaacttcttgtagtcctcacaataggacttcatatccgcctcgtcctgggcgctcaggcggtcgtagccgttcttgggctggtagagcagcgcctcgcgccgcagctctcccgccgtcttctgcttctcttccatttgaattcctccttcgtctagttccgattgctcagtatctgctcaaacagttgcttggcacgggcctgaaaggcctccggcgtgtcgtccgcccggttttccaggagataatcgcagtgggtgcggaaaaagccgtccccctgctgggcctccacccgcttccgggcgtagtcctccgaaatcccctcccgggccatgatccgccggatgcgcagttccctgggggccagtatgcccactatcgcgccacaggtctcccccaggccgctctcaatgagggcgatggcgtcgatggccacggcgctccgcccctgctcctccgccccggcggcctgccggtcgatctcggccaggatgaagcggtgggtgatggcgttcagctcggccagggccgccggatcgccgaataccaccccgcccagggccttgcggttgacacggccctccccgtccagaatggaagggccaaaccgggcggtcagctccgcccgcagggtggcgctggactccagcagggcgtggtacaccgcatccgcgtcgatgatatgggcgtccagctccgccagggcctggagcgcggtggtcttccccgccccggtggggccggtgatgccgatgcgtttcatggatggcttcgcctccgtggttcagtatagcatatctcgttccgggtttgttatgtatttgtaaatttccaccgcaggagaggcttcactccgcccgcacgatgtggaagccggcggccttgttcagccggttggccaccgccaggccgataccggcggcggcgggacactgggcccagatgtgggacacgccggtgccgtcgaaccagcgcagggcctcaaagacccggcgggcctgctccggcacgtcggtgctgggccccagctgctccagcgggtggccggcaaacagcccggcgtattcgtcgaagcagatcaccccgtctccgggggccatgtgggcctggatgtagcgggccgccgccgccggggccccctgcaccacggtcaccggggccttgggggcgtagtggcggtacttcatgccgggagcccggggctgctcccccgcgcccatgagccgggtcaccgcaggatcaaccgccacctcacccagcgcgtcccggagctgttccagggtgacgccgccggggcgcagaagccgtgggggcattaccgtcagatccacgatggtggactccacccccaccgcgcagggtcccccgtccacgatgccgtcaatttttccgtccatatcctccagcatgtccgccatgttggtggggctgggccggccggaggtattgcccgacggggcggccaccggcacgtcggcggccgccagaatggcccggcaaaccgggtgggccggacagcgcatccccacggtgtccagcccggcggtcaccacgtcgggcaccacgcgtttccgccggagcaccatggtcagcggccccggccagaagcgctccgccagggcgtaggccgtgtccggaatgtccccgcagtagcgttccagccagtccgccgaggggatgtgcagaatcagcgggttgtcctggggccgccccttggccgcgaagatgcggcccacggcgtctggattcaggccgttggcccccaggccgtacaccgtctccgtggggatgcccagcaggccgccccggcggagaatctccgccgcctcggccgtgtcccgcggctgtagtctttgtgtgtgcaatgtgctcaccttcccgatggttcagcttctcccgatggaactgccgatgtgcttttccttccgccactggggcgggggcccatcgtccgcccagtactcatctaagcgggtgatcctgccccccgcgaaacggaaaaaagacaccgcatgaaaacgggcgctcctgtccttcggccacaccgctgcgaccgaaacacaaccgtcctccgtccattccgcacgctccaccgcgccctcccagtcccctgggtactcacagttggcccgaatgtattcctccgccgtgaagcgctcgtccgtgcagtgccaatacacctctgcttccggcgcgaaccactcccgcagggctgcggcatcctgccgcgccacgtccgcccaaaagcgggacagacgctcccacagcgcggcatcttccctgctcaaaaacgaactccccttccatgccgaacccgggcactccgtcgtgcgcttccctccacgatggtcagcacgcccgcggccagcagggccgcgccagagacaatctgtaaaatgccgatggcttttttcataaaaataccctcccctgcttattcgtagatgcccaccggcgtcccggccagctcgatggtggtgtccggggcgaaccgggccttttgcagataacccttcacggtgagaataccgtacttggggttcaccttctcgtcctccagctccagctccagatagtccgcccctgagccggtcagccagccgtcgtcctccagcagctccgccaggtcggacttcaccatatccagggtcagcttctccggcagggcggtaaagtgaatgatcaattccacgctttcttactccttttctcagccttgtgcgctgttttttggccgtccccgccttagccgtcctgctcccgagccctcagccgctccgcctggtcggcggtcaccagcgcgtcgataatctcatccagatcgccgtccatgacgctctccagccggtacagggtcagcccgatacggtggtcggtcagccgcccctgggggaagttgtaggtgcggatacgctcgttgcgcatgccggtgcccacctggctgcggcgctccgccgtcaccgcctcctcctgctcccgcaccttctcctcgtacagacgggagcgcaggatctgcatggcccggtcccggttctggaactggctgcgctcctgctggcactccaccaccgtgccggtgggcttgtggatgagccgcacagcggaggaggtcttgttgatgtgctggccgcccgcaccggaggagcggaaaacctgcatctcgatgtccgccgggttgagctcgaagtccacctcgtccacctcgggcagcaccgccacggtggcggtggatgtgtggatacgcccacccgactcggtctcaggtacccgctgcacccggtggacgccgctctcgaatttcagacgggaccaggctccgtctccctcaattgtaaagcagatttccttcacgccacccagttccgtctcgttgaccgagtccacctccacgcgccagcggcgggcatcggcgtacatggagtacatgcggaacagggagtgggcgaacagagccgcctcctccccgcccactccggcgcggatctccaagatgacattcttgtcgtcgttggggtcccggggcaggagcagcaccttgatctcctcctccagccgggccagctcctccctggcctgctggtactcctcctgggccagctccttcatatccgggtcgcccatcagggcctcggcatcctccagatcctgccggcggcgctggtaggcccggtaggccatgaccaccggctccagctcccgctgctccttgttgagcctggccaccagcgcggggtcttcataggtctccggcgcgctcaggcgggcctccacatcggcatagtggagatccagggcgcgcagcttttccatcatttccaagtcatatcacctgtcaaacaaaaaggactttaccagtgcaaagggttcccgaatatacatcttcagccgggacggcacatgggtgcagggggccgccagggtggacagctctcccgctccgccggaggcgcgctcccacagcatacgcgcccgggtgaggtggaagccgctggacaccagcaccacgccggcactcgtgtccgcccccttctcctccagcagcgccagggtataccggacattctgccaggtgttgtgggactggtcctcctgccagatgcgttccggctccacgccgtattccaccagatagtcgtacatggcctgcgcctcggtagtgggttcgtcggggccctggccgccggagaccaccacctggacgtccgggtgctcctccaggtaatccagcgccttgtccagccggtcctggagcagaatggacggcccccagggcttcacctggcagcccaggatgaccatgagcctgggctcgccctgtatgtggtcataggcaccatacatcaccgcgccgaatagggcgccgaaagccagcgcccccgccagcagcagggccagcacggccttccgccacaggggccaccgcttcccctcatagggacggtagcagctcttccttctccggttcaccctcgggcctcctccaactcggccgccagcgtctcccacttcgtgtaaagcgcggcgatctcctcctccagggccttctgctcgtcatagaccttctgcagctccagatagttggaggccacctcctcggccttgagggtcagctcgtattgccgctcctccgccttggccaccgcccgctccgccgcggccacctgcttctccagctctttggtgccgccgggacggcggggcttttcctttttcggcttctccggttccgccttgacgaggaccgcggcctggagccgtttccgctcctgggcggcccggtactcctcaaaggtcccccggaaatcaatgatctgtccgttctccagcatccagatacgggtggcaaagcggttgatgaagtagcggtcgtgggagacaaagagcagattgccctcgtagctctccaccgcctcctcaatccactcccggctggccacgtccaagtggttggtgggctcgtccaggatcagcagattgatcttctcgtccatgagcatacacaggcgcaggcggctctgctccccgccggagagggcggacacgggcttgaacacgtcctccccccggaagttgaaggccgccagccgattgcgggccgtctgggtggagcagtcctggtcgtagatcatggtgtccaccagattgcgctccgggtgggagaagcggatgatctgaggcaggtaccccacctttacagtcggtcccatgcgcagctttccggagtccggctcctcttcccccagcaaaatcttcagcagggtggacttgccggtgccgttgtcgcccagcagggcaatgcgctcgccgccgatgacctccaggttcacgtggtcaaagagagtgcgcccgtcaaaggacttcttcagctccttgatggtgagcacctcgtccccccggaactcgctctccccgaattttatgtctaagcgccgctccttggtgggcttgtcggtggtgcggatgcgctccatgcgcttttcgatggaaaaggcccgcttgtgcagcttgtcgttgcccataaaagcccacaggtgcagcttgtccgccgcctcttggagctgctcaagcttggcctgctccttctcgtactgcttgagcttctcctcgtagcgccgctccttctcctccacataaaagctgtagttgcccgcgtaaaactccgccttgccgtcgtggatctcgataacccggcgcaccacccggtccaggaaccagcggtcatgggagatagccagcacggtgcccttgtaacggtccagatactcctccagccactcggtggcccggagatccaggtggttggtgggctcgtccagcaggaggatgtcggtatcctccagaatcaggcgggccaggttgacccgggtcttctccccgccggagagcgaggaaaaaagctgcccccgcatgtcctgggaaatctccaggccattgcacaccttattcagctccgtttgggtatcgtagccgccccccgcctcaaaagcggcggtgagggcgtcgtaccgcctgagcagggcggggtctgtgtcggcgcccatctgctcggcgaggcgggccatctcggcctccatggcgtgaagccggtcaaaggccgtctgaagcacatcctccacggtgtaggcgggcgggtaaaccgggatctgtgagatgaggcccacccctttgccgggggccacatgcacttcgccctcatcccagtccagctccccagtgaggattttgaacagggtggtcttgccggcgccgttcttgcccagcaggcccacccgctccccctggtctacctgaaaggtcaggccgtccagtatctttttgcctacctcgaactccttggacaggttcgagacggagatatcaatcatttgtttactcctgttgtccgttgtgatatagtgaaagacgaaatcaaggaatggaggttttccctatggacgccatccgatgggaaggaaataccctttacctgctcgaccagaccaagctccccgtgaccgaagtgtggctcccctataccgattaccggccggtggccgatgccatccgcaccatggtggtgcggggcgcccccgccatcggcgtggccgccgcctatgcctactgcctggctgccctggccggtgagggactggacgaggccaaggagacactggccgccagccgacccacagcggtcaacctgttctgggccctggagcgcatggaacgcaaggcaaaggagtgcggcggcgcggcagaaccgctgatcgccgaggccaaggccatccacgccgaggacgtggccatgtgccgggccatgggggcccacggggcggcggtggtgccggagcacgcccgcatcctcacccactgcaacgccggggccctggccaccggcggctacggcacggcactgggtgtcatccgcgcggcccatgaagctggtaaagtaaatatggtttactgtgatgagacccgaccgctcctccagggagcccgcctgacggcctacgagctggtatccgaccacatccccgccaccctgatcgcggacaacatggccgccagcctgatggccaaggggaagattgacctggctgtagtggggtgtgaccgcatggccgccaacggcgactttgccaacaagatcggaacctactccgtggcggtcaacgcccattaccacggcattcctttttatgtggccctcccctgctccaccatcgacctgtctctggccgatgggagcggcatccccatcgaggagcgggacagggacgaggtgcgcaccctgtacggcacccgcaccgccccggagtcggtggaggtctgcaaccccgctttcgacgtgaccccccacagtctggtcaccggcatcatcaccgagaagggggtcatctacccgccctttcaggagaatctgcaaaagctgtttggataaagacgggccgatgggaacaccggcccctgctggccgccgggcggacacccggcggcccttttatgcctcccctgtgatggtgagcagataatccaccagctcctccagcgccatgccgcgggaggccttgaccagaatggtggcatggggccgcaccacgccgtccagcaccggcctggcctccgcctttgtggggcagtaatagcactccggcacgccggcggcctgggctgcgtcatggatgtgccttgccagctcgcccaccgccaccaggcagtcgatgcccgccttgcccaggtagtcgcccacgccggcgtggagggcgggggccaggggccccagctcgaacatgtcgcccagtacggctaccttatacgctccccgggcactggagagcacttccaccgccgcccgcatggactgggggttggcgttgtaggtgtcgtttaggatggtgatgtcatcgccccggtggagcaggttcatacgcattttggtgggggcaaagtggagcacgccgtcggcaatctgcgtctgcgtcaggccaaagtgctcccccaccgccgccgccatcagcgtggggtagatcatgtggtcgcccagggcgggaatctccacccggaaagagttgtgaggtgttttcacttcacaggtcatatgactcttgccgtcgctgaccagcccctccgcccgatagtccagcccctctccggcgcccacgcgggtgaacgcataggggagcttccccggcagggtgttcagcaggggatcgtccccattgatgaccacgaaggcgccggacttgacatggtggaagatctcgctcttggcctccaggatcttttcccgggagccgaagtgctcgatgtgggagtcgccgatgttggtcatcagcaccacgtcgggctccaccagggcggagaggtagtcgatctccccggcgtggttcatgcccagctccagcacggcaatttcgtgctccccgctgaggcgcagcagggtcatgggcacgccgatctcgttgttcaggttgccctcggtcttgagcacccggtacttctcccccagcaccgccgccaccatgtccttggtggtggtcttacccaccgagcccgtcagggccaccacaggtatggggaactttttcttgtaatacttggccagatcccgcagggcccgctgggtggagtccaccttgatatagaacttgcccggcagatagctctcccgctcccgctgggtaaagcagcccgcagcgcccccctccagggcggcgttgatgtaggcgtggccgtcgaaccgctcccctaccaggggcacaaagagggacccggcgtggatggtgcggctgtccgtctccacccgtcccaccatccggttgatatccccaaactctcccagcagcttaccgccgaccgcgtccatgatttcacgtatggtcatcggctccataatccgtttccgctccttatcttccctgttttcgggcctccagagaggcgtgcacaatgcgctggcacagctctttgtagtcaatgcccgccgccgcggcctcctggggcagcaggctggtgggtgtcatgccgggcagggtgttgatctccaggaaccagggctccccgtcctccgtgaggatgaagtccgcgcgggagtacaccgacagccccagtgtctcgtacacccgcagggccgcgacccgcacacgcgcctcctcctccggagtaatctccgccgggcagacctccagagcggcgccgggctggtacttgttggcatagtcgtaaaagccctgcttggggatgatctcaatggagggcagggctttatcctccaggatgcccacctggatctcccggcccctgatgtactcctccagcaccgtgcgcccacccagggccagtccttcagtgagggaccggcgcagctcctccgccgtgtgggcgatggatacaccgatggaagagccgctggccaccggcttgaccaccaggggcaagcgggcagtctctaccagtcggtcgatgtccgcggcggtgtaggtgacggtcttccagccgggggtggacaccacgtcggccaccatccgcttggtcagatccttgtccatggcgatggcgctgcccagatagcccgcgccggtgtagggaattcccatcagatcaaaggcggcctgcacccgcccgtcctcgccgcaggtgccgtggagggccaggaataccatgtcggccatccggcacagctccagcaccccggggccgaacatgctggggctgtcccccttccggccgcgccgcacctgatccagatccggagcctcgcggctgattttcttgtaggcctcggacacaggcgcgtcaaaaaatgcctcgtccgccccgcccgtctccaggccgaaatataagtcgatcaggcccgcccggtggcccagcgcccgcagcgcctcggtcaccatggttccagtggagagggacacattccgctccggagacagtccccctgccagcacaacaattttcatagcacacctcgttcgagagtttgatacaatatgatacgcactagtggtatattatagcacggttccggcctattctcaaccttctttcgaaccttccccgtccaattcttgcaaaagcacctcctctgtggtagagtagagcggagattggggggtgcgctgtgaaaatcgcgtggtatgagccgctgtttttcctcttctttggggcgtttcatctgcaccgtgtctgggggctggcggaccgggagagctacgccgccttctggctgggggttctgacacaaaagggtcccctctacttcggcctgatgggccttctggccgtgctgtgcctggcgggcgtcgccaccttctttcggaattggggccgcaatccctggtggcggtggatctacctcttcggcggcagctatgtcctgttcgatctccttgccattgccgccggcctgtccttttggcactccctgctggcctggatgtttgatgtgacctccccctgctggaattttctctggggctttttcgtcctgctgggcggcgcctcagccgccctgggtctctcgcttctggtgcgccgcacataggcaatgggccggttccctacggaaccggcccattctctctgttcagagttcagaaccagccgccatcccggctgtcctgcagctccagcgcgccgcacaacagctcagccgcctcgcccctggtaaggggggcactcagacctccgtccagcgacagtacgccgcaggtggcaagattggcggcagactgggccgcccaggtgggaatcccctcctccgccagcgtatcggcggacacgtcagtcacctgaagggcccggtccaggagcaccgccgcctctgccgcggtgatgggctcctccgcctggaacactacctgcccatcgctggagcggctgccctgcaccagtcccgccttcagcgcggaggagacatagggcttggcccaggtgggaatcgacacatcgtcggcaaagccggtgcgctctacgtcctccagggcttccataccggcggcgttcatggccatagccacgaattccccgcgggtcacagcggcgtcgggctggaagaaataggccccacccatgcactcgcccacgaagatcccctcctctgccagccggatggcagccttatgggccgggtcgccgtccatgtcggcgtaggtgaccttggtattcggcttttcaatcttgatcttaacggtagcggggtcggaggagttgcccaccgcatccaccgccacataggtgaaggagtccttgccagtcttgttttcatagggagtgtagacaaattcgctgctgccgtcctccggcatggtcaccgccccgcgggcgggcttgttgaggatatgatacgtgagcagatccccctcggggtctacggcggaaaactgggcagtcaccgccacatttttgtaggtggtgagctccaggttttctgctaccggcgcgccgtttgcctcggccagcaggtagagttcaacggtgacggcatcgccgctccgcccgtcggaaaagaccggggtgaactggaactgagcctccaggccggccggtgcggccagaggggtgaagcgcagtccgtccaccgcctccatagcaatcacgtcgcccacctggatgccctgagcgcccagggtgagacagccgaccgcggcatccggcagagtcgcgatcacaatgctgtccagcttgccggagccttccacaacgaagtcctcctcagaaaaggagatgggttccgccgccgggccatttttggtcatggccgccacggttgggaccgcctcatccttttggaagaaaaaggcagatgcaggccagccagcggagtacaggaccgccgccagcactgccagcggcagagcgcggcgcagaaggacgcggtgtttcaagacaattacctccttgtttggaaatcatccgtagtctttgccaaatcaaggagaatatacggcggaggccatccaaatcggacagctcccgtccactggttcaaatacggctccgatcccgcagccagctcggaagggagcgcattttgatactggagataatgcccatggccgcaaacatggtgacgatggaggtgccgccatagctgatgaacggcagggtcagccccacaacggggaacacatagagacacattcccacgttgactccaacctgggccaacagcatccctgcgtaccccatggcgatgaaagcgctttgaggcgagcaggcccgccgcgccacccaaatgcagcgggcaataatcgctcccagcaggagcagcagaacaatacacccgatcaggccgaactcctctccgcagaccgcaaagatctcgtcggtgtgccgggcgggcagggcagactcagagaggctctgggtctgaatccccttgagataccccatgccgaacagccccccactgccgatagccaggatgctgcgggtctgctgaaagccctgtccctgagtctgttcgctgatggtctccgtattgcccataatatgatcaatgaccacggtgatacgccgggcgaagtacttgtcgctgatgtggggccaaatgagcacggcccctatgacacaaaccacaatggccagcaggaaccaccgttttttcaccccgcccgcccaggccatgatgacaaagataaaggcataagtcagcgccataccgaaatcgccggaggtcgccacaatcaacccgatcatgaccagggtgtggcccgccaactggaatacggaggaggggcggctgagtccccgctcccgctgccggttcatctgccaggccagcagcagtacgaaggtcagcttggccagctccgccggctgcagattgaccggaaagccgggaatactcagccaactgttgttgcctgtctcatccgcgccgatccccagtggggtcaggagcagcaaattgatgaacagtccaaacagaaagagccatttccaggatttttccgtaaacagctcaatatcaaccgaggacatggcgatatagacgaacacccccagaacgatgcccaccgcctggatcagcatgcagcgcagccccgccgagtggttcatataacgggtggcgctgtaaatcagcaccatgccgaagccgctggccagcaggcagagcgtcagcaacagccggtcgccccggtgtataaattcgcggatcgaatcggtcagccagttcaaccacatccctcccttccaaaaccgtgcttaaaatcaatttagtttaccatcttttttgcgtttggtaaacgggtgtggtataatatttaagcgaattttcacattcgaggtgttatatggaatatatatccaactccccagcagagaccgaggcgctgggcgaggcgctggccgcccggctgacggcggggacggtggtcgcctttaccggagatctcggggcgggaaagaccgctttcacacggggactggcccggggattgggcgttcccgaccgggtcaccagccccacctttaccattgtcaacgaatatgaggggggccgtctgcccttgttccactttgacatgtaccggctgggctcctccgacgagctgttcgacatcgggtgggaagactatctggcccggggcggcgtgtgcgccgtggagtggagcgagattgtcagcgacgcgctggaggacggcgtgctccgggtggacatacggcggggagccggtgaaggagagcgcattattaccatcacgggagggacggacgcatgaaaatattggccctggagtcctccgccaccgcctgctcggtggcgctgtgtgaggatgaggctctgattgcccagtccttccagaacaatggcctgacccactcccgcaccctcatgcccatggccgtatccctgctggacaactgcggaaccgccttggacgcggtggagctcatcgccgtggcggccgggcccggctccttcaccggcctgcgcatcggcgtcgccgccgccaaggggctggcctggccggggaacaagccctgcgcggcctgctctaccctggagtccatggcctggtgtctggcccacctggacggggagatctgtgcagtcatggatgcccgccggaaccaggtctacaacgcccgcttccgtgcggcaggcggccgcttggagcgcctgtgccccgaccgggccgtgggcctggacgccctggccgacgagctaaaaaagagcgggaatccacaatttctggttggagacggcgcacttttatgctatactaccctcaaggaactggggttggacatccggctggcgcctccccacctgcggcatcagagtgcctggggggttgcccggtgtgcactggagctgaccagagcgggcaggctgaccgacgcggccggactgacgcccaattaccaccggctctcccaagcggaacgggagcggctggaaaaagaacaacacaaaggggaatcgtgccatggacatggaaaaagtacacattttggaccaccctctgctgcagcacaagctgtccatcctgcgggatgagaacaccggagttaaggacttccgtgaggtggtctcagagatcgccacgctgatgtgctatgaggccacccgcgacctgcccctggaggcggtggagatcaaaactcccatcaccaccgccaaattcaaaaccatcgcaggcaaaaagctggccattgtccccgttctgcgggctggcctgggtatggtggacggcatcctgacccttattccctccgccaaggtgggccatatcggcctgtaccgggaccccgacaccctggagccggtggagtactactgcaagatgcccaacgacatcgccgagcgggaggtcatcattctggaccccatgctggcaaccggcggctctgcctctgcggccatccagtttatcaaaaattatgaggtcaaaaatatcaagcttatgaacatcatcgccgctcccgagggcattcagcgggtccaccacgaccaccctgatgtggatatctactgtgccgctctggacgagaagctcaacgaccatggctacatcgtccccggcctgggcgacgccggtgaccgtatcttcggcaccaagtaaaaaatccataagcatgcggcgcgggcatctgcccgcgccgctccagtatcaagagggccaccccatcggggcggccctcttcagcctgtctgtgtttacttgctgtgcttctcctgaaggtactggtgcatggactcggcggccttcttgccggcgcccatggccaggatgacggtggccgcgccggtgacggcgtcgccgccggcatagacgccggggcggctggtggccatggtctcctcgtccacctggaggcagcccttccggttggtctccaggccgggggtggtggagcggatcagggggttggggctggtgcccaggctcatgaccacggtgtccacctccagggtgaagttggagccctccaccaccttgggggcgcgtcgtccgctctcgtcgggggccgtgaggcgcatcttcacgcactccaggccgcccacccggcctgtgccgtcgtccagcaccttcaccgggttggtgaggagcatgaactcgatgccctcctccttggcgtggtggacctcctccttccgggcgggcatctcctcctcatcccggcggtagagcacgtagacgtgctcggcacccatgcgcttggcgcagcgggcggcgtccatggccacgttgccgccgccgatgatggcggcggagccggagatcttcaggggggtgtcgtacccctcccggtaggccttcatcaggttgatgcgggtcaggtactcgttggcggagtacacccccgccagggtctcgccctcgatgcccataaacatgggcaggcccgcgccggaaccgatgaacacggcctcatagccctcctcaaacatttcgtcaatgtcgaaggtcttgccgatgaccatatcggtctccagatccacgcccagggcggtgagcttgtccacctcgttctgcacgatggccttgggcaggcggaactcggggatgccgtacaccagcacgccgccggcggtgtggaaggcctcgaagatggtgacctcgtagccgtgcttggccagatcgctggcgcaggtcaggctggcggggccggagcccaccaccgccaccttgatgccattggtctggggcttctgaggcatggcgttgacgttctcccggtaccaatcggccacaaagcgctccagccggccgatggccaccggctcgcccttgatggcccggacgcaccgggcctcacactggctctcctgagggcagacacggccgctgacgctgggcagggcgttggtgtcggagataatatcataagcggcctggaagtcgccctcggccactttggcgataaactcggggatgcggatgttgaccgggcagccgcccacgcagggcttgtgcttgcagttgaggcagcgggccgcctcttccatagccatctccttggtgtagcccagggagacctcctggaagttgtggttgcggacattgggctcctgttccggcatgggaaccttcttcaaactcatattcggcatggtattcggctcccttcctcagtgatccatcagctcatgggccaactggtccatgcggcaggcgtggcgctccttctcttcggcctcctgggcgcggtagacggagttgcggttcatcagctcgtcaaagtccacctcatggccatcaaagtcggggccgtccacgcaggcgaacttcatcttgccgcccacggtgacgcggcagccgccgcacatgccggtaccgtcgatcatgatgggattcaggctgacgatggtcttgatgccatagggctcggtggtcttggagacaaacttcatcatggggatagggccgatggcgatgacggcgtcatagtggatgccggaatcgatcagctccttgagcttcacggtgacaaagccctgctcgccgtaactgccgtcatcggtcatgatgtagaggtggtcgcaggcggacttgaactcgtcctccagaatcacaatgtccttagagcggaagccggcgatcacgtccacctccagcccctcagcatggcaggtcttggcctggggataggcgatggcgcagcccacgcctccgcccaccacgcagacacgctttgccccctcgggcagctctgtgggcagccccagcggaccgacaaagtcccggatggagtcgccttcgttcagctcggccagcagctcggtggtcagccccaccttctggaaaataatagtgaccgtccccttctcgcggtcatagtccgcgatggtcagcggaatgcgctcgccctgctcgtccaggcgcaggatgatgaactgccccgccttcgccttcttcgcgatcagaggcgcctccacctccagcagggtaacgctggggttgagtacttttttatgtacgatttttaccatgtgacttcaacctcttcttctctacggtctgatctaacttactaaatggaaagtgacgccatacgtcaaaataagactggccggtttagaaattccttactgccgcaaggctttccggttcctcagtcttaacgcgataacgatatcagttttcttttactttgtcaagacagaataaacgccgccgcataatttatacggcagcgttcagcctgttacctccgctcaaccggccagcggagggtgatggcaaacatatccccctccagagcggcctccgcccggcagtccatctgcccggccagcgctttgacaatggccaggcccaagccggtgttccggccggtgcgcatcttgtcggaggtaaagaagcggtcgaacacgtggggcacgtcctccgcagtcagggcgtgggtttcgttggaaaaccggctgaccacctgcccgccctcctggtacagacggatttccatgcgcccctctccatgctccagagcgttgcggatcagattggtgaaaatccgcagcaccgccccggcgtccgcccacacctggggcagcccctcggccaactccacctccatgtcgaagcccctgtcggtgaaatcgttgtaaaaggccgccagcagaccggacagagaggcgtagaggtccaccttctcccgctggagcaggtactctcccccctccagccgtgagagatcataaaagctggtaatcaggctctggagcgccctggcccgccccgtgatcaccgccagatattcccgccgctccccctccgtcagtccggggtcctccagaagctggagatagcccaggatggaggtcaggggggtgcggaggtcgtgggagacattggcgatctgctggcgcagggcgcgctccctcgcctggtaagcggccctgtccgcctggcgcagctccagcaggcggttcacctcgtccagcagctcctccgccgcgctgttgggtacggccagccgtacgcgggcggtactccccgtatcctccagcgcccggagccggtacgcggcctcccgcagggagcgccgctgggcccacacccaaaaagccagccccgcacagagcagggccagcagtatacacatgatcagcacgcggaaacctcctccctagcgaacgtctctccggccaaacagaaacagccccagccccgtgctggccgccatccatcccaggccgatgccccagcaccagagctggtactgggcggtgaaccagccatccagcagcgcgggcatcagcagcgaatagggcagcacaaccgcagtgaacagggtgaacggcgcagacgcctcgtacacgccgaacaacagaatcgccagaaacaccagcaccggctgtcccatgaaaaacatcaggtaatacccggcggtccaggcggccggactgcgcaccgccagggccaacatatggcacagggcaaacatgccgcaccagataggcagggccccggccaggcagaatcccaccagagccagcccctccagggcctcctccggctccccccggggcaggaacagccacccgccggccaggctccctcccaccagcaccaggcagaaggccagccccaacagcagggcggcgcacagctttccccaatagaccgtcccccgccgcaggccgaaggagagctcatttttcaaggtatccgccgtgccgccatccacaagttgcaccagcaggggcgcggccagcatgcccaccaccatggtgaccgaaatccccttcgccaggcttgaaaagccgccgtagctgtagagcatgaaaaacagggccgtacacagaagcaacagggccagcaggacatagacgccgcgccggtggaggaccttccacagctccgccttaatatagttgagcatggactcccaccttccccatttatcggatgtcccggcgggcaaataacgccagccctgccgctgcggcccccagggtccacagcagtcctacgccccaggtccagcccagccaggccgggctccagagagggacctccatcacgtccatgggcgcggtgagcagcaggtgatagagcatctccgctccgcgggccagccagtccaccccggtgcgcattaccatgcgcaggacagaactcaggccacccaggcaccccagcaccaccaccatcatggggatggtatgggcgagattgaacatggcggccactgtcagggagagggcccccatccagaggggcagggcacccagcaggcggaagaggaaggtctggatctgaacccagtctcccaccgctccagggagcagtacccggcagagcacggcatagaccagcagggtcaggaaagccagcagaagaccaatccctgcggcggtgaccagcttgcccagatagatgcgcctgcggggcaggccgaacgagacttcattcttcagggtatcattcttatattgatcggaaaagacctcgtccgccacgaccaccgccagatagaggcccaccgtgaaaaagggggtcagcagggacaggctatctccgaagctgccctgaaacatgtcgccgaggccgaaccgccacaggaggggcagcccggcggccagggccagcaggaccagcaggaatgcccggaaataagggcgggccaccgccctgccccattccgcggtcaggtagtgcttcatgcgctcccctccctaccggatctctttccggcggaaggccagcaggcccactgccgtggccgccgccagccacgccagcccggcggcccagcacaggcccacgtagttccactgaaaggccatgtttttcaaattctccagcatgaccccaggcataaactgccgcagcacctcaaatgccgggtggaacaggattccaaacgcctgtagaatggcgggcaataccgccagcagtcctgcggccgtgaacgcggctatattcgtgccccgtaccaggaaatagcaggtattcaccatggcctgggcggccagccacaggggaaacgcccccgccaggcagtagccgatgagctgccaggccatgccgtccagctctgtatgggggaacagcacccagcacagccccagatagaagcccatcatgaccactgcggcaagcaccgcgatgcccgtagacacgagcagcttgcccaggtagatacgcccgcgggacaggccgtaggacacctcattttttaatgtattgtttttatattgctcggagaatacgatatctccggtcacaatcgtggcatacaggccaatgctcagcatgaaaggcaccatgatggccgtggaatagaagtccacgttggaatttccccacttccaggttgtccagtaaccccacagcagcaccgcctccaggcccaggcagacggccaggatgatatagaaatattttctgcggaaggtcttgtagcactcggcggccagatagttacgcatggcggacacccccgatcatggacaggaagtagtcctccagattggcaccccggctctcgatgctttggagcgccacgcccccttccaccagggcctgagcgacccggtggggcgcgtccagactgctgtagatgcgcagcaggtggcctggcagcacctcatagtcgcggatgcccaggctctgttccagcaccagggccgcgcgggaggcatcatctaccctggcctcaatacaggcgcggcacttttcctccagcgcccgggcggaaatctgctccagcatcatgccgttgtccaggaagccgtagcaggtggccagattggccagctccgacaggatgtggctggagatcagaatggtggtctgccgctcctggttgagcctgagcagcaggtttcggaactccacgatgccctccgggtccagtccgttgatcggctcgtccagcagcaggaggtccggccggttcatcagcgccagggccagccccagccgctgcttcatgcccagggagaagttcttgaaggtcttcttccccgtgcccgccagatccacctcctccagcacctcgtccaccacccgccggcctggaatgccccgctggatgcggtaatactccaggttctgccgggcggtcaggtagggatagaagctgggcgtctccaccatggccccggtgcgggcccgcattttggacagctcccgttccccggaggcgccaaacagggaaacctccccctccgtcggtaccgtctgggccgtcaccatccgaatgatcgtggtcttgcccgcgccgttgcggcccaccagcccataaatctgccccttctggatggacagctccacatggtccaccgccagatgattgccatagcgcttggtcagcccgcgggtcaccaatatctcatttgccatttggcatccgcctttctcattgatcttgacgccagtataatggaaaggccataatctgcctttaagcaaaggtgaagaatttcttaaccggagcggccgtggggccacattacagatcgctcattttaaagccgatgccccacaccgtcttgatatactcggcggggctggccttggccagcttggcgcgcaggttggagatgtggacgttcaccgtattgtcgtcccccatgtactccccgccccacacctgctcgtagagctgctcccgggtaaacaccttcttggggtgctccatcagcagggtcagaatatcaaattcccgtgcggtgacggtgacgggcttgcccgcggctgtgacggtgacgctctcccggtccagggtcaggtctccatgggtgagcacggcgctcccgcccccgccggagaactgcttgtagcgcctgagctgggcttccacccgggccagcacctccgcgttgtcaaagggcttggggatgaagtcgtccgcccccagccggagcacgttgacccggtcctccaggcccgccttggcggagaggacgatgatgggcatggtcttcttttggcgcatctgggcgatgaattcctcccctgtcaggccagggagcatcagatccagcagcaccagatcgtactcgtattgtccggcccacagggcggcctcgctgcccgaaaaggccgggcggcaggcatagcccgccccctccaggatgcggcagagcagcttgttgatatcggggtcatcctcgaccaccagaatgttgcagatatccattctatttcaccctcagtcgtttggccagctccgggtccgggtccactacggcggtctggtaggtcgtatagaccaccatgcccggccgggcgccggccggcttcttgacgtactttaccggcgtatagtccaccggcacccggctcccctctcccgcctgggagaaagtggccgccagaatggccgcctcggtaagactctgggcgtcggcctcgcccccctccagccagaggatcacgtgggaaccgtggatcttctgggtgtggagccagatatcgctcttgtaggccagcttggtggtgagctgatcgttctggctgttgttcttgcccaccgagatgcgcagtccggcagaggagcggaactccatgggctttccgctcacccttttctgccgcttcgccgccgtcttgccccggcggaggtagccggtctccaccagctcctggcggatctcctggagatcccgctccccctccgccagggacaggttttccaggacgctgttcaggtactccagctcccgcgtccccttttccagttggatggtgagcatctgttccgccgtcttggccttgttgtagtccttatagtacttcgccgcgttctgctggggcgccagaagggggtccagccggatctccacctcccggccctccgggtcgtagaagtccaccgcccgcaatacctccatcccccgctccatggcgtggaggttggaggtgaggatgtcccccagctcccgcaggcgctcccgatccctggtagcctccagctcccgggtctggttggccagcttgcgggccgtgcggtcccgggcgctggtcaccgccttgaccaggtcctgcccccgctggcgcacccggtcggccgcctcccggcgctcgtaaaactcgtccagcatttgggagaaggaagcctggggccggctttccgtctccgggccatactggaggatgggcagaacggtgaaatccaccggcttgccctcccgcaccagcaggtaaggtgtaaggccattttcgtttacattgtttttgagtttctccagctccgccgccagccgctcccggtcgccgccggcgcggaaggccagctcccgcgccaccagaggcgacaggccggtgaagctgtccagcaacagcttgtcccactccttgcctagggggttctccagcaccaggcgcagctcctccggctctatcgtaaagggattcagcttgtcgggcgccggcggctggcgataaaacaggccgggcagaagctgccgctgaccccggccaaggtcaccgtccacccggcggatgcagtcgatgatgcgcccctccccgtccagcagcaggaggttggcgctgcggcccatggcctccagcaccaggcggcgctccacccggtcgcccagctcgtccagggtctccagccggaattccagaatccgctccagaggcggctggttcagctccagaatccgcgccccctggaggtgtttgcgcaggagcatgcagaacatgggaggctgctccgggttctcccggtttagggtggtcaggttggcccggggatggccggggttggcggagaggagcaggcgcacgttctccccctgcccccgtacataaagcaccacctcgtcccgggtgggctggtagagcttgtcaatcttgcctccggccacggcggcacggagctccgcggccaccgccgtgaggcacagtgcgtctaacggcattcctcttcctccatgatcacagcaaacagttggttgagccgctctgtgcggccctgaagccacagccagccgaacagggcctccagcccggtggcggcctggtaatccgcccggctggcgttctggggcacgctgtgggggctggtattgcggccccggcggaacacgtccccctcctccccggtgagcagggggagaatccgctccaccgcccgggcctgggccggggcggccacatagcggacggtggcccggtggaggcccttggaggtggccttgccgtggaggcacagccaggagcgcaccatcagctcaaacacgccgtcccccaggtgggccagccccaggctgctgatggcccgtacggtgtcgggcgcggcattcagatggaaataatcggtcataggtatgttcctcatttatctctcgaataataggatagtataacgcaaatccccacagaaaacaacaaggaaaggacgacccgccatggatatgcactatccctaccaacttcccccgctgccctatgcctacgaggctctctctcccaacatcagcggcgacacgctccactttcaccatgacaagcactttcagacctatgtggacaacctgaacaccgccctggccgactgtcccgagtgtcagtccaagccgctggatgagctgctcaaaaatctggaccggctgcccgaccccaaacgcaccgctatccgcaacaatggcggcggggtatacaaccatctgctctacttcgacggcatgtgcgcctgtcacagctcccgcccctccggcgggctggccatggccatggagcgggacttcggctcttttgagggttggaaggaacagatgaaggccgccgctctgggccagttcggctccggctacgcctggctggtgagcgagacctcgggaaagctgtccgttatgaagctgcccaaccaggactgccccctgtccatgggactgtggccggtgctctgtctggacgtgtgggagcatgcctactatctggactaccagaaccgccgggccgaatatgtggaccgctggtttgagcgggtcaactggcccttcgcccaagagcggtatgaggggtgcaggcaataaacaaggagcgccgccctattggacggcgctcctcgtttatgtgcgcatcagacgggtcagcacctgtctgcaaggccggaacagcaccagcgccatggcgaagtttccggcgcagtggagcagatcgaaggggatgccgcttacccaccaggacagggcgaaggcccatcctccggtgacccagtacactagggcgcacagcgccccgaagctgagcccgaaggccccggagagcactgcccagccaaggggagactccatcttccggaacagcattgccaacaccaccagcaccagccacacataggtatagcagaggttccaaaagccaagcccccagatgaggatctccatcatcacatagacatagacgggggccagggctttccagcccagtaccgcagtatagactaggacaagcagagaaaccggctcgatattgggcagccaggccagggccagcttggtcaccagcagcagcgcgcccaacagggccaggagcaccagctcccgcgcccccatgggcctgtgcttacccgaggccgtcatagcccacagtaaaggtcaattcaaagtggtctccgtcggcaatgggggtgctgtcagcgctgctgttaaccatttctccgcccttggtcagcttccaccactcctgtgccccctcgtccacggtctcgccgtccacggtcagcatatagaggccgtaggggccctggttgtcctccaccacgccctcagccgtcaggaccgcgcccagataggcctccccggtctccagggtgaacacccgttcctccccgcccttatgcaaaacctgaacggtgatggtcttttcccctgcctcccccttgggcgtgacggctcgccataccagcagcaggacggcagcgatcaccaccagggcggccaccgccaggatggtctttttcttgctctgcaatgctactcctcctttggtcaagtagcgccagtttaccacatttttcaaccagtttcaactttaaaaagagccaggccggtaaacggcctggctccgtggattggctttactgggggcgctggttgctgaaacgggtataggcagtgccgatctggctggccggggcctgctccacctgataccagcccttctgctgcgcggtctggaagagcttggtctgggtctggtggccctggttgagcagcttgagaaattcgtctcgaagctgcacgttgacacactccgaggcgaaggtgtcatagttggcgctcatcttcttttcggtcagaatcaggtcggtgatccgctcctggtcgttcatggtcattccctcctttttatttcaggtagccaagcagacaatcatagttctgccggtgctgatcggcatactgctgaaagcagggcttcagatcttcctcggtgcactcctgagctgcctcctgatacttgcaatagagggtcttttcaaaattgagctggtcggacagggcggtcagctccttggtggttaggttcgccatggcgcgtctcctcctttgtttggtttgccccaatagtttgccccgcctgcgccggcttatgcggcagccggggacagccgccggaccaaaagggaaacaccgcataaaattccccattcatccgttccacgcgggcaaagcaaaacagaggcgtcagcggaaacgcccgcgtctccgcatagggaaacgccagggaaaacccctccggttccggccggtacagcgcccgccccccgccagccgcccgggccagcaggggttcccccattcgccgggccggcgcctcctcccagtgccagccctccggggaatgcggaccgccgggcgagcccgcggaaaaggccagctccgcccgggcgcctgttggcggccaggccccctgccgccgcagctcgtccagagagagggtgcgcctcagcttcagtcggccgtcctccggcaggaaggtgcccagcagggcccggcctcccgtcccgcagaggtaacctttatagagcccctttccgtcctcgggcagctctgccgcgcaccgcgcccggccgccgctctcctcgacggtcagccagccctgtccgccggccagtgaaaaccgctccacacaagcgccccccttctccaccctttccttctattctatgcggagcagggggtgaaatgcgctgtaaaacggttgacaggagcgcggacgcctgctatactgtgtgcgacttgaaaacgattggagctgggaagatgcgcaaataaccctttctttgtttggagtccgaccggcggcccgcgggccgtctctttgttgcactccggcagaagggttatgctgtgcacttccccttatggtacccatttttcgggacatgggcgcggaagacgaatccttctgcgcccatattttgtatttgaggtgatctatcatggctctgatcgacatccgggatctgacctttgcttatcccggcagctacgacaatgtctttgagcacctgagcctgcaactggatacccactggcggctgggtctggtggggcgcaacggccggggcaagaccaccctgctgcggctgctccagaggcaatacgaatacgacggcgcgatttccgtgccggtaccccttgactgcttcccctccccggtgtccgcgccggagcgggacaccctgaccattctggaggagcaggagcccggactggaactctggcgtatatacaaggagctggacatgctggaggtggatgccggggtcctgttccgcccctactcctccctctccggcggcgagcaggtcaaggtgctcctggccgccctctttctccgtgagggggccttccttctgctggacgagcccaccaaccatctggatctggagggccgccgggtagtgagccgctatctctcccgcaaaagcggcttcctgctggtctctcatgaccgggtatttctggacggctgtgtggaccacatcatggtcatcaacaagcgggacatcgaggtgcggcagggcagcttctcggcctggtggcgggacaagcaggcccgggacgactgggagcgggcagagaatgcccggctgaagcgggagatcggacggctggaggatgccgcacgccgcactgcttcctggtccgaccgggtggaggccgccaaaaagggctgccgcaactccggacttcgccccgaccgcggctatctcggccacaaggcgcaaaagatgatgaggcgctccaaggccgtggaggcccgccggacggaggcggcggaggccaaggccgggcttctgaagaacatcgaactggccgaggcgctgaagctccgccccctggagcaccccaagcgctgtctgctggaggccagggagttggcacccgactacggggcggggcccgtgtgccgtcctgtctccttcaccgtggagcggggggaacgggtggctctggtggggcggaacggctctggaaagtccagcctgctccggctggcgctgggtgaggagatcccccacacgggacttttctcccttgcctcgggtctggtcgtctcctacgtgccccaggacgcctccttcctgcggggcagcctgagccaattcgcgcggcgctatgaactggacgagacacagttcaagaccattctccgcaagctggacttcgcgcgggtacagtttgaaaaggatctgtccgattatagcgccgggcaaaaaaagaaggtgcttcttgcccgcagcctgtgccaaagcgcccacctgtatgtgtgggacgagccgctgaactatattgatgtcttctcccggatgcagcttgaggagctcctgcgggcctgccgtcccgccatgcttctcgtggagcatgaccaagccttcctggagggactggccgataagcgcgtcgaactagttcccgcctgaacgacagacgaaccgcaaactgcggttcgtctgttttttgttcccgacccttgacaacaccattctattgcggtagaatccaattgtattctattgcaatagaacagcatagaaaggagcttaccgatggaacttaagctatttgactcggagcgcaaggtcatggaggtcctctgggaccacggcgatctcagcgccaaggagctagccgaccgcctgaaggagctggtgggctggagcaaaactaccacctataccgtgatcaaaaagtgcattgacaaaaaggcggtctcccgcagtgagcccggctttgtctgccaccccctggtcagccgggaggaggtgcgggaacaggagacggacgccctgatcgaccggatgtacggcggctccgccgacctgctggtggccaatctgctgggcagccgcaggctctccccggaggaactggcccgcctcaagcggcgcattgaagaattggagtgattgtcatgctgtctctgctggaactgagtctcaccggcggcgtgttcatcctcgccatggttgtggtacgggcgctggccatgaaccggctgccccggcaggcctttcttctgctctgggccgtggccctggcccgcctgcttctccccttctccattccctcccccaccagcctctactccgccgccggacatctgggcgagggcttccgccgggcgggcatcgtcaccgccggaggcacagatgcggcgggggccgcagcgcaggaggcggtcatcccctggatggccctgctctgggccgcgggcgctctggcctgtgccctgtgcttcctgctcccccacctgcggggccgcagggagtggaatgcctctctgccggtggaggacccctttgtcaccgcctggctggccggccatcccatccgccggagggtacgggtgcgctgctccgaccgggtggacagccccctcacttacggtctgctccgccccgtcatcctcctgcccaaaacgctggaccggagcgacgtgtcccggctggccttcgtgctcacccatgagatggcccacatacgccggtttgacgccctctccaagctcctgctggcggccgccgcctgcctgcactggttcaatcccctggtgtgggtgatgctggtcctggccaaccgggatctggagctctcctgcgacgcggccgtggtgcgcctctacggcgcggaggcccgcgccccctatgcccgcaccctgctggagctggaggccaggcggtcccgcttcctccccctgtgctccgctttcaacaaaaacgccctggaggagcgcatcggcgccatcatgcgctcccgcaaaacctccgccgcggcgctggccgtggccctggtgctggtggtggccctcaccgccgtgctcgccaccaacgccccccgggaaaggccgatcgcctccgcctccggcctgaccatccgggacaatggagtggtgacggcctaccaggagggcgtctgggactcctccggggagctcaaacccgacccgcagaccggccactattacacgaaggagcagtatgaacaggttgccgcgctgaaaactgagggatacgagtccctgtccatcgccgaattcaaccgcacgctctacgctgcgctgaacgagagcgaggcgctgtccgaggcctttgggcgggtgctgatggacctccccgaaaccgaccctctggcccccttcctggtcaacaccgcccagccctccctcaacgagtacaacgcccggctgaatgaggtatattcgggccgggcggaggacccctccttctccggccagctctcccgcaccgagaccgccaacgtatacggcgacacggtggaggtggggtggaccgaggcaggctactccttcacctaccggattctggatcaggacgggctgaccgttgccgagcgcgacgccttcctccagtccattctcaagggtatgcaggactgcctggacgacctctccacagaatcgctgcgcgacgagggcaagctcaagcagaccctgcaggccgagctggaccggctgggcgcggccgccgctacggggcagatcgcgtataccggcggcgccgtggagggctgctggtccgaggcggcctatgacggctcgggtacgcttgtcacccacgatctggtcgtggagggcatggcatgaggaaccggctggtcattaccctctgcgccgtggtatccctgctggccggcgccggcctgctcaccttctggctggttcgctccctggctcccgccgccgcgctgaattacacaccctggcccctctcccccgaaccctatacccaggcggatctggacgaggccctggccctgcgcaccgagggatatgaggcccagtccgtcgcagcgttcgaccgcgctctggcggattggaccaatgaggccgccttccacgcccgggaggaacgcattcgccgcctgctctgctcctatgaggaggacggacccgaggccgaatttgtcctcggtaccctggccgccgccatgggggcctgctccgcccggcactacggcggctactgcacacagattaccccggcctatacagacgctgccgcctatacccggtccgaggacgtattcggcgactcctacgtggtctatgaggcctccgcctcctacaccatccgctaccaaatgccggacgagagcatgctcaccgtgggggagcgggaccggatcctgaccagctaccgggacgcggtgcaggcctttctggacggcaagacggaggacgagctgtcgaaggaggaggccatgacccgtgccctgaagcgggagctgaaacggctggaccagtccctgtccacccagtggatggcgctggagggcacccggctcgacgactacttcgcctatggcccggaggggggcgagacaccgtgaggctgtccgccctctccctcaagctcatcgccattgccgccatggtggtcgaccacatcgccttcacctttgtcccctatgggacgcccctgtggaccgtcatggacgccgccggcaagctcaccggccccatcatgttctatatggctgtcgagggctttcaccacaccaggagcatccggcgctatctggccaggctggcggtctttgccggcgtcagttacttccccttcctctatttctgcgccatgggtcagccggagcagatgaatcccctgcggctgaatgtcatctacaccatctccctgggggtactggccgtctgggtgcgccgccgcccctggcccgcacccctccgggccgtcctgctcctcctgctggcctgcctgagcatccccggcgactggggcatctggggcttcagcatcatcgtcgtgctggacttctattacggcgacttccgcaatcaggccttcggctacacactggtcgtcctgtttgccgtcaataccgtcagcctgctcaccagtccggcctatgacctgctctacctgggaggcctgtccagcccggcggactacctgctgggtgtggaaaacctgggcatgttcctccccctgctcctcctcctgtattatgacggtacccgcggcaccaaccggccctggggcaagtggctgttctacctcttttaccccgcccatcttctgctgctcggcctgctggcccatattctcctttagaaaggaagttttccccttgtcccaccggaacacacgcatcttgtccggctgtgccgccctgctgctctgcgccgggctctccggctgccggtccgtgccggcctcccggccctccgcctcccctgaccctgcggcccacctgctgggcctgaccgctgaacagcggatggaggattacgagtacctctggtctaccctgcgggacagctatccctgctggggtattctggagcgcgagggcgttgaggtggagcgcatctacaccacctaccgggagatggtggcggaaagcgacagcgacgcggacttttacagcgccatttacagcgccctctaccttctgggcaccaacggacatctgagcataatcgagccggaggcctatttctccgattacctccctgccgccgtccagtaccgccgggagggaaaaacgcactgggcggaagtgctggacagcaaggacactcagaccaggtatcggaagctcctggccctggagcaggccgccaatgggacggacgcggagtcctccattcccggctccgacggtgatacacccaacctgaccacgcttctccttccgggcgggacagcgggataccttaaaatcgaccgcttccccgccgactatacttccgatgccgcggcactggaggcgttctacctccagtgcgccggttgtaccgacctgattctggatctgaccgacaacagcggcggcagtgagctctactgggagcagcttctggtggccccccacattgaccaccccctgtccagccggcacttggccctggtgcggcggagcgccaacaacaacccttatctggacgaggccttctccccctcagccttccgccccctctccactctgccggagctgcccgggctggatgccgcggaccgtgccctggccaccgatgtgcttaccgtctcccataccgtggaaccggcggcaaagccgagtcccttccgcggacgcatctgggtgctggtagatgaatcggtctactccgcctccgaatccttcgtcctgttctgccaacagaccggctttgccaccctggtaggccgcacaaccggcggcgacgggattggcgctatggatccggtctaccttcagctcccgaacagcggtatcctgattcaatataccgtcccatttgggctaaaccctgacggcagcagcaatgaggaaatgggaaccacccccgatctggtctccccggcggaggaaccgccgctcattaccgccctccgggccattggggaggcataataacaaaagaacgggcggcacaattccgtgccgcccgagcagccagtcgaaaagtcttttcgactggctgccggactttttgaaccttctaaaaaagttcaaaaagtcgtttgatcccacgcgaaagggaaccctgacgtttccctttcacactatccctccctccgaagccttcaagcaggaggagctattgaccatttcagtgggcggcacaatctgtgccgcccactcttctgtttattgaatgctgtaggtcccccggaccaggagggtcacggcggtggaagccttgacgccccggccctcaatggtggccagatacagatggttggccgtcagggccccgccgccggccagcgtcgttccggcggtcatgtccaccaggccgggggaggtgtccgaaacgcaggtagccgtgccgctgcgcaggaggaattcacacgccgcgccgccggtgatggtttgcccggcggagaggttgactacctgataggatgcgccgccggagggctggacggagcttcccccgcctgaggatgccagcttgtcctccacctccttgacatagccttcgaccacggcggagagctgcttcttcagctccgtctcccgggccgtgagcttgctgtccacctgggacagaatggatggggtggctttctgagtcagatagctcagcgtcaccagcgggtcgctctggctcccctgctggcctgcggcaaaggcaacgcccaccagggtcagggtcaccaggcacccggctgccagacgggcgggccaatgtgttttcttcatatgtacgtcctccgtttgggaagcggggccgcccgccggggcggtcccgtgcttccatttttaaaccatggtgtccgtatgcaggccgaagctgaccgcgatggcgttgtccacccgctgcatctgcgcttcgtccagccggcccatatgctctctcagccgccttttgtccagcgtccggatctgttccagcagcaccaccgactccttgggcagtccgtaggtgttggctgagagctcaatgtgggtgggcagacgggcctttccggtctgagaggtgatggcggcggcgatcacggtgggactgtggcggttgccggtgtcgttctgtacgatcagcaccggacgcacgcccccctgctcactgcccaccaccgggctcagatcggcataaaagatgtctcctcgttttacgctgttgtccacaaaagctcacactccgccggaatatagtcaccagcgtcaccaagcacagggcttatgtaacgcggtcactatgattctcccacggggcggcggaatttatacacagggtttcaaaaaacaggaagtccccgtctctctccgccgctgcgccggcatccctccccgaaccattgtatgcccggcagggccgccgtgtgagcggacgctcaattcaagtactcccggggcacccggggggacacggcgcagagcaattcgtattggatggtgcccgccagagcagcggcgtcctccaccggcaggtgttcgccgaagagctccacctcgtcgccgggggcagcccccagcccggtggcatccgccatgcacatgtccatgcagacacggcccacaataggcgcccgctgtccgcggatgagtacctccagccggtcggagcacagccggggcaggccgtcggcatagccgacggtcagggcggccagctcggcgtcccgctccagcacatgggtacagccatagcttaccggcgtcccggcggggacggccttgaccgaggccacccgggtcttaagcgccattaccggccgcaggccaacgccgtccaacccctcgcaggaggggtcgggatagtggccgtacagggccaccccggggcgcaccatatccagatgagtacagggatactttaacacagcggcgctggcagcgcaatggcggattgggaacgtgattccccgcccctccagctcggacagcagctccagaaagcgggtgaactggcccatggtgtacgcctcgtccccgtcggcattggcgaagtgggtatagatgccctccacctccaggccgggcagggcgcacaccgcggcaatggcgtcggccgcctccgtccggtgtccctcatcacacagccagcccagacgggacataccggtgtccgccttcacgtggatgcgcagccgcctccctgccgcctgggcggcggcggaaaaggctctggcactctccagatcgtagaccgtctgggtcagcccatagtgtagcagctcctccgcgcagtcggttggcgtgtaacccaagagcaggatcggggcgcgcaccccggcctcccgcagctccctggcctccgccagacaggccaccgccaggtactccgcccccagctcctccagcttccgggccacggggaccgccccgtggccgtaggcgtcggccttcaccacgcccagaaatcggcacccctcgggcagcagcgcccggagtgcgcggtagttgtgctccaaattgggcagggagatctccgcccaggttcgtctctcctgttgcttcatgctttcgcctctctgatatgggatcatccgctccattatactacgggccgggccgcggcacaagccccgtccgcccggcgttttcatccatttttaatgtactgttcatagaaatcaaaagacaaacagggaattttggtctatactaagggcagaaaccagggccgggaccggcccgccttccaattcaaataaggaggattccgaattatgtgggaagactttggcaaagcattgacaaatgtggccttcgctggtgtgggactggccgcgctggccgccgaacaggtggtcaaggccggaaaggtactggcggaaaagggcgaaatctacgtggagcagggcaaacggtatggcgaggagctccagcagaagctccaggaggacgcccagcgccgccgggaggagcagttggagcagcgcatctccgccatggacgctcaggagcgcgaggccctgcgccgccggctggcggagctggacgagctggagcggcaggcccgtgaggccgctgcccaggcggaggaggccgcgcccggcgagggcggtgccgagatcaccgagatccacggcggcccccaggagcacgacagcgaggaatcatgaggcaaacggccaggcggggcagcgccccgcctggccgtttgctatgtgttctctccaaccgtgaactgaaactccgtaaagacacactggatcacggtaaagctgtcctgagacagctccccccgcagaagggcgtgggtggacgggtcaaaccagagggagcactcccgcccctcgcccgcggcggactccggctcccggcagaccacacgcagcacctcgctctccccctgggcctccataccacattcggcgatgaagccctcctgcacatagtccatcagcaccggaaccgcgtccaccggactcatgccgctgtcatccagcggcccggtctccacctgcatgccgtcgtactccagagcggtctccccctccagaatacgggcggtgaccccggcgatattctccggcgcggtgatggtcaggacggtctccccctccctggcatagttcaggccgattccataggtatacacccgctggccgtagtcggccgtcagctccagggaggcggtacagccccccatctccagatactctccccgtatgtccagggccagttgctcagcgcggtttccgccctctgctccgccgcaggcggacagggacaggccgagtatcatcattagtacgcacatcccggtccgatggcgcacagcgctccctcctagctcacgtgttcctcaatgacggccggcagggcggcaatcacgtcggttggggtcattccatactctccaatggcgcgggcacagacctcccccgcctctccgtggagccacaccgccatgggcaccgcctgccgggcgggcaggccctggcccagcagagagaggatcagccctgccagcacgtcgccgctcccccccttggccatacccggattgccgttggtgttgatgtaggccgagccgtcggggaaggcggtgatggtgcggtgtcccttgagcaccaggcagcaggcgtgctccactgcaaaggcgcgcgccgccccaaggcggtcgcccgacgacagctcgccccccagcctgacaaactccccgtcgtggggagtgagcaccgtgtgcagtccccggcggctgtccaagacatctatatgtccctccagcgcatttatgccgtcggcgtccagcaccacgggcaggtggatttccccgagcaggtggcgcaccactgcggccacgccgtttccgcggcccaggccggggccgatcaggcagacgccgcagccggccagccgggtcattgcggcttcccccgcctccagggagagctgcccctccttgcccgcaggcagagggtggggcatggcctcatccagcttggccgccgcgatgggccacaccggggccggcactcccaccgtcaccaggcccgcgccggagcgcaccgctgcctgagccgcgaacaccggcgcgccggtatagcccacgctgccgcccaggagatagacctttccaaagtcccccttgtgggcgtcccggggccggacgggcagacggacatccgccccctccaccgtctgtaccggatagtcctccccgtccaccaagtcccggggtatgccgatgtccgccacggtcagcacgccggtgcacaggccgcctttgcccacataatggcccgccttgggaagcgtgaaggtgaccgtccgcgccgcgcgcaccccctcccccagcaccctgccggtgtcggcctctaccccactggggatgtcggcggacaccaccgggatgtcacaggtgttcatcatgtgaacggcggtgagggcgtccccccgcacctcggtgttcaggccgataccgaagatggcgtccaccatcacgtccgccttcaggcaccaggccgcgaagtccgggtcgtccggggtaaagggctccagtaccccgccggccgccgccagccgggcctccatggccctggtgtcgcaggtcagcttctcccgctgccccaccaggatgcagcgcacctcgaagcccgcctccagcagcaggcgggcgcaggccacgccgtcgccgccattgttgcccggcccgcagaaacaaaccgcccgccccggcgcgttggccgccgtgtcgatggcggcctccgccagcgcatttgccgcccgctccatcagctccagcgaggggacgccccgctcctctatggccctccggtccaatgttcgcatctgctccgccgttgcgattctcatgtgttccacgctcccatttctctctaagtcggtctcattatatgccgtgcggcaggactcgtcaatttccttcttgcgcttttctcgattttgtgatataaataagggcacatgcgatgaagggaaaaagagcagcccccggcccggcagagagcgtccgtcaccggctgaaagcggatgtggggctggcctgttcggttcgtcctggagcggccctggagacagggacggttttgccccacgttaccggggccaaagtgcctgcgccgccggcgcgggaattgcgggtggtaccgcggaaggtttgcctttcgtcccaattagttgggaggaagggcttttttattgcccaaaccggaaagaggagctggacaatgaagtcgttggaagagcgagaccgcgccttgattgaggccgccggtgcggcgattcgccggaactatgacggcgaaaacttccatcacaccgtaggcgcggccgtgcggtgcggcagcggcgcagtttataccggcgtgaatgtgtactccattcacggcgcatgcgcagaacaggtggccatcggctccgccatcaccaatggcgagcgggttttggaagcaatcgccgccgtccgcggcaaagacggctcggaactgctgcccccgtgcggcaactgtcggcagctcctggcggactacgcgccggagtgtgaagtaatcctccccgtgaacggggttgcacaaaaggttccggcaaaggatctgctgcccttcgcctaccatgcggaagcctaatcgtatccactaccattcatcaagaaggagttttccatatgaaagaacagttagcaaccatccgctcggaggctctggccgcgtttgcgcaggccggatcttccgcagaactggacgccctgcgggtcaagtacctgggcaagaagggcgagctcactgccgtactcaagcagatgggcaagctctccgccgaggagcggcccgccatgggccagctagccaacgaggtgcgcgccgctctggaggccgagctggaggccaagggcagggagctggaggccaaggcgctggaggcccggctggaggccgaggcgctggatgtcactgtccccggcaagcccgtgacgatgggccaccggcaccccatgtatatcgccctggatgagctcaaggacatcttcatcggcatgggcttcaccgtgctggacggccccgaggtggagctggccgagctgaacttcgaccggctcaacgccggcgaggggcaccccagccgcgactggtcggacaccttctattttgacgagggcagccgggtgatgctccgcagccagacctcccccatgcaggtgcgggccatggactccatgcctctgcccatccgcatcatcgcccccggccgggtctaccgcaaggacgaggtggacgccacccactcccccatgttccaccaggtggagggcatggtcatcgacaagggcgtcaccatggccgatctgaagggcaccctcaacaccgtggtggagcagctctacggcaagggcaccaagacccgcttccgcccccaccacttccccttcaccgagccgtcctgcgagatggacgtgcagtgccacaagtgcggcggcgtgggctgccccacctgcaagggtgagggctggatcgagctgctgggcgcgggcatgatccacccccgggtgctggagatggcgggcatcgaccccagcgtctactccggctgggccttcggcatcggcctggagcgcaccgccatgcggcgcttcaaaatcgccgatctgcggctgatttttgaaaacgacgtccggtttttggagcagttctgaggcgcagcctcagaaccgtaggggcggctatcagccgcccgcctgtttccgaatttgagcctggcgggcggataatatccgcccctacacccggaatccgtccgaggtaaaacaagaataacaagggagttttcatatatgaacttatctcgcaaatggctggaggaattcgtccatgtggacgcctccgataaggagttcgccgaggccatgaccctgtccggctccaaggtggagctgacccacgatctgggagaggagatctccaacgtggtggtgggcaaggtgctgtccatggagcggcaccccgactccgaccacatgtggatctgccaggtggacgccggacgggaacagccggtgcagatcgtcaccggcgcctggaacgtccatgcgggcgatctggttcccgtagccctgcataagtccaccctgcccggcggcaagaagatcgagaggggcaagctgcgcggcgtgctgtccgacggcatgctgtgcggtctggccgagctgggcctggacgagcgggacttcccctatgccgccatcacccccgccgccattctgggggactacaagcccctggacaaggacaagccttccatctccgccgacattcagcccggcgacaagatctacggccccgtggtatgcgccaaggtgctggagtgtgagacccagccggacggctccttccacacctgcgcggacatcggaaccggcacggtctgcccagacaccgcctgccccaacctgcacgcgggcgatcttgcggcctacaacaccaagaccggcagttactgtaccctggacgacctccacgcccagcaggcggagttcccccactgcatccccgacggcatcttcatcctccgcgaggactgcaagcccggcgacgatctcaagcccgtcatcaacgccgacgaccacgtagtggagtttgagatcacccccaaccggcccgactgcctgtccgtcatcggcctggcccgggaggtggccgccacctacgacgcccctctcaccctccatgagccggtggtgaagggcggcggccccggcgtgctcaccgagctgctggacgtggagaccccggcggccgacctggtgccccggtacaccgcccggatggtacgcaacgtgaagatcgccccctcccccaagtggatgcgggagcggctgcgctccatgggcgtgcgtcccatcaacaacatcgtggatatcaccaactacgtcatgctggagtacggccagcccatgcacgccttcgactaccgctatgtgaagggcggcagaatcatcgtccgccgggcggaggagggcgaggagctgaccaccctggacggccaggtgcgcaagctcaatgccaaccacctggtcatcgccgacgagacccgggccgtgggccttgcgggcatcatgggcggcgagaacagcgagatcgtctccgacaccgccgacgtggtgttcgagtccgcctgcttcgacggcacctgcatccgcaagggcgccctggccctgggcatgcgcaccgaggccagcgccaagttcgaaaagggcctggatcccatgaacaccctccccgccgtccagcgggcctgcgagctggtggagctgctgagggccggcgaggtggtggacggcgtcatcgatatcctcaactatgtaccccagccccgcaccatccgcatggatccggagcgggtgaatgccctgctgggcaccgacatccccgccgcggagcagtacaaatacctggagcgggtggagatccacaccgatcagcacgacttccccgacggccccgccgacgtggtcatcccctcctggcgcgccgacgtggagggcatcgccgatctggccgaggaggtggcccggttctacgggtacaacaacattcccgtcaccctcatgcggggtcagaccaccctgggcggctactccgccgagcagaaactggaaaaccggctgggcgcgctctgccgcgccttcgggtatgacgagatcatcacctactccttcatctcccccgcctgctacgacaagatccgctggccccgcgactactccgcccgcaagagcttccagatcctcaaccctctgggggaggacacctccatcatgcgcaccaccaccctgccctccatgctggatatcctgacccgcaactacaattaccgcaacaagtccgccaggctctatgagctggcccgggtctatctgcccggcggggaggacggcctggccaacgagtccaaggtgctcaccctgggcgcctacggcggggacatggacttctacgccatgaaaggggccgtcgaggccattctcaaggacatccgggccacagatatccattttgagggccccaccggcgcaccctccgacgcctcctaccaccccggccgctgcgccaccgtgtggagcggcagcaactgcatcggcatcttcggccagatccaccccctggctgcccagaactacggcgtagacgccgagctctactgcgccgagctctcctttgacgagcttctgaacgccaagggccccgatcccgagtacgtccccctgcccaggttccccgccgtcacccgggatatcgccgtggtgtgcggtgagaaggtcaccgtgggcgctctggaggactgcatccgccggggcgccaagggcctgctcaaggaggttgccctgttcgacatctaccggggcaagggcgtggacgagggcaagaagagcgtagcctttaacctgactctgcgtgccgacgaccgctccctcaccagcgaggaggctgatgccgacgtgaaggcagttttggagcttctggagcaggagctgggtgctgttttgcggtgagccccttccgcgtccggtcgaaatcttaaagaatcataaattttaagtcatcccctttacagcgcgtcctttttccgctacaatggggaacagaatgatacacggggaggtgtaccgatatggagatggactacacccgcaaattcagcatccaaaacgacaaggacccagagatcaagaagatcctctcttccgtctaccagtccttgcaggaaaagggttacaatcccatcaaccagatcgtggggtacatcctctcggaggaccccacctatatcaccaactacaacaacgcccgcgccctgatccgcaagctggaccgggacgagctgctacaggagctggtgaagcagtatctgcgcgattgattgtgttccatccaacgtgcgctgtcggtgacagcgcacgttttttcttttttattgcacctgcaacatacaacggcccgtccctttgttagaataggcccagaaaccgacgaaggaggcgttttcccatgaaacgcagaatcattcatatcgaggaatccaggtgcaacggctgcggcctgtgcgccgccgcctgccacgagggcgccattgagatggtcaacggcaaggcccgtctcacccgggaggactactgcgacgggctgggggactgcctgcccgcctgccccaccggggccatcacctttgaggagcgtgaggcccccgcctacgaccatgcggcggtcttggccgccaaggcggccagggccgcggacacgcccctgccctgcggctgtcccggcagccagagccgggccatccgccggccggaagccgcccccaccgctggagatatccccagtgaactgcgccagtggccggttcagatcaagctcgctccggttaacgcgccctactttgacggctgtgatcttctcattgctgccgactgcaccgcctacgcctacggcgcctttcaccgggactttatccggggccgggtgacccttatcggctgccccaagctggacgaaggggactatagtgaaaagctcaccgccattctggctcaaaacgacatccgcagcgtcaccgttgtacggatggcggtcccctgctgtgggggcattcagcgggccgccgagcgggccgtgtccgccagcggtaaaccgctctccctccatacggtcattgtgggcaccgacggcacgctgctccgccaggcttgacacacactttacaattgtgtcttctgtttttccggcgaaacttgtataagcatacgaatttccgccccctcccttgcaaagcccccgggaattcgatatattatactcattctgggacagggaggtagagccatgacgccggtgcacgaactgcgctctggggtttggatcatcaatggttcccgcctgtccaattttcggcggtaataagtgcagggtatctgtgtaagcagataccctgatttattttatcgtttcctaaaaatttatttggcgctacaggagggttttatgagcaaaaaagttgccgtcatcatgggttccgactcagatctggacaccatgcgcccctgcatccagcggctcaagtcctttggcatccccacagaggtccacatcatctccgcccaccgtacccccgccgccgccgagcgcttcgcctctcaggcaagggagaacggcttcggtgcgattatcgccgcagcgggcaaagccgcccatctggccggtgtgctggccgcctataccaccctgcccgtcatcggcgtgcccatcaagacctctatgatgggcgggctggactcccttctgtccatggtgcagatgcccaagggaattcccgtggcctgcgtggcggtggacggcgcggacaacgccgccattctggccgcccagatgctggccctttccgacgaggccctgagcgaccggctggtgcagttcaaggccggcatggccgccgaggtggaagcaaaggatcataaaatccaaatggaggagttttaatatgtcttacgagaaactggagcagctctatgagggcaaggccaagaaggtcttcgccaccagcgaccccaatgttgtgatcgtgtcctacaaggacgacgccaccgccttcaacggcctgaagaagggcaccatcaccggcaagggggccatcaacaaccgcatgaccaacaacctgatgcgccgcctggaggagaagggcgtgcctacccactatgtggaggagctcagcgaccgggagaccgccgtgaaaaaggtgtccatcgtccccctggaggtcatcatccgcaacatctccgccggctccttcgccaagcgcttcggcgtggaggagggcatcgtgttcgacgcgcccaccatcgagttctcctacaagaatgacgacctgggcgatcccctcatgaacagctatcacgccctggctctcaagctggccacccaggaggagatcgacctgatcaagaagtatgcctttgcggtcaacgacctgctgcggggcttcatgaagaagatcggcattgatctggtggacttcaagctggagttcggcaaaacatctgacggcaccattgtgctggccgacgagatctcccccgacacctgccgcctgtgggacgaacagacccacgagaagctggacaaggaccgtttccgccgggacatgggcggggccgaggaggcctacgaggaggtcatgcgccgcctgatgggggatcagtaatccatgggcggtttcttcggcgcgattaccaagcaggactgcgtgctggacgtgttcttcggtaccgactaccactcccacctgggcaccaagcggggcggcatggcggtctacgaccggaaggatggctttcagcggcagatccacaacattgaaaacacccccttccgcaccaagttcgacaaggatctggcggaatttcacggctgctccggcatcggctgtatcagcgacaccgatccccagcccctgctggtgcgctcccacctgggcctgtacgccatcaccaccgtgggcatcatcaacaatgccgacgcgctggtggagcgctacttctccgaccacggccaccagttcatggccatgagctcgggtaaagtcaacgccaccgagctggtggccgccctcatcaaccagaaggacgatctgatctccggcatccgccacgcccaggacgagatcgacggttcagccaccattcttattctggatgccgacggcatcctcgccgcccgtgacaagctgggccgcctgcccgtgctcatcggccagggcgaaaacggctgctgcgtctccttcgagtccttcgcctaccataagctgggctaccatgacgcttacgagctgggcccccgggagatcgtacgggttacggccggcggctggaagaccctctcccccgccggagagcagatgaagatttgcgccttcctttggacctactacggctaccccaactccaactacgaggggatgaatgtggaggtcatgcgctaccgcaacggggagatcatggcccgggacgaggtacaccggggccaactgcccaaggtggactatgtggccggcgtgcccgactcaggcgtgccccatgccatcggctttgccaaccgcagcggcaagccctttgcccgccccttcgtcaaatacacccctacctggccccgctccttcatgcccaccagccaggaggcccgcaaccaggtggccaagatgaagcagattcccgtgcccgagctcattgagggcaagaagctgctctttgtggacgactccatcgtccggggcacccagctccgggagaccgtggaattcctctacgagtccggcgctgaggaggtccacatgcgctcggcctgtccgcccgtcatgtacggctgcaagtacctgaatttctcccgcagcaactccgacatggaactgctggcccggcgaaccatccaggagctggagggggacgaggggcagcagcatatcgaggaatacgccgacgcctccacggagcgcggcagatgcatgctccgcgccatctgcgagaagctgggcttcgactctctgggctaccagtccctggacggcctgctggaggccatcggcatcgaccgggacaagatctgcacttactgctggacggggaaggagtaaaaacgctccaagggggacgctgtcccccctggatacccccccgcgccgcccccggcggcacagcgggtttgatcccccctcacccgcgcacggcgcaggtggtcgcccgccgatggcggagcaagcagcggcgtactccggcgaactgaattcgcctgcggacctcttttgcaattcttttacccgcaaagcgggtaaaactctgcaaggctttttcctctaccccagcgccccatttcctcattgttatctggaggttttgacatgaagaactcccattccgaatcctacgccgccgccggcgtggacgtcaccgccggctacgaggcggtcaaccgcatcaagcccctggtggagtccacctacattcccggtgtcatgggctctctgggcggcttcggcggcctgttcgcccccaatgtggcgggcatgaagaagcccgtcctggtctccggtaccgacggcgtgggcaccaagctgaaaatcgcctttctcatggataagcacgacaccgttggcatcgactgcgtggccatgtgcgtcaacgacattatctgctccggtgcctctcccctgtttttcctggactacgtggctgtgggaaagaatgtgcccagccgcatcgaggccatcgtctccggcgtcaccgagggctgccgccaggccggctgcgccctcatcggcggcgagaccgccgagatgcccggcttctaccccgaggacgagtatgatctggccggcttctccgtgggactggtggacgaggccgatatgatcgacggctccaccctctgcgaaggggatctgctcatcggcctgtgctccaacggcgtccactccaacggcttctccctggtgcgcaaggtgctgctggacaaccccaaggctctggatatctatgtctccgagctgggccgcaccatcggcgaggatctgctgcgccccacccatatctacgtaaaatccatccagtgcctgcgccagcacggcgtaactgtcaaggccatcagccacatcaccggcggcggcctgtatgagaatgtgccccgcatgatgaaagagggcctcaccgcccgcatccgcaccgcctcctaccccgtgcccgccatcttcgagctcattcagaagtcgggtgacatccccgtgcgggacatgtataacaccttcaacatgggcatcggcctggtcatcgccatccccaaggatcaagtgggccacgcgctggacgtgctggcccgggcgggcgagcagtcctatgtcatcggcgacgtgatcaagggcgacgccggcgtggagctggtctgagggcagggcgcatggtacgaattgccgtcttggtttccggcgggggcaccaacctccaggcactgatcgacgcccagagccggggtgagctgaaaaacggccgcatcgccgccgtgctctcctcccggcccgacgcctacgccctggagcgggccgcccgggccggcatccccggctatgtggtggcccggaaagacttcgcatccaaccgggagatgaccatagccctggtggacaagctccgtgagctgaatatcgggctggtggtactggccggcttcctgcacatccttaccggggagatggtggccgccttccccaacgccatcctcaacgtccaccccgccctgatcccctccttctgcggcgctggctactacggcctccacgtccacgaggccgccctggcctacggcgtgaagctcaccggcgctaccgtccacttcgtcaatgaagagcccgacggcggccccatcgtccttcagaaggcggtggagatcctggagggggacacccccgaggtactccagcgccgggtgatggagcaggcggagtggcatatccttccccaggccgtctccctgttctgtgaggggcggctccgggtggagggaaggatcgtccatattttataatttcataggaggtatggagacatgagcgatctgcgtcttctggcatttgtcctcagcggcggttttctgttcctaggcgggatctggcttggcggagactacggtcttgctctgttgctgcttggcttggtcgttctgctggttcctgttgttctggcgtgtatttccctgatccgctggctggtacctcctagccaaagctctcatgagtagtccaggtaggagatgtcttcatatgaaacgaaccgcagtcattgtaatcctatctttgcttgcagcattcgtattttctgcctgcgcgcccgcagcccccagcggtcaaacgcctgaatttttgaatgacatcgggaaaacactcatcgaattaaaaaatgagcatccagaaggcgaaataattgaaagcttagattcatccccagattgtgccgctatatgctttggggagccggaggcggaatatgcttattactttttcggaacgcagagcggcgattctgaaaaggccatgagcgaatgtgaggaacagctgaaatgtgcgggctttgtcaccaccgcaaacatacttttcccagacatggaagatgacatgtcctttgaagattttttctccttgatcggtgtggacgattatgagtatttcggggaagatacgcttgcagcaggttggttaagattcatgtatcaagatatggaagtaatggtgaatacaaacgaaattactcctcgtggcggatgggattttacaggagcagaaatcgtgaagcgtgatgctccggtgtcgattgcagacccagaaatattaaataccaatagtgacctagcgggtgcagttatgttcgatgaaactattttgtgagaacatattgctgcaactggtatgtgcatttctttcccgagggattgtcgaaataatacatctccctgtctgtagacttatttcaagaattcctcacaagtgttacattcagcaaggcaataacaatatgatatcgtagaatggagattatcatgaaaaacctggatcttaccgcgctgctgcgcggcaacccctatcccggacgcggcatcgtgctgggcagctcccccgacggggagaagtccgtcattgcctattttatcatgggacgcagcgagaactcccgcaaccgggtcttcgtggagacccctgacggcatccgcacccaggcctttgacccctccaaaatgaccgacccctcccttattatctacgcccctgtgcgggtgttcggcacctccaccatcgtcaccaacggcgaccagaccgacaccatccgcgaggggctggccgcgggcaagacctttgcccaggccctccacacccgaacctttgagcccgacgcccccaactacaccccccgtatctccgggctggtaaaaaagaacggcgactacaccctctccatcctcaagagcgcggacggcgatcccgcctcctgccgccggtatttcttcgcctatgaggccccccgcgccgggcagggccatttcatccacacctacatgggcgacggcacccccctgccctcctttgtgggggaaccggagcaggtggaaatcccctgcggcacccccgcggagcttgccgatctgttgtgggacagcctcaacgcggagaacaaggtctctctctttgtgcgctacatcgaccggaaaaccggagattgggagactgtgatcaaaaacaagcatgcatcagcctgacggacggccgcaggccgccccagatacacacagtccgagggcggcccgcggccgccgctcacttgacggaggtttatcgcaatgacagaactggaactgaaatacggctgcaaccccaaccagaagccggcccgcatctttatggaggagggcgagctgcctatccaggtgctcaacggaaagccgggctacatcaactttctggacgccttcaactcctggcagttggtgaaagaactaaaggaggccaccggcctgcccgccgccgcatccttcaagcacgtctcccccgctggcgccgccgtgggtacccccctcaccgacgtggagcggaaaatctactttgccgaggatatggagctctcccccatcgcctgcgcctatgtccgcgcccggggcgctgaccggctgtgctcctacggcgactgggccgccctctccgatgtgtgcgacgccgacaccgcccgctacctggccctggaggtatccgacggcgtgatcgcccctggctacaccgacgaggccctggccatcctcaaaaccaagcgcaagggcggctataatgtggtgcagatcgacccggactatgcccccaaggccgtggagcacaaggacgtcttcggtatcaccttcgagcagggccgcaacagcttcgccatcagcgaggccctgctggacaacatcgtcactgacaacaaggagctgcccgagtccgccaagcgggacatgctcatcgccctcatcaccctgaagtacacccagtccaactccgtctgctatgtgaaggacggccaggccatcggcgtgggcgcgggccagcagagccgcatccactgtacccgtctggcggggaacaaagcggacaactggctcctgcggcagcatcccaaggtgctgggcctttccttcgtggacggcatccgccgtcccgaccgggacaacgccatcgacgtctacctctccgacgagtacgaggacgtgctggccgacggcgtgtggcagaacaccttcaaaatccggcccgaggtgctcacggcggaggagaaaaaggagtggatcgcccgccagtcgggcgtgaccgtgggctccgacgccttcttccccttcggcgacaatgtggagcgtgcccgcaagagcggcgtacagtacatcgtccagcccggcggctccatccgggacgaccatgtcatcgccacctgcaacaagtacggcatcgtcatggcctttaccggtatgcggctgttccaccactaatggaggcacaccgctacggtctgagcgccgccgctctcaaatatctggccgcgctgtttatgctggtggatcatatcgggatggtctttcccaccatgctgaccgagctgggcctgcccacctgggcggatgggctgccccggctcatcgggcggctggcctttcccattttcgcctacttcgtggccgagggctgccgccgcacccgcttcttccaccgctatctcatccggctgggagcgtgtgcccttctctcccaggcgcccttcaccctggccaccggcgtctggggcggaagtgtgctcctcaccttcttcctcagcgccggagccatctatggctatgagcgtctgtccaaagcagagcacggcccagccgtgtcggccattcccctgttcgcggcctgtgcgctggcactcctgctcaacgtggactacggcttccccgccgtgctcctgatcttcgccctttacctctgcggtgataatcgccgccgaaagctgctctgtctgggagccggtctggctctcctctatctgctctaccagcccctgatagggctactctccctcccactgttccggccggactggatggcgggctatctgctccatgccctccctgtgtttgctctctacgcattgtgcgccgaggcatccctccttctgttggcctggtaccgtgggcaattgggtgtgcagagcaagtggttcttttatgtgttctatcccgcgcacctgctgggcctatgggccctggggctggcgctgaattgaggtgtaagcaatgaatgttttgattgtcggcggcggcgggcgggagcacgccatcgtctgggcactgtctaaaagtgagcaagtggaacagctttactgcgcccccggcaacggcggtatcgccgccctggcccagtgtgtccccctctccgccaccgacgtggatggagtggtggcctgggcccagacccattccattgattttgtggtggtggcgccggacgatcccctcgccctgggcatggtggatgccctggaggatgcgggcattcccgccttcggcccccgggcggacgccgccatcatcgaggccagcaaaatcttttccaagaatctgatggccaagtaccacattccaaccgcaaagtatcaaacctttacagagctcgcccctgctctggcctacattgaggccgagggcgcgcccatcgtggtgaaggctgacggcctagccctgggcaagggcgttatcgtggcccagacggtagccgaagcccaggaggccgtccgctccatgatggacggccgcaagttcggccaggccggcgccagggtagtcatcgaggagtgtatgaccggcccggaggtcaccgtgctggccttctgcgacggggagcatctggttcccatgccctcctcccaggatcacaagcgggcctttgacggcaaccagggccccaacaccggcggcatgggcgccatctccccctctcccaactacacgcctgaggtggcccgccgctgtatggaggagatcttcctgcccacggtggccgccctcaaggcggagggccgccccttccagggagtgctctactttggcctgatgctcacccccgacggccccaaggtggtggagtacaatgcccgcttcggcgatcccgaatgccaggcggtgctctccctgctggagaccgatctgctggacatcttcctggcctgccgtaacggcactttggaccatctgaacatccggtggaaggacggggcggcctgctgccttgtgctggcctccggcggctaccccggctcctacgccaagggtctgcccatcaccggcctggaggatgccggacagcaggccgtggttttccatgcgggtaccaaactgggagacgacggcacggtgttcaccaacggcggccgggtgctgggcgtcaccgccaccgggccggatctgaacgccgcgatcgacagcgcctacgccgccgcggggcacatccacttccaggacatgcacttccgcaccgacattggccgggtttgaagcccttgcgccccaaggggtgctactgctggttgtcaaattggatgctccggttggttgcgtctatccgggccgttctgctaagatgagcccaagaaaaaaggaggttcatcaccatggaatttcgtgaacggctctaccagctccgcaaagggcggggcatctcccaggaggagttggcccacaccgtaggggtctcccggcaggcggtacagaagtgggaggcgggggccgccaccccggatctcaacaacctgtccgccttggccgactattttgccgtcagtttggactatctggtgcggggaatcgagcccgaaaagcccgcagccccttcccctcagcaggctgtcatccaaaactactatagaggctggcgctatgagtaccgcagccgccgcactctcttcggccttcctctggttcatatcaatctgtgtgaccgcggtctgtgtcgggccaagggggtcatcgccatcggcaacgtggccaccggcctgatagccatcggaggcttttccgccggtctgctgaccttgggcggattcagcgccggtctgctggctctgggcggcctcgccgctggggggatctccctcggcggcctgtccgtgggcctgctggctgccttgggcggggcggcattcagcctaggaattgccttcggcggcggcgctgtcagcggctatgcggccctgggcggggcggcggtggggcagtacgccgccgggggcactgcgttcggctccaccctcgctatcggacgggacgcatattcctctgccgccggtctggctctcaccctggagcagcttcacggctactcccccgaggtcctgttccagatgatccacgcccagctccccgaggcccctgagtgggtcgtccgcctgcttctctgcgtttgtccctgaaaaagagcccttgcgcggccgcgcaagggctcttcccttatctgtcttctctgtaagctgaactgtgtccacccgtcccggtgcccctatcatcaccgttgagaaatctccatgtatagaaggggatacggcgctccctgttcatcgcagtctgtccttttatatacacagaatcccatgtgctcataaaaaccctttgcctctgggttctgttcattgaccgtcacgctcttaaccccacaatgcttcatcccatattcaacgagcagccttcccaagccgtttccccgtttgtccggaacgagaaacagcatttcaaggcggccgccatctactcccataaatccgaccggagctccgctttcctctctggcgatgacaagccttggaaccaaattcagcgccccgggaacgtattccttgatctgttctatttcacggctggataaaaagtggtgcgttgccctcacggactgctcccaaattttcagaagctgctggagcaatacaggctgccgttccttcacttccgctatttccgtatcctcaccccatttgattgtatttccaacatcagcctgccacacaaatgctgcaacttcggtcagccggcttgcttatttctcatccagtgggagtgggtccggtgcacggtgggtcagctcggcacagcaggacttggtcagcttgtccagtccctcatcctggcgggccagctccccggagatctgctccagcgtctgccgcacctggtccagctctccacaggccctggaaaccgccgcgtccatatcagcgcgcaggcggccgtaattcccctgtacccggttcagccactgctccacctcggcccgtgtcttgcggatgcgctcctccgcctccgcctgaaccgcctgggcgcggcagtgggcctccagctcgataccggcggtgcggtccttcaccttttcataggccgccgccgccggcccagccttggccagcttttcctcgctctccttcagccgggcctcggtatcgcccaaccgctgcttcgccttctccagctcttcctccagcagggagatctccagcttgcgctcctccgcctccttgtgggcggcggccagctccccccgcagggcctggagctccttctccttggcctccgtctgggcctgggccgcggcgatctcctccgcctgggccgccttggccgcctcggcttccgccagctcccgccggacggcctccagcttctcccggtgctcctggttcgacgtctcaatataattcagcacatcctgcttctgaaacccgccaaaggtggacgtgcggaactgaagttcggtgtcgctcatacggcacaccccttttctacagaatcagagttattttatcacaattcccgctataacacaagcgccacccaggccatagctatctgcacaattctttcttctccctacttgcggttttgcgcaaaatcaactatagttataggtagcattacggcaaaatgtccggtctatcgggctgatccggcggtattctacgttcagaagcatttgagaacggaggtagttttcccatgacctatctggcccacattgccggcgatggccggaaacagacggcggcggagcacctcaacgggacggcggagcgttgcgctctctttgccgctcccttcggcgcggaggagctggggcggctggccggcctgagccacgacctcggaaaatactccatggaatttcagcgccgccttgccaacggccccaaggtggatcacgccaccgccggcgcctttgcctgctggcgtatggggcagcctctggccgcctttgcggcggcgggacaccacggcggcctcccggacggaggcactcagggagattccccggatgccggaacctttttgggacggatgaagcgcgcggaacggggcatgctgcccgactgctccccctggacggaagagatcaccctcccctcccccgctcctcccccctgcggcgcggagccgctgtccatgatgttctttacccggatgctgttttcctgtctgacggacgcggatttcctggacaccgaggcctttatggacggctcctcccggccggagcaccccgcccctctagacgacctttgggagcggctccagcgccatatctccggctggtttccccctcagggagagctgaactcccgccgctgcgccgttctggagcagtgtatccggatgggcaagacccagccccccggcctgtttaccctcaccgtccccaccgggggcggaaagacggtggcctctctggccttcgccctggcccaggccagggccagggggctgcggcggatcatctatgtgatcccctacacctccatcatcgagcagaccgcccaggagttccgaaccatcctgggggcggagaatgtgctggagcaccactccaacgccgcctatgaaatcgacgccgaggccactccgaaaacggttcgcctggcccaggccgcggagaactgggacatgcccgtggtggtgaccacggcggtgcagttctttgaatccctctatgccaaccgcccctcccagtgccgcaagctccataacctggccggaagcgtcattctcttcgacgaggcccagctgctccccctcccctgcctgcggccctgcgtccacgccatcgcccagctcgttcagcattacggtgcttccgccgtcctctgtaccgccacccagcccgcactggggccgctctttgcggagttcctgcccggccgtccggcagtggagctctgtccgccggagctgtgtcccccggaatccttccgccgggtgtgcttccgccaggcgggccggctggactgggatacactgtccggacagctccagcagcacgagcaggtgctctgcgttgtcaacagccgcaagagcgcccaggagatctttacgcggctctccggcgaggggaactttcacctctctaccctcatgtatcccgcccaccggcgcgccaagctggaggagatccgccgccggctcaaggaggggctcccctgccgggtgatctccacctccctgatcgaggccggggtggatgtggactttcccgccgtgttccgggaagaggcgggcctggactccatcctccaggccgccggccggtgcaaccgggagggcaaacgccccgtctcggagagcatcgtcacccttttccagggggaggccgccccgccgcctctgtttcagaccgccatcggcgcaggccgcatggtgctggagcagtatgacgacatcgcctcccaggaggcgatccaggcctatttccatacgctcctggagctgaagggggcggaagcgcaggacatatatggtattctgcccaagattcgcacggggctgctccccttccagtcggtggcggagcgtttccacatgatcgacagccccacccggacggtctacatcccattgggcgcgggcgcggagctggtcggacggcttcgggccggagagcggagccggacgctgttccgccagctcggccaatacggcgtatctatctacgaagagcacttcgccgccctggatcaggccggggatctggagcggctggaggatggctccgctatccttgccaccctgtccctctattcggaggaaaccggactgtctctggaggcggactgtggaaagggactgtttatctgagaagaaaaggagtgaacgcctatgtccattcagctggaggtctggggggattatgccctctttacccgcccggagatgaaagtagaacgggtgagctacgatatcatgaccccctccgccgcccgggggctggtggaggccatctactggcatcctgggctgaggtggatcatcgaccgcatccatgtgtgcgctcccatccgcttcaccaacctgcggcgcaacgaggtcaagtccactctctccgcccgctcggcccggacggtgatggagcggggcaagggagagctgtatctgtgcacatccgacgacattcagcagcgggccgccctgctgctgcgggatgtgcggtatgtcattgaggcccattttgacatgaccagtcaggccgcccccggagataatccgggcaagtttcaggacattgtcaagcgccgcatcaaaaaggggcagttctaccaccagccctgctttggctgccgtgagtttcccgcccatttccactggtgtgaggagctacccccctgcccgaaggagctgctgggagagcgcgatctgggctggatcctgtgggatatggactatacaaatccggaggatatccgccccctgttcttccgcggcaccctgcgggacggggtgctggaggtgcccgcccgggacagcggggaggtgcggggatgattttgcaggcgttgacccagtattacgaaactctggtgcaggcaggcgtgcttgccggccccggctgggggccggtcaaggcctcctatgcactctctatcgccgcagacgggacgctagagcaggttacgtccattcagacggagcagctccgagggaaaaagactgtgctcgccccccaggtgctcacgctccctgccccggtcaaacgcacagtagggatcgccgccaattttctgtgcgataactccggctacattttgggcgcagacaataagggcaaccctcagcgctcccttgcgtgctttgccgcctgcaaggcgcttcatacctctgttttggggggtgtcgcttccccctccgctcaggccctgctggccttcttccgcacctggatcccggagtatacactagagcatcccgctctggcagagtatcgggaggacatactgtccggggccaatctgctcttccgttataatggaagctatatccatgaagatcccgagattcggcgtgcctgggagcgccgctatcgcgccgataccgacagcccaagaggtatctgcctcgtcaccggcgaggaagggccggtggagtccgttcacccggccatcaagaatgtgtccggcgcccaatccagcggcgcagctctggtctctttcaacgcaccggcgttctgttcctacggcaaggagcagaacctcaacgcccctaccggcaaatacgccgccttcgcctatacggccgccctcaattacctgctggccgaccgggagcacgtctaccggctcggggacgccaccgtcgtctgctgggccagaggcggcggcgacgcctaccaggcctttttcggcggggctctgctgggggtgccgacgccgtacagcgccgcggatctccgcggcatgaccgcacagctgtgtcagggaatacccgtggactttcaggaggacaagctcgaccccaacatggatttctatatcctcggcctctcccccaacgccgcccggctgtcagtgcgctttttcctccacaataccttccggggattcctggaacacatccagtcccactaccggcggctggagatcgttcgcccctcctatgacaagtttgagaccctgcccatctggaagctgctggacgagccggtaaaccagaacgcccgggacaagtcccccgcccccgatctggccggcgaggttctgcgggcggtgctgaacgacacccgatatccagccacgctgctcaacggcgtcgccctccgcatccgggcggaacgggaggtcacccggggccgggccgccattctgaaagcctattacacaaagctggccgagagtaccggccacgaacatcctgatataccggaggaggtcttacaagtgtctctcaatcctgacgccaccaatgtctcctatctcctggggcggctgttctccgtgctggaggccgtccaggccgctgccaaccccggcatcaacgccaccatccgcgacaagtatttcagcggagcgtcggctacccctgccgcggtattccccgtcctggtcaatctggctcagaagcatctgaaaaagctgaacgccgccaaccgcggtctctccatcgcctatgagaagcagatgaccgagctgctctccaagctgggtacggaataccccgcccacctgaatctcccccagcagggttcgttccagctgggttactatttccagactcaggcccgctatcagaagaaggaggagaagtaatatgtccgagcctatcaaaaaccgctatgaatttgtcatcctgttcgacgtggagaacggcaatcccaacggggatccggacgcgggcaatatgccccgggtggatccggagaccggcctgggcattgtcaccgacgtgtgcctgaagcggaagatccgcaactatgtggagacggtgaaggaggacgccaccggctaccgcatctatgtcaaggacggcgtgcctctcaaccgcagcgacgccgaggcctacgccgcactggacgtggacgaaaaaaccgtcaaggaaaagaaaaaggccgatcccgacctggagcggaaagtccgggactggatgtgcgccaacttctacgatgtacgcaccttcggcgcggtgatgaccacctttgtgaaggccgctctcaactgcggccaggtgcgggggccggtgcagctgggctttgcccgcagcgtggaacccgtcattccccaggagatcaccatcacccgcgtggccatcaccaccgaggccgacgcggagaaaaagggcactgagatggggagaaagtatgtcatcccctatggcctctatcgctgcgagggctacgtctccgccaacctggcccgcaagaccaccggcttctccgaggaggatctgtccctgctgtgggaggcaatcctcaatatgttcgagcacgaccactccgccgcacggggcaagatggccgtgcgggagctgattgtcttccagcacgacagcgagctgggctgcgccccggcctggaagctctttgaagcggtacatgtcacccggagggatcccggtgatcccgcccccgcccgttcctatcaggattactccgtcacggtggacgaggccgccctccccgccggaatcacctgccggcggatggggtgaacttccgtgaggaggagtttctccccctctccggccttcagcactttgccttctgccgccgccagtgggcgctgatccatctggaacagcagtggcaggaaaatctgcgcaccatagagggccagctcttccatgaccgcgcccacgacgcctcccttcgggagcggcggggcgatactctggttctccgcagtctggcggtggcctcccctaccctgggactgtccggccagtgcgacgtggtcgaatttcgcgccgcgccggagggcgtccccctcgcgggcgaggagggccgctggctgcccttccccgtggagtacaagcgcggccgtccaaagcctcaccaggcggacgagcttcaactgtgcgcccaagccatgtgtctggaggaaatgctgtgctgccccgtcccggagggctcgctctactacggcgaaacccgccggcgcactccggtgcgcttctctccggagctgcgccgtcaggttcagtccgccgcagaggagatgcatcagctcttccggcggggccacacccccaaagccaggccgggcaagttctgcggcgcctgttctctgaaggagctgtgcctgccgcagctgatccggcgggagtccgtatccgattatctgaaccgggccatggaggaaacgccatgagacaactgttgaacaccctcttcgtgacctcggaggacatctatctgtccctggacggcgaaaatgtggtcgccagccgggaacatcaggaggccgcccgctacccgctccataccttgagcggcattgtctccttctcctaccccggggcctctcccgccctgatgggcgcctgcgccgagcgcggtatctctctggccttctgcacgccgcgcgggcggtttctggcccggatcgccgggagtacctcgggaaacgtcctgctccggcgtgcccagtaccgcacggcggacgagctctccgccagttgccgcattgcccgcagtatgatcttcggcaaggtctataacgcccgctggagcatcgagcgcacccgaagagatcacgggctccggctggattccgccagcctgacagcctccgcgtctcatctgaaagagcttctcccccaaatcgccgcggccgcctctctcgagcatctgcgcggcctggagggcgccggagcaaccctctatttcgggcagttcgaccagctgatcttgggtgaaaagcccctcttttcctaccaaagccgcagccgccgtccgccgcgggatcctgtcaacgccctgctctcctttgtctacagtctgctgtcgcacgactgcgcctccgcactggagagcgtggggctggattcctacgtgggctttctccaccgggatcgccccggccgggcctctctggccctggatctgatggaggagctgcgcccctgtatggccgaccggttcgttttaaccctgataaacaaccgaatagtggggcggcaggactttgactttctggagaatggggcggtctttttgagtgactccggccgcagagccgttctgaagcgctggcaggagcggaaaaaggagtctctaacccacccctatctccaggaaaagctctcttggggactggttccctatctccaggcgctgcttctggcccgctgcctccgcggcgacctagatgcctatccgccctttttgtggaagtgaggccattatgctggttttgattacctacgacgtcaatacggcggatgccgccgggcgcaagcgcctgcggcagatcgccaagcagtgcgtcaactacggccagcgggttcagaattccgtctttgagtgcaagctggacccggcccagtacaaactccttcaggccaagctgtgcgcaatcatggaccccgaacgggacagtctccgcttttattccttgggaaatcgctatgagcagaagatcgaacactttggctgtaagcagacctaccttccagacgaacctttgattttgtagcgtgcgaagtccaagatgacacgccttctccggccggttcgcacccaaaaagcataaaggaaagcttaatggagcataggcgcgtttgtttttgtatgctcagccttcttccccttgtgcaaataagcgaattgagccaagcaaactctctgctctttggtaaagtttgctgtcgcacccctcgcggggtgcgtggattgaaatatcgcctgaccggtctggagaatctggc

SEQ ID NO: 4275 - DNA, 5736 bp, Unknown
  gut microbiota DNA sequence
accccaggcggcgcagccgcaggggccgctcctcctccgggccgccggagcgctccgcctcggcctcgacgagtaccgtccgccgccccgcctcccgggcggccagcatcttcaagatggccccgcccagaccgccgttccggcgggcggcggtcacccccagatagtccagaagcacatagtccggccactccggagtgctccacagggtggcgtagcccagcagggccgccccatcgcagaggcccagcagctcatagcgcccctccgccgccagggcgcggatggcctccagcggcttgcactcgcaggcgggaaaggaggcgcacagctccccggtgtaccagtccgcccagtcccgggcgggaatggggcgcagatccattaaagctcctcccctttcatgctatcccaagcctacagccgccaaaatcagggagaggatggaaaccaggatcaccaccgtcgggatgatgatcatggccgtccccagcacctttacggtcgccagatagtacttcgacggctctcccccctctgtgtccagagcgtgcttcagcttccagcaccagtccggcttgcgcaccatgaaaatccctagaacaatgatcgccgctgaaagcaggcagattccgagataatccatacatgctcctttctccgtcagcccttggcctccgcccagctcttgcccgcgtgggcctcggcggtgaggggaacggcgagctcggccacatgctccatctcctcggccagcaggcgctgcacctgctccgcctccccctcggggcactctacgatcagctcgtcgtggacctggagcaccagccgggcctccagcccctcccggcgcaggcggccgtccacccggagcatagcctttttaatgagatcggcggcggtgccctggatgggcatgttcagcgccacccgctcgccgaaggagcgcaggttgaagttagaggacttgagctccggcagccaccggcggcggcccatgagggtggacacatagccgtcggccttggcccgctccaccacctgggtcatataggcgtggacgccagaatatttctcaaagtacttctccatatacgccttggcctccgcccgggtcaccccgatgtcctgggacagggagaagtcggagatgccatagacgatgccgaagttcaccgccttggcccggcggcgcatctcgtgggtcacctgctccgggggcacaccgaacacctgggaggcggtgacggtgtggatatcctctccggtgcggaaggcggcaatcatgtgctcgtcccccgcaatgtgggccagcaggcgcagttcaatctgggagtagtccgcatccaccagcaccctccccgcgggggccacaaacatcttgcgcagctccgcccccagctcggtgcggacggggatgttctggaggttgggctcggtggagctcagccgcccggtggcggtgacggtgttctggaaggaggtgtggatgcgtccgtcggcggcgatgaccttggtcagcccgtccacataggtggatttcagcttggccaactgccggtagtccaacactgcctccacaatggggtgcttgtcccgcagcttctccagcacgtcggcgttggtggagtagcccgtcttggtctttttcactgggggcaggcccagcttgtcaaacaggatgcggccgaactgctgggtggagttgatgttgaactcctcccccgccagctcgtagatgagggcctcgtcggcctgaatacgcccgtccagcaggataccgaagtcggccagcgccctccggtccaccagcatgcccgcccgttccatttccgccagcacgggacagaggggcagctccagcccgtaatagagctcgtgcatgtccagctcctccagcttgggggcgagggccccgtacagcgcggccgtcaaggcggcgtgggcgcacatggcctccgccggtcccgccgggtcggccagggggccgaaagcgtcgggggccaggtactcctttgccttggggaactcctggttgaaataggtgatacccagcttctccagctcgtagctgccgtcggtgggagagagcagataggcggccagggcggtgtcaaagcagaacccgtcggtgctcagcccctcgtccagcagcaggtgcatcagatccttgacattgtgggacaccttttggatctctccggagaacagggcccgcagcagctcattgtacccctccagccggtccgccgcgcacagggcagccctggctccgccgtcccaagccaccgccaccacatccagagagggcagggccagcaccgcgacccacggctccctccgccactgctccaccagctcctccatgcgaacccggtcggtgacgcgctcctgccggacggccccggcggcgggcttgtccgcccgtccggccgccgggccgccgctcagccccatcttgtcgatgagcttgttgaactccagcgccagaaacagctcgtacagggcggggccgtccggctcccgccgccgggcgtcctcgggggaaaagtcaatgggcgcgtcgcagcggatggtggccagatcataggacattctggcctgttcttccccctcggtcagctttttcttgaccgcgggcttggcctccacgccctccacgtcggcgtagatggcctccacgctctggtagcgctgaatcaggtccatggccgtcttttccccaatgcccttgacgcctggaatgttgtcgctggtgtcccccatcagcgccttcaagtccacgatgtggacggggtcgaagccgtaggcctcccgaaaggtctccggggtcatctccttcgtagtagtctgtcccatacgggtggacaccagcttgacccgggtgctgtccgtgaccagctggagtgagtccttgtcgccggtgacgatcacggtttcccacccggcggcggtatccctggcggcgatggtgccgatcagatcgtcggcctcccagccgtccagctcgtagcgggggatattcatggcggccagcacatccttgagcacgggaagctgggcggccagctcgtcgggcatccccttccgctgcgccttgtagccctcgtaggccaggtggcggaaggtgggggccttccggtcgaatgtgacgcacagggcgtcgggcttctcctcgtccagcagcttgagcaggatgttgacaaagccatagacggcgttggtgggctgcccgtccttggtggtaagcatccgtataccgtaaaaggcccggttgatgagggaattgccgtcaatgaccatgagtttcatgcggtagcctcctgtccccgggcacgcccggagcaattcaatgagataatattataccatactacaataaattagtcaaaaatacgaatagcaccaggcggcccaattccttgggccgcctggttttttccgtggagcagtatgacatttaagattatttgagtcaacaatccggagagcaccaaggagccaatccagctctatgggggcgtttccttactcctccccgtccgccgggacaaccacaaccgcccccgttccgccgtcctctccggctgtgaaaaagctggtcatcagccggggcgcgccctgctcgtccaaatagacccgtacctgtgcctgttcctccccctcgccgcactcatacaggtattccccctggtcggtcagcgcctgggttacatcggtctccactccgtccacaatcagaatggtgcggccgtcccgctcctccagggacgcctccgggaggcacagtcctcccgtcccctcctccgtattcaccggggaatccgcccaggcctccccggcgaccgcagcgtcgcggagacttgtgagataggtcataatcgcctcggaattggcggcgctcaccgttaccaccagcatggcggccacggcggcggccaccaagcccagacgcatgggacggtggaacttgcgcttcttttcctgctcagtcatttggataacctcctctaatttttcctcggatacatgcagctccgagcagagttcacggtattgattgggttcaaacatagccctttccctcctcttcttcggacagctccctccgcagccgctccctggcccgctggagccaggtctgcaccgtggacggattggcatgaagggccgcggcgacctccttgacggagcagccctcgtagtaatacagatagatggtcaggcggtacttggtctccaggcccatgacggcctggaacagctcgcgtttggcggggtcatcggacaccggcgcgtcccactgctcatccagcggcacggcgcggctccgccagaaggagcgcagcaggcgccggctctcgttcaccgccacccgcagcagccagtgcttccggtgctcctcgctctcaaagcggtctccctgctggtagagcttgagcaggacggtctgggtcacgtcctccgcgtccgcccggttcttcagagcgtggtaagcaacccggtagagcatgtccccgtaggtgcgggccacccgctcgaatgtctcttctgtcatgggtactcccttccttgcggtcgtctcttgaaaggcctttcactgagaatacccgcgggcggcggaaaatatctcaggccgggcaaaaaaagagggcggaatttccctctggggaaatccgcccccggtcttaccggcccagacgccggtagaccgtgatatacatggtgagcaggcaggccagcccgccgagcacgttggagaccggctccgccgcgaaaaccccgtccacccccatgcccagccccggcagcaggagcgtcagcggggccacaatgaaggccttgcgcagcagggagaaaaacaccgcgctcctggagcgccccagtcccacgaacaccgactgcccgatgaactggaaggacatacagaagaaggcggcgaaatagagccggaaggccggaatgcccgcagcgatcagctccggctcgtcgttaaagatacggatgagcagctcgggcacggccataaccagcgcccacgccgccacggagtagcccaccgtaagcaccgtggtgaaccggatcccccggcgcacccgctcgtactcccccgcgccgtagttgtagcccagcaccggctggcagccgttggtgatgccctgcaccggcatggacaccacctcccggatggagttgatgacggtcatcacccccacgtaaaggtcgcctccgtagtgctgaagggaggcgttgcacagcacctgcaccaggctgttggtcatggacatgacaaagccggaggtgcccagggcgaggatccgacgtactcgcgccgcctggagccgcagggtgttccaccgcagccggaggagcgcccgccgtccagtgaggaacttcagcacccacagggcggaacagccctgggcgagcaccgtggccagggccgccccccgcacccccatatccagggcaaagatgaagatgggatccagcacgatgttcaccgccgcgcccagggccaccgtcatcatccccatgcggctgaagccctgggcgttgatgaaggggttcatacccagtccgatcatcacaaagagggtgcccagcagatagatggtcaggtagtcgttggcgtaggggaaggtcagatcgctggccccaaagagatagaggatgggccgccggaaggccagccccagggccgtcagccccgcgccgaagaggaggagcagcgca

SEQ ID NO: 4276 - DNA, 15316 bp, Unknown
  gut microbiota DNA sequence
ctcccccttgccccggtgaatggagcacaggggcgcgccccccatgccgcacaggttggcaaagcccatgaggatggaaatgatgggcaggcacagccccagcccggtcagggacaggtgccccggcaaccggcccaggtacatgcggtctacaatattataaaggatgttgatgagctgcgccaccgtcatggggagcgccatctgaaggatgttccgcgccatgctccccctggaaaagtcgttctgtgtctgcctctccgtccttctccccccttttcccgcgcttgaatccgctataatggttctattttatcaatatcccgcctgtttggcaagggaagtcccttctgcgcatgtgtaaacacgaagcgaagcaaagaggagaccgttttccggtctcctccctttgatggcttagatccgcgtccaggtggtgccgtccttgccgtccttgatctccacacccatggcgcggagctggtcgcggatggcgtcggcctcggcccagttcttggcgcgcttggcctccaggcgcttggcgatcagggcctcgatctcctccgcgccctccacgggggcggcctgctgggccttgagggcgtcggcgtgggccagcagctccaggcccaggacctggtcgaagctgtccagcgccgcccgcttggtggcgtcgttcacgccggccttgagcacgtcgtacagggcggtgacccccagagaggtgttgagatcgttgcccaccgcctcaaggaagtcgttcttgaaccgctccacggccccctcgtccacagttccctcaccgctcagggcggctacacgggccaccagcttgtcataggcggccttggcgttgtccaggttctcccaggagaacaccagccccttgcggtagtgggactggaggcagaagaagcggtacaccagcggatcataccccttctcctccagcagggagacggtgaggaactcccccttggacttgctcatcttgccagagttggtgttcaggtggtggatatgcacccagtatttgcaccaggggtggcccaggtacgcctccgactgggcgatctcgttggtatggtgggggaaagcgttgtcgatgccgccgcagtggatgtccaggtgctcccccagatacttcatggagatacaggagcactcgatgtgccagccggggtatcccactccccagggggagtcccacttgagcgcctgatcctcgaacttggacttggtgaaccacagcacaaagtcgttcttgttccgcttgttggcgtcctcctccacgccctcacggacgcccacggccagatcctcctcgtcgtggtcattgaacacataatacttctccagcttggaggtgtcgaagtagacgttgccgccggcgaagtaggcgtagcccctgtcaatgagggaggagatgaccttgatatagtcaccgatcatgccggtagcaggctgtaccacgtcggggtacttgatgttcagcttcttgcagtcggcaaagaaggcatcggtataaaattgggcgatctccatcacggtcttgtgctcccgctgggcccccttgagcatcttgtcctcgccggtgtcggcgtcggaggccaggtgtcccacgtcggtgatgttcatgacgcgggtgacatcatagcccgcatagcggagcagcttctccagcacgtcctccatgatatagctgcgcagattgccgatgtgagcaaaatggtacactgtggggccgcaggtgtacatggacaccttgcccggctcgtgggggacaaactcctccttggtgtgggttgcggaattgtagattttcatagattcttactccttgcctgttcatccatcagttgttccagccattccagccgggaattcaacgcctgaagctccttctgcaccgggtcggtcacgtggatctggtccacctgcccggcgaagtccaccttctccccggcgatgcgcaccacccgggcggggacgcccacggcggtggcctccggcggtatttcgctgagcaccaccgcgttggccgcgatgcgggaattgtcccctactttgaaggggcccagcactttggctccggcggacaccatcacattgttccccagggtggggtggcgcttgccgtggtccttgccggtgccccccagggtgaccccgtggtagagcaggcagtcgtcgccgatctcggtcgtctcgccgatgacgatgcccatgccgtggtcgatgaccagccgccggccgatctgcgcgccggggtggatctcaattcccgtccagcagcggctccactggctcaccagccgggccaggaagaagagccggtgccgatagagaaagtgggcaagccggtggtagatgagcgcgtgcacgcccgggtagagcagaaaaatctccagccggctccgggccgccggatcgcgggcctgataggcccgcagggtctcgcctagccgcgtcagtccaaacacctcctgaaaaacagaaacgcctcccatgccggacggcataagaggcgatacaaatcgcggttccactctcatttctcactcaaaggccggtaacggggccagccggggggcatccatatcccccgcgctcccggacgcacattccccagttaccccctgggcgcgctctcagccggtgacgctccctctctggcgggtactcgctgggtactatttccgttcctcacgcgattcaactgttctagtatactaccacgttccgggaaatgtgtcaaggcgctttgcggttgcaattcagggggatttctgttagtatggggctgaaaccacacgctttcacacaaaaggaggcatcttatggccctgatctcctgtcctgagtgcggaaaagaggtatccgaccgggctccggcctgcattcactgcggctatcccctctcctccgccgcaccgtatgcggacttccgccccatcacagggcccaaccgctttaccgtccgtctcaccgcccgccccgcctatccggatgcccgcagcagaacgctccgcgccctcatgaaggagctgggcctctccagggagcagggcatacgtctgctggagcaagcgcgccgggagccggttcccctgcgggagggcctcaccgaggaggaggcccttgcactgctggaggtattccgtcgggcgggcgctcccgtccagttggtggatggggcggtgccggagccgccccagctcccctctccggtgccgggcgatgccctgaccttcacttccgtcgtattcgccacactcaccgccctggtcatctggtctctgctgagtctgctgttcaccagtctgttcggctgaccggggtctcctccaaaaagggttgcacccgctccagccactcctccgggcggtagaccgccagggtgccgtgatcagtctcagggatggcacagctgcgtcagtccaaacacctcctgaaaaacagaaacgcctcccatgccggacggcataagaggcggtacaaatcgcggttccactctcatttctcactcaaaggccggtaacggggccagccgtggggcatccatatcccccgcgctcccggacacacattccccagttaccccctgggcgcgctctcagccggtaacgctctctctttggcgggttactcgctgggtaccatttccgttcctcacgcaattcaactgttctagtatactactatgttccgggaaatgtgtcaaggcggagtacggttgcaaaccatagattaacctgttattatggaaccggaatcccccagcttttacacaagaggaggtatcttatggccttgatctcctgtcctgagtgcggaaaagaggtatctgaccaagccctggcctgcattcactgcggttatccactccagagtttccctccccccaagcgggcccctaggcagtactcgctcgtgttcaccggtctgggcccacacgcggatatcccggccgctctgcactgtctctccaaggagctgggcctctctcagaaggatgcgcaagccctgctggaacgggccccggcggtgctggtcactcacctgaagccgcgtgaggcccagcggttggtgcaagtactggccgggtacggtatctcctctaaaattgtggtaggcgaggaggtctcctcacccatctacattccgcctgtccgaacacagagggagccgttgagcttttggatgaccgttttagctattgtgctaggtatcaacgccattcccctgctaacgttcctgttcaatctattccagcaggtcttttaatgcaagggcccgttgctttctggatgaaagcaacgggccctcgttttctattgcgggtcaaacttccggcagaaggccgccgcgtcgtcaaagtcccgcaggcgctccctcagcatgtcgtggctccagtcccaccagcggatgcgctccatggcggcaatcagctcgggcgggtagcgccagccgatgtgccgggcgggtactccgcccacgatctcgtagggcgccacgtcatgggtcaccacggcccccgcgcccaccaccgcgccgtcgcccagggtgacgccgcccatgagcaccgcgttgtggcccagccacacgtcgtttccggtgaccacccggtggttctccctccgccagtcgatcaaagccgcgtcatccggccccagcccgtagtgggagcagcggtaggtaaagtggtgggccgccgcccggattttggccgggtgctgcaccgggttgatgcgcacgccggtggcgatggagttgaacttgcccagggcggtatagatgatgtcgttggagccgaagcagtaggtgtagtcccccacctcggtctcctccagcacacagtggtcgccgatctccacatagcggccgaaccggcagtttttcgtctgggaggtggggtggatcagcggccggtcggggcaaagctctttcgtaaaatccagcattacaggttactccagtccaccacatctttgttcttcagaaaatactccgcgcccgagtagacagtggtgaccaggatcaccgccgcgcacaccagatccagcgcaggccgggcaatgagcagcatcaggcagatgcacaccatggtggaggccgtcttgaccttgcccgaccaggcggcggcgattacccgcccccgctccacggcgatgagccgcagggcagtgacggcgaactcccgcacgatgaccaccagcagcacccaggcgggcaagcggcccgcctctacgaaccagagcagggcggccatgaccagcaccttgtcggccagagggtccataaacttgccaaagtcggtgacctggttgtagtggcgggcgatgtagccgtccacaaaatcggttacgctggccagaataaagaccgtgagggcgaaatacatgtggaaggggaagcggagatagagcagaatcaggaacaccgggatcagcgccacccggagcatggtcagcttattggcggtattcattgcttcactcctctatctcgccggtgagatccccgtcgctggtgccggtgatgcgcacccagacgaacgccccggcgggcaccaggccgccggcggtgaagtacaccttgccgtccacgtcgggggagtcggcataggtgcggcccacatagcagcccatctcggcatcaaagccctcgcacagcacctccaggcactcgcccaggcgctccccgttgaaggcgtccatcacccgggactgaagctccaccaccagctccacccggcgctcggcggtggcggcgtccacctgatcccccatctcggcggcgggggtgccctcctccggtgagaactggaagatgcccgcccgctcgatacgggcctcccgcagaaactcgcacagctcctcaaactccgccttcccctcgccgggcaggccgcagatcagggaggtgcgcagcaccagaccaggcaggcggtcccgcagcttggccagcagggcgaggatctccgccttggtggagcggcggcacatgcgcttcagaatgccgtcgttgatgtgctggagggggatgtcgatgtagttgagcaccttaggttcacgggcgatgacgtcgatgagggcgtcgtccagatcgtcggggtacaggtagtgcaggcgaatccagtgaaagggcagcttgcacagctcggtgagcagctcccccagcatccgcttgtggtagaggtcgatgccgtagcgggtgatgtcctgggcaatgacgatgagctccttcaccccggcgtcggccagggccttggcctccgccagcagggactccatggtacggctgcggtagcggccccgcagcttgggaatgatacagaaggcgcaccggtggtcgcagccctcggcgatcttcaggtaggcggtgtaggagggggtggaggggatgcgcgccccgtcctcctccgtgtggtcgatatccccgaagcggtggggcgtgcccccggccatcagctcctccagggcggggacgatctcggtgtagctgccggtgcccatgacgccgtccacctcgggcagctcctccatcagctcgtcctgatagcgctgggacaggcagccggtgaccagcagcttgcccagcttcccctcctttttcagctcggccagctccaggatattctgaatggcctcgctcttggcggagtcgataaagccgcaggtgttgagcaccgccgcgtccgccccctcgggctgggcggtgatctcatgcccagcgcttcggaccagtgccatcatctgctcggtgttcaccagattcttggcgcagcccagggatacaaatgcaaccttcaatgaaaacttctccttatacgatcagatagcggccgtcccgccggggcggcattttgggctgctggtcggggtagcccagggtgaccgctgccacgaactcccccttgtcgggggcgaagcggcgctggaacgcagggccgaagcccatacgctggggcgcggacagccagcaggagccgatgcccttggcccaggccgccagcagcacgttctcgatggcggcggacacgctctgcatggctccgtcccggtcgggatagtccggcttgagcatgaaaaccagcaggcacaccggcgccccgcccagggtggacaggaagcggttggtgatgccgatctgctccgggtggcgggaaaagcgctcctccagcacaggctggaatttctccaccacgccgcccatgatggccttgacctcctccaacgcggcggggtcctgtacggccacaaaataccagtgctgcatattgacggcggagggggcggtggccccggcggccagaatctccttcaaatcctctatggagaccggctccggcctgtacttccggatgctgcggcgggtcagcagggcttccatcgtgtccatggtctgctcctttctcacatgcggcggtccgccgcgttcttcctaccattcctccggctccgcaccatagcggcgcaggccggcactgatgtcctcccagcggtagccccggcgggccagagcgtcggctgcccgccggcgcaccttggggtcggagagctccgccccccgcagcttcttctgcaaaaaggcgtcgatggcctcctccgggccggacagcccctccagagcgccgtcccagcagtcccgcggcaccccccggcggtagagctcctcccggatgcggccgggaccgtagcccttggcagcacagtgctccgccaccgcgcgggcatactgcccgtcgtccagatagcccagcccctccagccagtcggccgccgcctcggcggcctcccgaccgcagaggggctccttctcccggttccgggggcgggcggtaagcttctccaccagctccttccgggagagggggcgggcggacagcagctccaccgccttctcccgcacctcggcggcgcgggcggcctcggtcaaggcggacagctccgccccgctcagctcctttccggtgcccaggccgaaggccaccacctcactctcccccaggcggaggatggttccgtcctccaggtggcagagccagcggccccccacccgctcggagggggccagcttacgaatccgcatcctcgaagtcctcggcagagatgtccaccgcccggcctgcggccttggctgcggcccgggcctggctgctcatgagcttgtaggcgttgcggcggatgtcggcctccagcttgtcgcacacctccggattgtccttgaggtactgcttggccgcgtcccggccctggcccaggcgggtctcccccatggcgaaccaggagccggatttctgcaccagatccagcttggcgcccagatccaggatctcgccgatcttagagataccctcgccgtacatgatatcgaactccgcctccttgaagggaggagagaccttgttcttgaccaccttggcccgggtgcggttgccaatgatctccgagccgcttttcagcgactcgatgcgccgcacgtcaatgcggacggaggcatagaacttcagcgcccggccgccggtggtgacctccgggttgccgtacatcacgcctaccttttcgcggagctggttgatgaagatgaccacgcagttggtcttggcgatggagccggccagcttgcgcagggcctggctcatgaggcgggccagcaggcccacatgggagtcgcccatgtcgccctcgatctcggcccggggggtaagggcggccacagagtccaccaccaccacgtcaatggcgccggagcgcaccagggcctcgcagatctccaggccctgctcgccggtgtcgggctgggagatcagcatggagtcaatgtccacccccagggcccgggcatagtaggggtccagggcgtgctcggcgtcgatgaaggccacctcgccgccccgcttctgggcctcggccacgatgtggagggccagggtagtcttaccggaggactcggggccgtagatttcgatgatgcgcccccgggggacgccgccgatgcccagggccagatccagggacagggagccggtggggatggcctccaccacgatgtcggcgttgtcgcccaggcgcatgatggaacccttgccgtaggccttctcgatctgggccatggcggtctccagggccttcttcttatcggcggcgggggcggcggactccaccgccgccttcttcttgtctgccatgtatgtacttctcctctcacggcgggcgggccgctgcccgcccttatgaattcaaaacgccctccaccacccggccgatgccctgggtgtcctggaaggtctgaatctgctcaaactgattttgggccagaatggcccccacgtcgccggcttggccgatgcccacctcaaacagcagggctccgcccagccgcagggcggccccccactgggcggcgatggcccggtaaaagtccagtccgtcggccccgccgtccagggcggagcggggctcgtagtcccgcacgctcacgtccagctccgcgatatccccggtggggatatagggcgggttgcaggcgatcacgtcgaaatcccacagggccgcgtcgggcggctccagggcgtcggcctgaacgcaggtcacccgggcgttgagctcgttgcggcggacattctgcttgcacagccggagggccgcctcgctcacatcggccagcaccacccggcagcctggcacgttggcggccaccgccagacccacgcagccgctcccggcgcacaaatccagcaccctcgccccctctccggcggcccgggccagcaggatggcccgctcggccagcacctcggtgtccatccgggggatcagcacgtcgggggtgatatccaggcccaggccatagaactcccactccccgatgaggtaggccaccggctccccggccagccgccgctccagcagctccgccagcttctcctccaccgggtcggaggcataaagggccatatcccggtaaaactgctcccggctcttgccggccgcacagcagaccagctcccgcgcctctagctgggcgccctccacgccggcctctctcagccgcttgcgggcatccaggtagaggttgttgtacgtggccgccatacagaaaccactcctctgtctctctctaatttcctctctccaggggaataccaggcggttatccccccattttcttcatgggacaaccatgcatcgcctcacgtgggctctgccatctggcggcacagcggttttatttctgctggtgcctcatccctccggtcccctttaccactgatccttccccttctcctccggcagcaccagtgtaaaggcccggatgcccacctcgatcatggagtcgtccggctcaaaggtggtccagttctggagccacatgccgggagcggacaccagccgggtgagccggttgtcgtagcgccccaccacacggttcagctcataggtcaggctgacaatcaccggcaacagcagcaggtgcagccccatcctcgcaaacgtgtttgtcacctccacaaaggagaacagcacgctggacagcaggatactcaccacaatcaccacaaagaggaagctggttccgcagcgggggtggtggcgtggctgaatacgcacgttctccaccgtcaggggcaggccgtgttcatagcagaagatggtcttgtgctccgcgccgtggtactggaacacccggtggatgtccttcatatgggaacagagcatcagatagcccatgaagatgacgatacgcaccacgccctccagcaggttgcgcagccacatgggcaggggaacggccaggcccaccagtccggtgagggcggtgggcagcaggatgaacagccccacggagaaaacgatgcccagcaccaccgccacggtgataaaaaaggaggcggccttctcgctgcccaggtgtctgtccagccagagctcgaaccgggagggctcctccggctcctcctcgtcctccgggaaaaaggaagccgagtacatcaacgccttgacgccgttggccagggaggagcagaaattgaagacaccccggagcagcggcaggcccagggcggggtgcttgtccttgatgagcacccgctcctccacctgctcctccaacccgccgtccggcttgcgcaccacaacggccttcttctccggtcccagcatcataattccctcaatgagtgcctgtccgccgatcatggtcttgtaggctgtggcgcaggattgctttgtttcatttggcattcgtacactgttctccttaactaattggattcaatcgtttcgtctattgtaccaaacccgcgccccgattgcaaggggcgcgggtttgatttttagaacttttgttcgattaccgcctgagctcggattggcaaatggatggttacaatgcaccctcccccctcggcgttgtcaatatccagggtaccctcgtggcgggtaataatctcgtcgcacaccgccagtccaatgccggaacccctcgccttggaggaccccttatagaacttgtacttcacgtggggcagctcctcggccgggataccggggccgtagtcccggatggtgataaccacctggtcctcgtcccgggcgatagcggtatcaatgcgcttgcccgagccgccgtgcttggcggcgttgtccaacaggttgcagaacacctgccgcagccgctccgggtcccccgcgatgggcggaaactcctcgtcgcagtcgaagtggttgagttcaatgccctcccgccggaagaactcccggtaggtgtagaccgcatcctccagttccgccttgatgtccatgggctccactgacagggtgaagcggccgtcctggatgcgggagaactccagcagctcctccaccatgttggtcagccgccgcgcctcggagacgatgatccccatccccttcttcacatctcccgcgtcccgcacctcgccgttcatgatggtttccgcccagccattgatcgcggtcaggggagtacgcagttcatgggacactgacgatataaactcgtttttcatcttttcgctctggttaatcttcagcgacatgtcgttgatggtgtcggtgagggcgccgatttcgtcgtcatagcgtttctcaatctgtacgccgtaggagcccgcggcgatgcgcttggcggtttccgtgatgcccgccaccgggtctacgatggagcggatgaagtagaggttggagaagtacaccatgcccaggatacccagaccgatgcccaaggcgatggccacgatgatgataatctgcttgtccaccttattcagggaggtgacataccgcatgaccccaaccacctccccgtcgatcatcagggggctggaggcggccatgatgtgctcgccggtgctggggtcggcgccgatccataccttagtgcgcttcatgctgatggcctcggcaatgtccggcgttccgggggagcgaaaggccgtcaggtcggagctggaaaagcgaatctggccgtcggcatccagatactctacctccagcttgtcgctgttgggttccccggccaccaccgcccgggcattgtcgtaatactcggcttctgtgcggtagtagtcaaagctgctgatggcgttttccgccttctgcttgagagactcactcagggtggaatagtagtagctccccatcgcggcggagaaggccgccaccgccagcagcacgataaacagcaccacactgatggagttcaccatccaccgctttcggatacctgtgattttcttcatggatcttgttgtcaccacctgggtttggttctaggtcccggccgcccggccggcattaaaagccccacttatatccatagccccacacggtggtgatataagcaggatttgtgggatcgtcatgccccgcaaagcagagctttgcggggacccctcttttccctctgcccggggcaagtgaattgccccgggccaaggcttttgcctccggcaaaaacgcttgtacggcgctccgcgccgccccgccccagggcggggcccatcgaagacgccccgtccgcctctggctaaaagccccacttatacccgtatccccacacggtggtgatataagcaggatttgtggggtcgtcttcgattttaatgcgcaggcgtcggatgtttacgtccacgatcttcagctcgccgaagtagtcccgtccccacaccgagtcgagaatttcctcccgggagagggcttttcccgggttgtccataaacagctttatgatggagtactccacctgtgtaagcttgacccgctgtccgtttttctccagggtacggttgcgggtgttcagcaggaaaggcggctggctgatctcgccggtatccaccgggtcccctccgccggtacggcggtagagggcgtcgatgcgggcggtgagctccgccggagagaagggcttggtcacatagtcgtccgccccggtcatcagcccggtcaccttgtccatctcctgcgtgcgggcggtgagcatgataatgccgatgttgttgtctcccgcccggatacggcggcagacctcaaatccgtccatgtcgggcagcatgatgtccagcagcgccaccttgatgtccgggttgcgcttgagctgggccagcgcctcctccccggtctcggcctcgatggcctcatagccggcccgcttaaggttaatgaccacaaagctgcggatgttcgcctcatcctccagcaccagtacctttttcatcccgtttcctcctttcgcacacaggcgtccgccgtgggcgctaatcgctggtaatcagggcgaaattggcctttacgccctcctcgtccaagccgcagtcccaaccactctcgatcaggcgcgcggcataaatggtctccttctcctccccggtgttgggcaggagaaagcggtcggccatgttggcccgcattacgcggttgtcgccggtcagcttgtagatgaccaggaacggcaccggcgctgtgtccgcgcttccctcccagtaagaaaagattacggcccgctcgccgccgcccgccaagtcgctgcgggagagcgtcaccttccccgaccacgcctcgggcagaacaaagtaccagccgtcccggctgttgtggtaggtggtatataccagatgagaaaccccgttgatgtcgtactgccaccagcggatggcccagaagttgggggccgtccccacattgttgggatcggggagcgcataggcggatggcagctccagtatgccgtcatggttgatgtcggtataggataccttcgtgctctccacctcggtggaccaccggatggtgctgtcgctctcgccggtgtccggctccagggtcacattctccagccccccgtttttccaggcgaaaatgtcggtgatctgcccgttttcggcgtaggtggaggtgacaaacagcgccggcgccatgttctggagatagcccgtcttcatgctgaccagcttctccaccccgttggacagtggtgcggaggcgtccagctccaggataccatcccggaagttatagacctccacccggctgcccggcgcgctgttgacaaagctctctgcctggcccacttcccctgccgccatctggagcacgaggatttccttctgcccatccccgtcaacgtcataaatctggaagccggcgtggtcggtgcgcatcaactcaagcacctcataacggtcgatggagtaagccgccagggagtgcctctgccccgctgtctcccagtccacgatgagctccttggaggggctgtcgtcaaggttctcatagtagatggagtcaatcgcatttcctgagccctcaatcacggccgccacctcgtagttctcccccacttggcggtagatgtagatcttcagcggccgctcatccgcactcacccggaaaaaggcaatagcctcctgtacgccatccccgtccaaatcctgaagctgcaccttctgggtcagctccccgctgaggggcgcggcgtactcgcccccttgcgtgagcaccttgttgatctcattgtccagcttcagataatcgtcgggcgccttgggaggcgcgtagaattcctccaccgactgggaaaaacagccggtcagaaacatcagcagccccgccgccaaaagcagcctgcattttttcatcgtcggaacccctccatgggataagttataaaatcaagattatcatagcacatctctaccggaaatggtatgttaattaaccgattattttctgattttcctccatcgaaaagacttgccaaccgcttcaatgtcgtgtataatattttgcag

SEQ ID NO: 4277 - DNA, 68643 bp, Unknown
  gut microbiota DNA sequence
ctcccgcgggcggggacaagccccgcccctacagcgccgcgtatcatgcggaactcgatatgcccccaaccaggtaggggcggccctcgtggccgcctgcgggcggggacaagccccgcccctacagcgccgcgtatcacgcggaacccgatataccccaactaggtaggggcggccctcgtggccgcccgcgggcggggacaagccccgcccctacaatgccgcgtatcacgcggaacccgatataacctccagccaggtaggggcggccctcgtggccgcccgcgctccgggataaagtggactcttgactttccttcccctcagtgatatagtaggtccgttcaaattggctttgacggagacgaacccgcacagcggcggacagagaggggcgcgcacggtggaagcgccccacgacacgcggcggctgtaccactcccgagccgcccgggatgaccgggccggggctttcccgttacaggaagtcacaagcggccagttgccacgctgcgcgccctctgcggcggccagctgttccacgctgtgccgaacctgccgccgggctttgcccgaccgttcgttcggcctgcgcgtgttgcggttgtcctgccgggcgtctctgtgtctctggcaagcagggtggaaccgtgggacgtatgacagcgcctcacccctgacacactcaggggtgaggcgcttttttgctgtaaccccgccgcattttaccggggcgcgcgccgtgtgccgccccccacagacgaaaaggaggttatcagaatgtccgaagagaacaagaacagcgaattttcctttgaaaacgagagctaccgcaagacctactggcacacctgctcccacattctggcccaggcggtgaagcgcctgtacccggaggtgaagctagccatcggcccctccatcgacgagggcttttactacgacatggactcccccttccccttcactccggagatcctggagaagcttgagggggagatgcgcaagatctgtaaggagaagctgaagctggagcgttttgagctgccccgagaagaggctctcaagttcatggaggagaagggcgagccctacaaggtggagctgatccacgatctgccggaggacgcccacatctccttctacaagcagggcgagttcaccgacctgtgcgccggcccccatctggactccaccggccgggtcaagggcaacgccatcaagctgaccgcctgcaacgccgcctactggcggggcgactccagccgccagaccctccagcgcatctacggcatcgccttccccaagaaggacgagctggacgcctacctccagcgcattgaggaggccaagaagcgggatcaccgcaagctggggaaggagctgggcctgttcaccattatggacgagggccccggcttccccttcttcctgccccgcggcatggtgctgaagaacaccctcatcgactactggcggcaggtgcacaagcgctacggctatgtggagatctctacccccatcatgctcaaccgctccctgtgggagcgctccggccactgggaccactacaagaacaacatgtacaccaccgtcatcgacgaggaggacttcgccgtcaagcccatgaactgtcccggcggcatgctggtctacaaaaacgagccccactcctaccgggatctccccctgcgggtgggcgagctgggcctggtgcaccggcacgagctgtccggcgccctccacggcctgttccgggtgcgctgcttcacccaggacgacgcccacatctttatgacccccgaccagctcaaggacgagatcaagaacgtggtcaagctctttgacgaggtgtactccgtctttggcctgcactatgagatcgagctgtccaccatgccggaggatcacatcggcaccgtggagcagtgggagcacaaccaggacatcctgaaagaggccatcaccgagatgggcaagacctacgtgatcaacgagggcgacggcgccttctacggccccaagctggacttccacctggccgactccctgggccgcacctggcagtgcggcaccatccagctcgactcccagctccccgagcgctttgagctggagtacgtgggcgcggacaacgagaagcaccgccccatcatgatccaccgggtggtgctgggctccatcgagcggttcatcggcgtcatcaccgagcacttcgccggcgccttccccacctggctggccccggtgcaggtcaaggtgctccccatcaccgaccgggcggcggagtacgccgaccaggtggacgccaagctggacgcgctgggctaccgggtggagaccgaccaccgcagcgagaagatcggcttcaagatccgccaggcccagttggagaaggtgccctatatgctggtggtgggcgacaaggaggccgagaccggcgacgtggccgtgcgcaaccgccacggcgagcagaccgtcatgagcttcgacgcctttgccgccaagctcagggacgaggtggactccaaggccctggagcagaactgacctttcccccgattttgacacgccctgggcggccataggccgcccagggcgtatctgttcttgtcttgcgggccctctccctttcccgctctccaggtctctttccgcggacagacctttccatagacccccaatctctcaagaacacacagcggcggcccgcgcatccacgcaagccgccgctattcctttgccttcatcgcgtccaccagccgggccagcgcctccgcctcccgctccgtcagcccgtcggtgtgaatcgccggagcactctcccgctccgggaacaccagcgcatccaccgagaagtccagcagctccatcatctgaaagagtaatggaacggacggcaaccgacgggatccttctatattttttaggtggatcggcgtaatgtccagcatttcagccagacactcctgtgttagcccttttttcatgcgggcggtgcgaatggtctctcccagcgccctgcgatccagttccatcctcatatctaacagcaccccttttaggtatcttaaagttaatattctctattgcaaatttcctaaaagattattataatagatgctataagatacccctcactaaaatgaactgcgattactggggtgattatatgtgggaagtcgtagcttttgtcattatcatagttatcggaattttctatctcataggtacttattttggcgctggtgccgttattttagtaatcggcgctattgtatttggattttataaatttcttcattttggtgatacagcagaagaagaatccgaatatgtagaaaacgctctcaagtttatagaatttacgaaaagattaaattcccctctgcttacgttatttgccactcccaaacatattggagtcgttttatctgatgatgctttgggtatatgtgtgcaaatgtgtttggctacaacctcagatgcgaggttagaaaaagccaggcgtgatctattggaaaaagagctggtaaagcatattgatggtaataatggattgcaattatacagagagctatgcttagatgtcgacttgtggaagcatgatgaagatcatccgattatattaaaatatcttctgccgccgtataatagagcccggagcgaattacaacaattagatacatatataaatgcactcaagcgccgatacaaaaagcaataccaaaaagaactaaagattgttacttggattgattataaataaaacgagaggtgaacacgatgccatccagcgactacaacaagtacctcgccgccatcaaggcggccaacgacatggagaacaaagagcttttgcggcagatcaaaaacgagcttatcgccaattacggcctcatggacgacgacgtggactatctgctccggcagttccgctacaacgtctgactgacagaggggtgccccggccgcaggccggggcaccccttttgtgtggactttacgggcggcccatgctacaatagaattcggtacttcattaagagacaaaggatggatgggaatgggaacgaccctcagtaccctgagcaatctggcaatctacatcggcctggtggtggtgggcgcctttctgggctcccgcaaggcactgcgcagccgtcccctggcgtgggtgggcaagctccagttcgcggccctcatgatcctcattgtcaccctgggcatcaacctgggcgccaatgacgaggtggtctcctccctggggcagatcggcctggcggccctggtgatcacagtgctggccatggccggctccctgctgtgcctcaccctgctgcggcggttcgtgctcaagctggaccactacggcctgccccggggcagcgaggccgcccgggaggaggaggcccaccacggcggcaaggcggacaactccctcaccttcctcattgtcattgccgtagtgctggggatgctggcgggccgcttcgtgctccccgccgccgttaccgcccactgcggcacggtcatcagcttcggcctctacctgctcctctttatggtgggcatggacatgggcaagcagggcaccctgctggccgacatcaagaccgccggcttccaggtgctgctggtgccagtggcggtgtgcgcgggctccctggccttcgccgccctggccggcctcttcctcccactgggggtgaaggactccatggccgccgcctccggcctgggctggtactccctggcccccaccctgctggccccctactccctgtcggtgtccgccgtggccttcctgtccaacgtgatgcgggagatcttcgccatcatcaccatccccattgtggccaaatacgtgggctatgtggagtgcgcctccctgcccggcgcggcggccatggacacggtgctccccgtggtggtgggcgccacccacgagcgcatcaccatctactcctttacctccggcgtggtgctatccctggcggtgcccctgctggtgcccgccatcgtggccctgcccttctgagaggaggtcttctgcatggaaattgaacgccgctggctggtggagggctggcccgccctgaccccctcctccgtccttcgaatggatcagggctactttgccgtccgccccgccatccgcatccgccgggaggccgtcctgggcggggagacccgttacgtcctctgcttcaaggggggcgcgggcctggcccgggaggaggtggaggtggacgtggacgaggggcgctacctccgcctcaaggccatgctgtccggccccatgattgagaaggagcagcgccgctattccctccccggcggcctcacgctggaggtcaaccaagtcgatcccgccctggagagcggcttctactacgccgaggtggagtttgacaccgaggccgccgccctggcctggacgccgccggaggcactgacggcctacctctcccacgaggtcactggccagcccggcgagagcatggcggcctactgggccagcacccgaggctgaaaaaactcccccgcaggcatggcctgcgggggagtcagcctgtcgaaaaagccttttcgacaggctgctgaactttttgaaacttcaaaaaagtttcaaaaagttgtttgatttgacgcgaaagggaaccctgacggttccctttcacactatccttccctccgaaaccttcggccggagggtctatcgacagcctcacgcccccgcaggcgctgcctgcgggggcgtttcagttattttttgttgtccgtctcctccgggagcaccgccacccggatctccagcacccggcggtgatccaccttggtcaccgtcacgtccaggccatcggagacgaagcggtcgccctcctcgggcacccggccgatctgctccatcacccagccggagatggtgttggagtcgcactccccttttatcttgaacaggtcaaagaggtcggtcagatcggcggagcaggagatcaggtagctgccgtcctcctgcttcttgaactcctcgatgacctcgtcgtgctcgtcccagatctcgcccactagctcctccacgatatcctccagggtgaccaggccctcggtgccgccgtactcgtccaccacaatgaccatgtgggctttctcccgctggaggatgcgcagcagctcggagatcttggtgttgccggtggtatagagcatggggcccagcatctcctttacgctggtcaggccgcggtagcgggccgcgtggaaatccttctcatggatgacgccgatgatgttgtcgatgtcctcgtggtacaccggcaggcgggaatacccgttctcagcgaagatcttggcgatctcctccatggagtcggtgtcctccaccgccacgatgtccaccctgggggtgaggatctcctccacctccaggtcgtggaactcgatggccgcccggataaggcggctctcatgctggtccaggccgccctcgctctccgcctggtccaccagagtgaccagctcctcctcggtaatgccgccgtccgccgatttgcggaacaccttggacagcagccgcttccactgggtaaacaggaagttcagcggggtaaggaccgtacggagcacccccagcagcggggtggcaaacatggcaaaccgctcgggggactccttggccaggctcttgggggagacctcgccgaagatcaggatcaccacggtcagcacaatggcggacacggtaggtccagtcacctcatcaatcaggtggataaagagtaccgcgccgatggtggtggccacgttgttgacgatgttattgccgatcagcagggtggagagcagcttgtcgtagtcctccgccagagccagggtacgggccgcccgctggtcgcctccgtccgcccagctcttgagccgcacccggttcagggaggtaaaggcggtctccgtggcagagaaatagcctgacatgataacacagaacacaagacccacgatcatggcgatactggcactgtccaacataagaaaatattcaactccaactctttcagttttgaaatcaacgcgcaaagggacaaccctatcccccgcgggtaaggctgtccctgaccgattccattatgtacttgcaactaggcggaggttcgtccacgagggctcaccgtctccttttgatttattagtgtgtagtatagcacagcttcctgcaaaatgcaaggggaaggttgacttttcctgtcccgcctcccataagcgaaaaaacgcgcccagcctgcggctgggcgcgtttttgatgctcttttacgggtgattacaccagctggacgatggccatctcggcgcagtcgccgcggcggggcccgatcttcacgacgcgggtgtagccgccgttgcgggtggcgtacttggggccgatctcgtcaaacagcttcttggccacatcctccttggtcaggtaggacagggccttgcggtagttggccagattggcgttcttggccagggtgatcatcttctcggccatgggagccacttccttggcgcgggagacggtggtcttgatctggccgttctccagcagataggtggtcatggcgcgcagcatcgcgatgcgctgatccgtgggcttgcccagcttacggttgtgagacatgagattccactcctaacggatgttcgccaaggcgaactcctactcttaaattcgtccgtggggagattcccccgaaagggcgctccgtgggagccggccggacccgggaggggacgttacgtgcccccgggccgccctttcctccggccgtcagttttcctcgtcggccaggtgcaggcccatcatggccagcttgttgatgacctcttccaggctcttgcggcccaggttgcgcaccttcatcatctcgtcctcggtcttggagatcaagtcctcgacggtgttgatgttggcccgcttgaggcagttgaaggagcggacagacagatccagctcctcgatggtcagctccagcaccttgtcccgctgggtctccgccttctccaccaccgtggacttggagcccatggtctcggagagatcggtaaagaggacgaagtgatcacagaggatgcgggcgcccaggctgaccgcgtcccgggcggtgatggtcccgtcggtccacacctccagggtcagcttgtcgtagtcggtggcgtcgcctacacgggtgttctccaccgtgtagttgaccttgcgcaccggggtatagatggagtccaccgggatcaggccaatgatggtctgggccggcttgttccggtcggcaggcacatagccgcggccgtgggacagggtcagctccatgttgaggctggcgtcggggcccagggtggcgatgtgcagctccgggttgagcacctccacctcgccgtcggccttgatgtcgccggcggtgacctcacactcgccgctggcctcaatatagaccgtctttacgccctcggagtggagctttgcgatgatgctctttacattgaggacgatctcggtcacgtcctcctttacgccggggatggtggagaactcatgctgcacgcctgcgatcttgatggacgtgaccgccgtaccgggcagggacgagagcaggatgcggcgcagggaattacccaacgtggtgccgtaaccgcgctccaggggctccaccacatacttgccgtaggaaccgtcgccggggttctccacacattcaatgcggggcttctcgatttctaccatgtgttaccctccttttcgcggctgcgggcacaaggcccgcagccctatacagctcaccaataatcgagggtacaagcagtgttacttggagtacagctcgacgatcaggtgctcctcgacgggcagatcgatgtcctcgcgggcgggcatctgcaccacggtgcccttcagcgcgttcttgtcccgctccagccacttgggcaacagaacggtgggggcgtcctcgccggtcaggcgcttgaacttggcggaggagcggctggactccttgacctcaatcacgtcgcccgccttgaccaggtaggaggggatatccacccgctggccattgacagtgaagtggccgtggcccaccagctgacgggcctcgcggcgggtcatggcgaagcccagacggtacaccacgttgtccaggcggcgctccacgaaggtcagcagattctcaccggtcttgccgggcatacgggcggccttctcatagtacatccggaactgcttctccatgatgccgtagacgaacttgaccttctgcttctcggtcagctggagggcatactcgctcttcttctttctcatctggccgccgggattgcggttgctctccttcttggcatagcccatggcggcaggagaaatgcccagcgcgcggcagcgcttggcgataggctgcatattctttgccatttgttcttcctccttctcttacacgcggcggcgcttcggcggacggcagccgttgtgggggatgggagtcacgtccttgatcagagtgacctccaggcccacggcctgcagggcgcggatagcggcctcacggccggcgccggggcccttcacgtacacctcgacggtcttcaggccgtgctccatggcggccttggcggccgtctcggcggccgtctgcgcggcgaagggggtggacttacgggaaccgcggaagcccaggccgccggaggaggcccaggacagggcgttgccgcccatatcggtcacggtgaccatggtgttgttgaaggaggaacggatatgcacctggcccttctcaacgttcttgcgctcgcggcgcttgcggataaccttcttacccttggtagcggtagccatgtgtttctccctcccttacttcttcttgttggcgacggtgcgcttggggcccttgcgggtgcgcgcgttggtcttggagcgctgaccgcggacgggcaggcccttgcggtgccgcatgccgcggtagcagccgatctcggtcaggcgcttgatgtccatcgccacgtcacggcggaggtcgccctccacagtgtagctgtggccgatgatctcgcgcagcttggcctcatcttcctcggtcagatccttcacgcgggtgtcggggttgattccggcctcggccaggatcttgttggcgctggtgcgcccaatgccgtagatataggtcaggccgatctctacccgcttatccttcggcaagtcaatgccagcaatacgtgccatactgtttcagcacctcctattaaccttgtctctgcttgtgcttgggattctcacaaataaccatgaccttgcccttgcgcttaatgatcttgcacttctcgcacatgggcttcacggacggtcttactttcatgataaacctccttgaatgccttgatggccccggaacggcggaggcaaggccccgcttacccgctccggtcattgatgggttctcccagagggaggcggcgcaattccatttcgccgcgttaaatcagccggttacttggatctccaggtaatcggccccaggttacgtcatagggggacatctggaccgtacgccccacccggcacaggcgtcgtgcggggaccccgactccatctgcgggcgtcggaagtgaattccgccgccctccgcgccagaggcgcgccccgcactgcggggccccagtgacggtccggccagcctgacggattacttggaccgccaggtgatccggccccgggttacgtcatagggggacatctggaccgtcactttatcgccgggcaggatgcggatgaagttcatgcgcagcttgccggagatgtgggccagaataatatggccgtttccgatgtccacatggaacgtggtgttgggaagggactcggtcacgacgccctccacttcgatcatatcgtcctttgccaaagcgtcataccctccttagttcctcagctcggaaagcggccagcgccctccgtatgtctcggttggataggttcccgcctgtccggagctgatccaggacagggtgctggaaatcaccggcgggggcggtatgaaccgcctttttccgtttggggttctccagcttccgccgcttcccgtcgcagagcagcaggtaggggccgtcggtgtccaggacacagaacagccctcccctgtcatgcccggccagggagcggacaatctgcgcacacgcgcatcccatactcaatcctccacccgggtaagcacttcaggctccccgtcggtgatgagaatggtgttttcatagtgggcggtcaggctcccatcggcggacacggtggtccagccgtccttgagcaccttcacccgccagtcgcccgcgcacaccattggctccactgcaatggtcatacccggctgaagccgggggccatggcccgctgggccgaagttgggtacctcaggcggctcgtggagcctggcccccacaccgtggcccacgaagtcccgcacgacggagcagccgtttgcttccacgtactgctgcaccgcgtgggagatatcatagacccggttgccggagcgggcgagcttgatgccctcccagaagccctgttcggtcacatggatcagatgcatggcctcgtcgctcacctgtccgcaggcgaaggtggcggcgcagtcgccgtggaagccgtccagaaaggcgcccacgtccacgctgacgatgtcgccctccttcagcttccggggaccgggtatgccatggatgacttcctcgttgatcgagatacaggcggagccggggaaaccgctgtagcccaggaaggagggcttggctccgtggctctcgataaacttgcgcacggcggtatcgatctcatgggtggtcacgccgggccgcaccatggagccggccagcgcccgggcctgggcggtcagccgcccggcccggcgcatgcactcgatttcgcggggagatttgagagagatcatatccatctcgttcacttccccagcaattccatgattttggtgtttgtctcctcgatgccgcccaggtcgggcacgcgcttaagcacgcccttctcctcgtagaagcccttcagcggctcggtttgactgtggtagatttccagccggtgcttgacggtttcgggctggtcgtctttgcgctgctccagcacaccgccgcacttgtcgcagagcccctcctgcttggggggcgccatgacgacgtggtaggtggctccgcaggcatggcaggtccggcggcccgtcatgcgggcctcgatgacgctgtcggcaacctccagggagaggaccgcgtcaaagcggatgccgtggcgctccagggcttcggcctgagcgatggtacggggtacgccgtccaggatgaagccgcctgcgcagtcgggctcggccaaccgctcctggatgataccgatgatgatctcatccggaaccagcttgcccgcgtccatatagctcttggcctgcaagccgatgggagtgccctccttgacggctgcgcgcaggatattgccggtggagatggtggggatgcccagcttgcggctgataatctccgactgggtgcccttgccggcgccaggtgcgcctaaaagaatgattttcatcctgattccccttactccaggaagcccttgtagtggcgcatcagcatttgggcctccagggccttggtggtctccagcgcgacgccgaccacgatgatgatggacgtgccgccgatggccaggctgctgacgccgatcaccgcgccggtgacaatgggcgcgatggcgataatcgccaggtagagcgcaccgaacatggtgatcttattgagcaccttgtggataaagtcggcggtgggcttgccggggcggaagccggggatgaacccgccgttctttttcaggttgttggcaacctccacagggttgaactgcatcgtggagtagaagaagctgaagcccacgatgagcaggaaatacaccacgatatagaaaatgctggtggtgtcaaagacgcgcaggaagccgccccagaagcccgggtcgttcttgctcacgccggcaaacgcggcgatggtagcgggcagagaggcgatggcctgggcaaagatgatgggcataacgccggtcatgttcaccttcagagggatgtggctggactggccgccgtacatcttccggcccacaacgcgcttggcgtactggacgggaatgcggcgctccgcattctgaatgaatacaatgagaaccacgatggccagcatgccgatgagaatcagcgggatggcccacacgggcagattaaagattccctcgccggtaacgccgtccagattgttgcggacgccctgatacatggtgcggatcatgctggggccgcgggacaggatgcccgcgaacaggatgatggagatgccgttgccgatgccgaactcggtgatctgctcacccagccacatgacaaaggcggagccggcagtgaagcacagtacgatgacgatacccgcccaccagccaggcaggccggcggtgtccagcatcgttccgccgccctgggtgcggatcagggtgtagtagccgaagccctgcagcaagccgatggccacggtgacatagcgggtaatggccgcaatcttcttccggccctcctcgccgccctccttctggagccgctccagggcagggatggcaacggtgaggagctggatgataatagaactgttgatatacggctgcacgcccagggcaaagacggccgccatggagaaggcggtgccgttcatggcgcccagcagggtgaagatgccgcccatgttgttgagggtggcgcccagcatattgctatcaataaaggggacaggaaccacggagcccagccggaagatcagcagggcaaacacggtgaagaggatcttcttccgcagctcgggaattttccaggcgttacggatggtctcgatcacttagaccacctcgtactttccacctgccgcaacaatcttctccttggcggaggcggagaaggcggaggcacggaccgtcagcttcttggtcagggtgccgttgcccagcaccttgtagccgtactcgcacttggagaggatgcccttctccagcaggtcgcacacattgaccgtagcgccatcctcaaacttctcgagggcggagacgttgatcgcctccaggggtttggcaaagatattgtggaagccgcgcttggggatgcggcgggtcagaggcatctggccgccctcaaagcccacgcgcacgccgccgccggagcgggcccactggcccttctggccgcggccggccgtcttgccgttgccggagccgtgaccgcggcccttccgataggccttggggttggaaccgggagcgggggaaagttcatgcagattcatttcgcgcacctccttactgttcctcggtgacctggagcaggtagccgatgttcgcaatcttgccgcgggtcgcctcgttgtcgggctgcacggtggtgtcgccgatcttgcgcaggcccagggcctcggcggtcgccttgtgcttggcgatacggccgttcaggctcttgaccagcttgatgttcagattagccatgttcacggccctccttaacctacgatctcgctgacgctcttaccgcggatgcgggcgacctcctcggggccacggagggacttcaggccctcaaaggtggcggagaccacgttctgcgggttgttggagcgcaggcacttggcgcggatgtcacggatgccggcggcctccatgacggcgcggacggggccgccggcgatgatgccggtaccgggggcggcgggcttgagcagcacgcgtccggcgccgaactcaccgatgacctcatggggaatggtagtgccggacagagtcacggtgcacatattcttcttggcgtcctcgatgcccttgcggatggcctcgggcacctcagcggccttgcccagaccgaagcccacgcggcccttctcgtcgcccacgaccatcagcgcggcgaacttgaagatgcggccgcccttcacggtcttggacacgcggttcagagcgacgagcttctcggtaaactcgctgggttctctctcaaatctagccatttatcgttttcctcctcccttagaactgcaggccgccctcacgggcgccctcggccagggcctgcacgcggccgtggtacacgtagccgccgcggtcaaacacgacggtctcgatgccggcggccttggcgcgctcggcgacagccaggcccaccttcttggcggcctcacagtcggagcccttgccctcgaagcccttctccagggaggaagcagacaccagggtcttgccggtcacgtcgtcgatgacctgggcatagatgttggtgttgctgcggaacacgttcaggcggggacgctcgggcgtgccggaaatcttgccgcgcactctcttgtggcgcttaagccgctgagcgttggtatcgggtctgttgatcatagtggcacacctccttatttcttcttgacgccggtcttaccttccttgcggcggatgacctcgtcagtgtatttgatgcccttgcccttgtacggctcaggcggacgcttctctctcacttcggcggcgaactggccgaccttctgcttatcggtgccgctgatgacgatcttgttggcgctgggcacctcaatggtgatgccctcgatctcctcgacggtgacctgatgggagaagcccaggttcatgaccagcttgttgccctccttagccacacggtagcccacgccgttgacgtccagctccttcttgaagccctcggtgacgcccacgatcatgttgtgcagcagggtgcgggtcaggccgtgcaggctgcggttggccttctcgtcgttgggacgggtcacatggatcacatcgccctcctgggtgatggtcatggcgggatgcagctgctgcgtcagggtacccttgggaccctttacggtaaccaggttaccggcttcgatcttcacgtccacaccggcggggatggagatcggcattcttccgatacgagacatattctactctccctccttaccagacaaacgccaggacctcgccgccgacatgggccgcgcgggcggccttgtcagtcatgacgcccttggacgtggacacaatggcaatgcccaggccatgcagaacccggggcagctcgtcagcaccggcatagacacgcaggccgggcttggagacacggcgcaggccggtgatgaccttctccttgccgggattgtacttcagggtgacgcggatgacgccctgggtaccatcgtcgatgagctggaagttcttgatatagccctcatccagcaggatctgcgcgatggacttcttcatattggacgcggggacgtccacggtgtcatgcttggcgttgttcgcgttgcggatgcgggtgagcatatccgcaatgggatcagtgatgtgcatgatgtttacctcctattagagttacgggcagggcccgtatcagcggcaaggtatcgcagctaggcaactgcgacctattgctcgccggcgggggatttattcaaattaccggccaagaggcgggctggctttaccagctcgccttcttgacaccgggaatctgacccttgtaagccagctcgcggaagcagatacggcagatgccgtagtcccgcaggtaggcgtggggacggccgcagatcttgcagcggttgtagcggcgggtggagaacttgggctccgcctgctgcttcaggatcatagacttcttagccatttcgttctcctcctttagcgggcgaagggagcgccgatcagggacaggagctccttggcctcttcgtcggtcttggcggtggtgcagatgaccacgtccaggccgcggatcttatcaatcttgtcgtactcgatctcggggaagatcagctgctccttgatgcccaggccgtagttgccgcggccgtcaaaggcgttggggttgatgccgcggaagtcgcggacgcggggcagggccacgttgaacaggcggtccaggaactcccacatgcggtcgccgcgcagggtgaccttcgcgccgatgggcataccctcacgcagcttgaagttagccacggacttcttggccttggtaatgatggccttctggccggtgatcttggtcagatcgcccacaacggcctccagaaccttggagttgtcacgggcctcgccgcagccgcagttcaccacgatcttatcaatcttggggatctgcatgacggacttgtagccaaacttctgcatcagagcaggagcgacctcggcctggtacttcgccttcaggttgggcactttcttatcagccattattgttcactcctcctctctcagatctcggcgccgcacttcttgcagacgcggaccttcttgccaccctccagcagcttgtgggcggggcgggtgggcttgttgcacttggggcagacgcgctgcaccttgcaggcatagatgggggcttccttcttgaggatgccgccctgctcgccctgcttgcggggcttggtgtggcgggagacgacgttgatcttctccacgaccaccttgccggacttgggcatgacctccaggaccttgccctgcttgcccttgtccttgccggacaggacgacaaccaggtcgtccttacgaatgctcatcttattcatgtcttctcctacccccttacagcacttcgggagccagggacaggatcttcatgtaatccttgtcgcgcagctcacgggccacgggcccaaagatacgggtaccgcggggattcttgtcgtccttgatcaggacggcggcgttctcgtcgaagcggacatagctgccgtcagagcggcgcacgcccttgacggagcggacgatgacggccttgacgacctcgcccttcttcacggttccgccaggctgtgccttgcggacggaagcgacgaccacgtcgccgatgttgccgaacttgcggctggagccgcccagcacgcggatggtcttgatctccttggcgccggtgttgtcggcgaccttcagatagctttcctgctgaatcattccggcacctccttacttcgccttctcgatgatctcgacgacgcgccagcgcttgtccttggacaggggccgggtctccatgacccgcacgcggtcgccgatgccacactcgttcttctcgtcgtgcgccttcagcttataggtgctcttgacgatcttcttatacagggggtgagccacacggtcggcaatggccaccaccacggtcttgtccatcttatcggaaaccaccaggccgactctggtcttgcgggaagaagttctgttctccatgatctcgttcctccttcttatcggcctgcgagctgctgctcacggatgatggtcttcacgcgggcgatgtcgcgcttgacctcagcaatcttcacggggttgtcgagctggttggtggcatgctgaagacggagctggaagagatccttcttcaggtcgcccagcttgctctccagctcagcggcgctcatcttgcggatttcagtagccttcatcttcattcaccaccattctcggtctcggcggtctgcttcgccacgatcttgcacttgacaggcaacttgtgggaggccagacgcagggcctcgcgggcagtctcctcggaaacgccggcgatctcaaacatgacacggccgggcttgaccacggccacccagtactcgggggagcccttaccggaacccatgcgggtctcggcgggcttctcggtgatgggcttgtcggggaagatcttgatccagaccttaccgccacgcttggtgtaacgggtcatggcgatacgggcggcctcgatctggttgctggtgatccagcagggctcggtggcctgcaggccgaaatcaccgtaggtcacggtgttgccgcgcatggccttgcccttcaggcggccgcggtgcacgcggcggtatttcactctcttaggcagcagcattagttggagcctccttccttgggagcagcgggacgggcgccgccctggggacgggcaccgccctgaggacggttgttgttgaagccaccctggggacggccgccgttgcggttaaagccgccgttgcggttgaagccgcccttgcggtcgccgtcacgccggtcgcggcgggggcggtcggagcgctccttgaagttcttggtgtccagggtacggggggtggtgcgcagggtctgggtcagcacctcgcccttgtagatccacaccttcactccgatgcggccgtaggtggtggcagcctccgcaaagccgtagtcgatgtcggcgcgcagggtctgcaggggaatggtgccgtcgtgatagtgctcggtgcgggcgatctcagcgccgcccagacggccggacacctgagtcttgatgccgcgggcgcccatgcgcatggcgcggcccatggcgttcttcatggcgcggcggaagccgatgcgcttctccagctgctgggcgatgttctcagccaccagctgggcgttggtgtcgacctgcttgacctccacgatgttgagggcgacgggcttgccgatcatcttctcaacggtcaggcggtactgctcgatctgctcgccgcccttgccgatgacgacgccggggcgggcgcagtgcaggtagatgcgaaccttggcattgtcgcgctcgatctcgatcttggggataccggcggaatacagggtcttcttcaggtagtcccggatcttcttgtcctccaccagcaggtcgccgaccttctcgttgcgggcgtaccagcgggagtcccaatccttaatgacacccacgcgcaggccgtggggattcactttctgtcccatattcttcctcctcccttagcgctcagccaccgcgatggtgatgtgagaagtgcgcttgttgatgcgataggcgcggccctgggcccggggcatcatccgcttgatgatggggccggggcaggcgaacacctgggaaacatacagcttctcggggtccatctggtggttgttctccgcgttggacgcggcgctcttgaggagcttcagcagcagctcggaggcagccttgggggtgcccatgaggatggcgttggcctgggccacgctcttgccgcggatcaggtcgcagacgatctggaccttacggggagagatacgggcatatctcagatgtgctttcgcttccatgtttctctcctcctccttacttaccagtcttgctgccggcgtggccgcggaaggtgcgggtgggggcgaactcgcccagcttgtggcccaccatgtcctcagtcacgtagacgggcacgtgcttgcggccgtcgtgcacggcaaaggtgtgtccgacgaaggaggggaagatggtggaggcgcggctccaggtcttcaggaccttcttctcgccggtctgattcatttcgtcgacccgcttcagcagctcgggggcgcaaaaggggcctttcttgatacttctgctcatcttttactgcctcccttacttcgcgttgcggtgcttgacgatgaacttctcggtgcggttcttcagcttgcgggtcttgtagcccatagccggcttgccccaaggagtgacagggccgggacggccgaccgggctcttgccctcgccgccgccgtgggggtggtcacaggggttcatgacggaaccgcggacggtgggccgccagcccatgtggcgcttgcggccggccttgccgatctggatgttggcccagtcggtgttgcccacctggccgatggtggccttgcactcctcgcggacgtagcgaacctcgccggagggcaggcggacctgggccatgccgttctccttggccatcagctgggcggcgtcgccggcggcgcggacaagctgggcgcccttgccggggtacagctcgatgcagtggatcatctcgcccacggggatgttggcgatgggcaggcagttgccgggcaggatgtcggcgtcgggaccggtcatgatcttgtggccggccttcaggttcacgggagccaggatatagcgcttctcaccgtcctcgtactggatcagggcgatgttggcggagcggttgggatcgtactgcaggttgatgacggtagcggtgccgttcttgtcccgcttgaagtcgatgatgcggtacttcttcttgttgccgccgccgcggtggcggacggtgatgcggccgtagctgttgcggccggcgttcttcttgagattctcggtcaggctgcgctcgggcttggccttcttgtcgatgccctcgaaggcgctcacggtcatgtggcggcgggagggcgtcgtgggcttataagtcttgatagccattgttcgttatcctccttacaccatgccttcgaagaactcgatggtcttggaatcctcggtcagggtgaccatggccttcttccaggagggacggcggccagccgggaaccggccggtgcgcttctccttgccctgcatgttcagggtgttgaccttggcgaccttcacgccgaagatctcctcgacggccttcgcgatctcgatcttgttcgcgctcttggcaacctcgaaggtgtacttcttggcctcggtctccgccatggactgctcagtgatgatggggcgcttgatgatatcataagcggtggtagccattacgcaaacacctcctcgatgacggccagggccgccttgtcaacgataaactttccggcgttcacgatgtcgtaaacgctcaggatcttggcggtggtggtgaccacgccggggatgttccgggcggacttgatgacggtctcgttcacctcgggggtgacgacgacggccttcttggcgccgacggtatccaggaagcccttcatggccttggtcttgacctcgtccaggttcaggctgtccacgacgacgatgtcgccggaggcggccttggcggagagggcggacttgagggccaggcgcttgaccttcttattcagcacgtagctgtagtcgcggggcttgggggcgaacacgatgccgccgtgggtccactggggggcgcgggtgctgccctgacgggcgcggccggtgcccttctggcgccagggcttaatgccgccgccggagacctcggcgcgggtcagggcgctctgggtgccctgccggcagttggccaggtggttcttgaccacctcgtggacgacggtctggttgggctcgatcccgaacacagcttcggagagctccacctcgccgacctgcgtgccggccatgttcacaagaattgccttaggcatttggtttctctcctttcttacttgttacgggcggaagccttctggggattgacgcgggcggaagccttctgcgggttgctggagataccagcggcggcgcccttctccttgacgttgatcacggagttgcgcagatacacgatgccgcccttggggccgggaatcgcgccgcggacggcgaggatgcccagctcggcgtccaccttcaccacgtccagattgaggacggtgacctgctcgttgcccatctggccggcgccgatcttgcccttgaagatgcgggaaggatcgctgttggcgcccatggagccggcgtggcggaccacaggaccggagccgtgggtctccttcagacggtgagcgccgtggcgcttgatgacgccctggtagccgtggcccttgctgatgccggtcacgtccacgcggtcgccctcggcgaacacgtccaccttcacctcgtcgcccacgttcatctcggcggccttggccagcttgaactccttcagagtcttcttgcgggcgtcgccggccttcttcaggtggcccagctcaggcttggtgagcttgcgctccgccacgtcgccgtagccgagctgaacggcgttgtagccgtccttctcctcggtcttcttctgcaccacggtgcaggggccagcctcaataacggtgaccgggatgaccttgccgtcggcgtcaaagatctgcgtcatgccgatcttcttgccgataatggccttttccatgatagttcctccttaataaggttattggttgacgctgtcacgcctcgcctgttcgcaacgcgtcactgcttgccgctccgtgaaaaataccgctccgcctttggcgtcgcctgttttttcatctacgcggccgctgtgccgctgctcacgacggctcaggcgcttcgtgccaacttgacccgtccgcctcaaaagcgcggcggactgcgggtacacaaaggtagttgtctgagatggctgtgttacgctgcgaagccttcgcaacggcacgctgctcatcgctccgtgaaaaatgccgctccgcctttggcgtcgcctgttttttcatctgcgcgatttactgcgtgcctgctcccggcttctccgcgcttcgttacagcttgatctcgatctcgacgccggcggggagctccagggacatcagggcctccacggtcttgggggagggcttgaggatgtcgatgaggcgcttgtgggtgcggcgctcgaactgctcgcgggaatccttgtacttatggacggcgcgcaggatggtcacgacctccttcttggtgggcagggggatggggccggacacggacgcgccggtgcgcttggcggtctccacgatcttctcagcgctctggtcgatgagctggtgatcgtaggccttcaggcgaatgcggatcatttctttctgagctgccattgtggttcctccttaaaaacatacgaagtggtgggttgagcacgcttcgtacggtgagaaatcttcagtacacgtttccgtgcgtatcactccgtgacatgaagaaaaccggcacaagcaggccggtttactccctgcgcggcgatatacgccgtgcacggactcctcagccgcccgattctagctcggacatactccgcggaagttaccggctcgcgccgcaatctcccgcatcatcgcagactgcgcccctttacaggcgctctgttataatacctgaaaaatcccgttctgtcaatagatttttccggttttcgtaaaatttatttcttcaccgggtccttggcccggcagcccagccaggaggacagcaacagcaggaggaaagaggcaaaatagatccagaacacctgtccggtccacatggccacaatagcgcccaggcgcagaaggggcagatagaagaactgggtcagcaggcccactgcgttggtccagtaggcgtggagggccagctcctgcacccccagcagcaccagcaccaccagcgcgggaaggttgatgcacagcatggtaagcgccatgcccctcttggagcccttgaagccaaacgtgccggagaccaccatccacagcgtcagcacggccagacctaccacgatgtagaaccaggcgcccatctgggcaaaaattgtcgtcatccccagactgagcagccatcccagcaggaaggggctcagtcccaccagaaacagcaccgcggctttgcgcatgcaatcacacctctttcatcatacggcattttttaccgctgcacagcataccacaccccggcggcctctgtcaaccgggtcgccggggcgcgccttacggcagcagcacctccgccagccgccgcttcatctctgcggcgtcgatggccgtgccggtgaagtgctccagggagagcaccgcctggttgaccagcaggccgaagccgttgacggtctggtaccccctctcccgggcacggcggagcagttctgtctccgccggggcgtagatcagatccaccaccggcgcgccgggcagaagggcgtccaggaaggagaactcctcaaactgcccggcggccccttccatgcccagggaggtgcagttgaccagcaaccccgcctccgccgccgcccgccggagggtctccggtgcaaagtccgcggggatcaggcgccccaggggatccagcgcgcagagggcggcggccttgtccggcgtgcggttgcacacggtcacctccgccccggcctgggccagcttgaggcacaccgccttggccgcccccccggcccccagcaccagcacccgcttcccggcggggtcgataccctcgtcgtccagggcgcggagaaagcccgccccgtcggtgttgtagccataggcccggccgtcccggatacagacggtgttcaccgcgccgaagaggcgggcgtccccgtccagctcgtccatcagctccaccagctcctccttgtggggcatggtagcgttgaagccggcgtagccggaaaatttggcgcactccagccactcccggcacctccctcggggtaccggctggcagaggtagacgtagtccagccccagagcggccagcatggtgctctgaatcagcggggacttggagtggagcaccggctcgccgatgacgcagagctttttcgtgctgtttttcacttccacctgcatgtgcggggcctcctttttgggttcgggccgcagatcggggagggcggcgttcacccccaaagcgataagcaggcccaccaccgtctcaatgatgcgggcggcggcatagtagtaccgggtcacgccggtgacgccggtgatgagaatgacgcagggcaggatgcacgccatgccgcaggcggtgggccgcttgagcagcaggcagatccacacccccgccacgcacaccgcccccagggcgggtatgcgtacccagggatcgtccagggcggcgcccagcagcagggtggcggtacccagggctccgcccaccgccacgccgatgaggcgggagaggccctgctggatggtctggccaagggtggactgggtgcagatgatgcaggcgatgcaggcatagagggggccgagctggccccacacgccccccagcgcctcgttatagatgaggccgaagggcacgaaaatggtataggacagcatgaccgccacggcggtcttgaccacccgcataccgatgcgcggcaggggcacgcttttcatcttctccccctcctcgatccgccgcagcgggtcaaaaagtccagcagcaggcggttgaacgcctcgggcgcgtccagattgaccacatgggccgcgccggggagcaccgccgtctccgtctccggccaggcccgcttccagtcctccatgtgccgggcgatggtgccggtcctgtcccgctcgccccggcacaccagcaggggcgcgtcgaaggagaagtgtttctcggggtggaggcattgagcgattccccgccagccccggagaaactcccgccgggtgagctggtcgaacatgcggcgtaccgccgcccgcccctcctctgtagaagagcaggccatggccatggcgcttttgagacacctccacggccacacccccagcaagggggtagaggcccgcagacccgcccgctcccagccgctatagcagtccaacagaataggggtagctccggccaccaggtatccggcgcagccgccgaactgccaggcgtactcctggacgacatagccgcccatggacagccccacaagcaccggggcgcggcagcgttccttcaccagcacggcccggaggtcctcggcggcctgggggatggagaagtcggcacagggccgggagtccccgtggccccgtatgtcgagattgagcaccgtccacccctccagggcagcgagctggggcgcccacatggtgcggtccagcccgtagccgtggaggagcaccacctccggcccctccccctgccggcagtcgtaggcgatccggcagccgtcagagcggacggctcttgtctcccagtcagccatgggggttctctctgctttccttctcgttccagagaaagtaggacatggccgcctcgtagccgtacaggcccaggccgcagatctggcccacgcaggcgggtgcggtgacgctcctgtgccggaactcctcccgctggtggacgttggatatgtgcacctcgatgcagggcacatccaccgccttgagggcgtccaggatggcgtaggagtagtgggtgtacgccccggggttcagcacgatggcgtcgtacacgccgtcggcggcgtggatggcgtcgagaatggccccctcgtggttggactggaagcactccgccgtggaggcgtgggcggcggcgaactccttcagccgccggcacaggctctcatagctgttctccccgtagatgcccggctcccgcttgcccagcaggttcaggttggggccgttgataatcagaaacttcacgcctgacactccctttcataaagggccgcgatgcgcccgaccgcctcggcggcctgggcgtggccctcgatgatgtagtccgcccaccggcggtagatgggctcccgctggcggaaccgctccagaaacgcctcttttcccccctgacccagggggcggtgggccatggacaccgtgtcgtagatcacggccggctcccggttgagccagaagaccacgccgctggctttgagggcggcaatggcctccgcccgggtgggcaggccgccgccgcaggcgatgaccagccccccctcccgggccagcgcccggctcacgtccagctcacgggcccggaagccctcctccccctcggcatcaaagagctccgggatggtgcggcccgcctccgcctcgatgcgctcgtcggtgtccacgaaggccaggcccagcttctccgccgccaggcggcccaccgtggacttgccgcagcccatcatgccgatgaggatgagattgttcacggctcatacccccggaagttccccaggatacggaactcggcggccagttgccccagctcgtggagcacgccgtccatctccggggcggcgagatcgccagtaaagtccaggaagaacaggtattcccagccccggccggggatgggccgggactcgattttcagcaggttgagcccctggacggcgaacacggtgaggatctcgtggagggaaccgctctggtggggcaggcggaacacggcgctgatcttgttgcgtccgggccgcagctccagcaccggggacaccaccacgaaccgggtgtggttcatggcattatagttgaccccctcggccagaatatgcagcccgtagatctgagcggcccggcgggagcagatggcggcggcggtgcggtcgccgctttcggccacctgcttggccgagccggcggtgtccagcgtgggcacccgccgccagccccggtgggcgtccagatacttctcgcactgcatcagcccctgctcgtgggagtagaccgtctgaatgtcctccagcgccgcgccgggcagggccatcaggcagtgctccaccttcacctggcactcccccaccacgtagtagttgtactgggccagcagatcgtagacctgccggatggagccggtggaggagttctccaccgggagcaccgcgtagtcggcctccccccgctccagggcggcgaacacgtcggggaaccaggccagcccccggctggacacctccgggccgaagaagcccacggcggcctcctcgctgtagcaccccggctccccctggtagaccacccggggggcggccaccggctcccgccgggcggccagggccgccgcataggccgcatagcccggttcctccgccccctcccgcaccagcttgcgctgctggcggcgggagatggccatgatcccctcgtagagggccgccacgtccgccttgcgggccggatcgccggtgagggccgtcttggcggcgatcacctgcttctcccgcccggcgtccagcaccgggatacccgcccgctgcttgtactcccccaccttgccggtgaccgccatccgctccaggaaaagctgcaccagctccccgtcgatgcggtcgatctcttggcggtattgctccaattcggtcatgttccctctctcctttgtctcctcgaggcggcggccgggcgcttcctttcgggcgggtgtgggcacccgcccctacatttaaacttggccgcacgctccgctgccccgcctctgcgccatcgcgcgggcggccctaaattcccagcacctcgcacgccgccaacgctgccgccgcaccccagagcgcactgcgcgcgctccggggaccccacattttattctcctcggcgggagtgaatcccgccttcggcaaggttttgcccccggcaaaacgcttggacgccgcttccgcggcggctcgctcccgctcgcgcgaggcggcggccctaaattcccagcacctcgcacgccgccaacgccgccgccgcctcgattacgggcacggcgcgggggacgatgcaggggtcgtgacggcccttgatctcgatctccgtctcctccccggtgcggaggtccacgctctcctggggcagagcgatggagggggtgggccggatggtgacctcaaaggtgacgggcatgccgttggtgatgcccccgttgacgccgccggcgtgattggtcttggtgaccacccttccatccttcacctcgaaggggtcgttggcctcgctgccccgcatgagggaaaaggccacccccgcaccgaagtccacgcccttgacggcggggacggcaaagaggtactgggcgaagataccctccacgttgcggccgaagtcgggggcccccagcccggcgggcagcccgaacacagcgcactcaatggcgccgcccacgctgtcctgctcatttttggcctccagaatggcctggcgcatctcctcccccttggcgtcgtccagcacagggaagggcttggccgccacggcctccagtgcgccggcgtcctccagggaggcgtcggtgatgccgtagatggagctgatgtgggcgcccacccgcacgccccgcagggccagcgcctgcttggccaccgcaccggcggccaccaggggggcggtgaggcggccggagaagtgtccgccgccccggtagtcctggcacccctggctcttgatgaagccggcatagtccccatggccgggccggggggtgtagcggatggcctcatagtcctgggagtgctggtcggcgttgggaatgagcatggccagcggcgcgccggtggtcttgccctcgaatacgccggagagcacctgcaccgtgtcgctctcccggcgggcggtggcggtggggtcctggccgggcttccgccggtccagctcccgctgaacggcctccagatccagctccaggccggcgggtacgccctccagcaccacgccgatggccgggccgtgggactcaccgaaaatcatgtgtcgcatgtgggttcccttcctttgctttctcaggttttgtgccgggaggccccggcctccgggcgggtgtgggcactcgcccctacggtattcatacgaacgcggccggatgctttgcgcttttgtgtaggggcggcccttgtggccgcccgcgggcggggacaagccccgcccctacaccattcgtgtaaaaacggctccgtggccgcccgcccctcctacgtccgggcgatctgaccgcccagggcctcgtagtctgcccagaagcggggataggacttgttcacgcactccgcgccggtgatggtcaccggcccctgacagcgggtggccgcaatggcggccatcatggcgatgcggtggtcgttgtggccggagacagtgacgccccccgccagccgctccctgccccggagcaccaggtggtcggcgtgctcctccacaccggcccccagggcgttgagcacctgcgtcacagaggccagccggtcgctctccttgatgcgcaggcgggcggcgttgacgatggcggtcgtctcccccgcccgcagggcggccatggccgccagagggggcaccagatcggggcactgggacacgtccagctccgccgggccgggctgggtcaggcgggcaagctgctccccgatcacccggtcgccctggacggagcgggggttcagcccctccacgtccacccggtggcccaggaacgcggcggcaaaccagaaggcggcgttggaccagtccccctcgatggccagatcccggtggcggtacgcctggttccccggcacccggaagcgccggtccccgtcgtactccgccgagacgccgaattgggccagggcgtccagggtcatgtccacatagccccggctctccagcgcggtggtgaggacaagctcgctgtccccctccagcagtgggagggcgtagagcaggccggtgataaactgggaggacacgtcgccgggcagggcgtagacgccgggcgtcagccgcccctccacggcgagcaccccgttttccagcgaccacgcaattcctttctccgtaaagaggcggaaatagggctcctggggccgctccatgagccgcccgtggccggtgaaccggccgccccccttgagggccagggccacggggatcaaaaacctcaaagtggagcccgactcgccgcagtccatgatctccggcgggggcgtctcaaagccgtccaccaggtcggccccgcggattaccgtgccgtcggcggaggcgtccgcgtccagggtgcgcatacatcgcagggtggcctggatgtcctgggacagctccacattggacaggcggcacaccccgtcggacagggcggcggcgatgatcagccggtgggcctgggacttggagggcggcggggtgacggcgccgcccagggcggcgggggtgatggtgacgttcatcgcagttcctccagcagtcgggacttgggcatccggtgggggacggcgcggcccatgcgctccaggaggatcaccgaaatgtcctcccccgcccccttcttatccagtcccacggcggcggcgtagtcctccgccgtgcaggggatggcggtgggcagccccagggcggagagcgcctcctccaggcgctccggcagctccgccggtgtcacccccaggcgtacgcccagccgggcggcggcgcacatgccggcggccaccgccgcgccgtggctccactcggtgtagtgccccgccagctcgtaggcgtggcccagcgtgtggccgaagttgaggagcatccgctcccccgtgtcccgctcgtcctgttccactacgctccgtttaatcgcgcagcaggtatacaggatgtgttccatttccgccatcagctccgcccgggagggccgggccgccaggaagtcgaaaaaggccgcgtccttgatgcagccgtatttgaccacctccgccatgccctccatgaagacaggcagcggcagagtgtccagcacctccgggtccatgagcaccagcctgggctgccagaaggcccccgccagattctttccgtgctccagatccacggccaccttgccccctacggaggaatccacctgggccagcagagtggtgggaatctgcacgaagtccacgccccgcaggatggtggcggcggcgaaccccgccagatctcccaccacgccgccgcccagggccgccaccgcgtcggtgcgggtcagcccggcgtccatcatggcctcccacagctcggccagacgggcggggcatttggagccctccccggcggggacggtgtgggcggtcacccggaacccggccccctccaggctggcgcgcacccgctccaggtacaggggggccacatggctgtctgtcaccacaaaaatccgggaggccccgggcaggacggcccgaagctcctcccccgcccgggtgagcagcccccacccaatctgtatgttatattcccgccccggaagggcgacggtcagcgttttcatggtacggcctcctctgttcaaaatcgacggtatccgtcgggcgggtgtgggcacccgcccctacgtgacagctccgcaggttgccccaacgcaggggccgacaccccagggcggcctctcttgcccctgtggggcaattcaccttctgccctcatcggcccacgccaactatcctccaccctcaccgtaggggcggccctcgtggtcgcccgcgggcggggacaagccccgcccctacatactggtgcggcgtacgccccgctttcggggcccctacacgaacccagcgaagcggttcgcgtggggaaaaggaggcccagcggcgggaatgagctttcgggcctgcccggaagcgaatgatccaaagcttgggccgacgctgtcacgctgcgccccctccgcggcgggcagcgttcatccggggttcctcctcgcggcatagccgctgcggcctccgctacaaacgtgccaccggcacgtttgctcacgctgcggtttcgcctccatgtcctcttagctcccctatgcgcctaccctacgcgcttctctgtcacgctgcgcgccctccgcgacgggcaactgctcactgctccgccgaacatgccgctggcctgcggccagcctgtttttcggtctgcgcagttcgctgttgccctgctcccgggcgctccgcgcttcttttttattttaccagcgttttccccatcaggtcaaccatggcagagaccttgtgcatgagggcatcgaagttctggggggtgagggactgctggccgtcgcatttggcgtgggccgggtcgttgtggacctcgatgatgaggccgtcggcgccggcggccacggcggccagggccaggggctccaccatccagtacatgccggcggcgtgggaggggtccacaatcacgggcaggtggctcatctgcttaatggcggggatggcggacacatccagagtgttgcgggtgtaggtctcgaaggtgcgcaccccccgctcgcagaggatcacgttctcgtttccggcggacatgatatactcggcggacatgatccactcctcgtaggtgttggacaggccccgcttgaggaggatcggcttgctcatcttgcccacctccttgagcagctcgaagttctgcatgttgcgggcgcccacctgcaccacgtccacctcccgctcgaagagctcggccatacgggggtccatgatctcggtgacgatgggcaggccggtctgcttccgggcctccatcagcaggtcgaggcccgcggtgcccatgccctggaaggagtagggggaggtgcggggcttgaacgcgccgccccggagcagggccgcgccggaggccttcacgtcctcggccacggcgcagatctgcgcctcgctctccaccgagcaggggccggcgatcacggagaaatttcccccgccgatcttggcgttccccacggagaccaccgtgtcctccgggtggaacttgcggttggccttcttgtagggctcctgcacccgcatgacccgctccacatgggggttgatggagatcttatccatgtccacggcggtggtgtcgcccaccaggcccaggatggtgcagcccacgccgttggtgatgcccacatccagatccagttccttaagcctggataccaaggcgtcgatgtcctgctgccgggtgccgggtttcataacaactaccatgattttacatcctttctctccatgcaaaaagggcgcccattgatgaaatcaatgagcgcccctgcacgttcaggtactatggggccttccccgggccccacccattcattccatcccccgtgttttctccacgccaaaaaagccggcgcccataaatcgagcccagccataggaaaacaggaaggatgcagttgtgagggttcggtctgccatgtctgtgctcctcactttaacaggttggtgtcattatacccccatcgttagcggaatgcaacgggaaattttcaaaaatcccggttttttgccctgggatagggcgtccgctcgtccgtgaggcccaacaggtagtcgatgctggtattatgatagtgtgccagcgcaattagaatttccgtcggaatatcgacgtccccccgctcgtaattactgtagatgcgttgactgcaattcaaaatttccgctatttctgtctgcgtcaaatccctgtcttctcgcaagttacggatacgctcgtatttcatgttcccacctcaggaaaagcatacgagcatcccatgcttccccttgctttttagcgaatttttcgctaaaataaacatgaggtgaatccgatggatttatactacgatattttattggccgctacaccggagggctgtcccgaacctccgcgctcggatttctacaacgagatggtggatcagctctgtcgaaaggccctgcgggatatccggaagattgtttcagaggaaccctccggggagtgggacagtctgctgcaaattgaggatatctgggacgttttaaaatggctgggggtctgccggccctagacgctgtgcattcgttccagctgcgggccgggccttatcaagcgcacaccgtaggggcggggctcgtccccgcccgccggagagtgcctggggcgcgggcggccacaagggccgcccctaccgcacaaggtagggcggctcatcccagcgccacgtccagcaccatcatgagcaggaagcccgccatgactcccagggtgccggtgttggagtgctcccccaggtgggcctcggggatgagctcctccaccaccacatacatcatggctccggcggcgaaggacagcagccagggcatgaggggctggatcgtccccgccgccagcaccaccagaatgccgaagacaggctccaccacgccggaggcgctgccgtagaggaaggcccgcccggcggacagtccctcctgccgcaggggcagggagatggccgccccctccgggaagttctggattccaattcccagagccagcgccagggccccggacagggccgccccctcaccggcgtgctgggcggccagggcgaaggacaggccgacggccatcccctccgggatgttgtgcagcgtcacggccagcaccagcagggtggtgcgccgccaggaggagtggagcccctcgggctgcctggcatccacatggaggtggggcagcagcacatccagcagcagcaggaagccgatgcccagcacgaagccccccaccgccggcagccagcccggaagcccggaggcctccgcctcctccatggcagggatgagcaggctccacaccgaggcggcgatcatcaccccggcggcaaagcccagaaagatacgctggatggacgcattgagctgctttcggaacagaaagaccatggcggcgcccagagtggtcatcaaaaaagtgaagccggtccccgtggccgcccataaaatggattgcatgagttccctcctttttctggttagtcatagttaatcatctgatattatatggggggcggcatgccgcccccctttgaagcgtcagtacgccacgccccagtacaccatgtgcttggcgggcttgccgcagcaggcgcaggtgtcgcccaggtgctcctgctccagagggatgcaccgggaggacactccggcctcctccttcatcttcagctcgcacgccagctcgccgcaccacatggtcttggcgaagccgccctggctggccatcttctccttgacctcctccagggtggcgcaggcgtaggtattctcgtccaggttgcgcttggccttgtcgaacaggccctgctgcaccgcgtccagcatggtcttgacggtctcctcgatgttgtccagggagacaaagctcttctcgccgctgtcccggcgggccaggacgcactggttcttctcgatgtccttggggcccagctccagccgcaggggcacgcccttcatctcgtactcggcgaacttccagccgggggagttgtcggaggcgtccatcttcacccggatgccggcggccttcaggcgggccatgaccgcctcgttggcggcgatgacgccctccttgtgctgggccacggggatgatgatgacctgggtgggggcgatgcgggggggcagcaccaggccgttgttgtcgccgtgggtcatgatgacgccgccgatgaggcgggtggacacgccccaggaggtctggaaggggtggtggggctggttgtccttgccggcgaaggtgatgtcaaaggcgcgggcgaagccgtcgccgaagtagtgggaggtgccggcctggagggccttcttgtcgtgcatcatgcactccacggtataggtggcctcggcgccggagaacttctccttgtcggtcttgcggcccttcaccacgggcatggccaggtagttctcgcagaaatcggcgtagatgttgaacatgcgctcggtctcggcgatggcctcctcggcggtggcgtgcatggtgtggccctcctgccacaggaactcccggtggcggaggaaggggcgggaggtcttctcccaccgcaggacggagcaccactggttatacagcttgggcagatcccggtgggagtggatgatgttggcgtagtgctcgcagaacagggtctcggaggtggggcggatgcagtagcgctcctccagcttctccgagccgcccatggtcacccaggcgcactcgggggcaaagccctccacatggtccttctccttctggagcagactctcggggatcagcatgggcaggtacacgttctcatgcccggtttccttgaacttctcgtccaggatcttctggaaattctcccaaatggcgtagccataggggcggaggatgaacatgcccttgatggaggagtagtcaatcagctccgcctttttgcacacgtcggtgaaccacttggcaaagtccacctccatatcggtaatctgttccacctgtttcttgtcctgtgccatctctatctcaatcctttattctaaagttatcggttcgtattattttacgcattcaggccgcaaaagtcaaggcccgcgctgcgttccgggacaaatggcgcataaaatcccatattttccgcacactacagcaaagcgggaggtggcggagcttgcgtgtgggaatctgggagcgggacgaggggattcggacggccgtggaggccgggttgggagagctggcggcggaggtgcgcgccgggcggcacccggcggagctggccggcgcgcggctggagctgctgacggtgtcaccggcggcacggggctgggccggcgcgggggccgtcccctgcgggacggtgctgctgcccggcacggcggggccgctggcccgggccctcaacgcccgccaggccgtgagctacggcacctccccccgggataccctcaccttttccagcctggagggggacaggctgtgcctagccgtccagcgggagctggtcaccctgggcggggcggtggtggagcagcaggagctggtgctccccttctctaccggcgcctcccccctgccctttctggccgccgcgggcactctgctgctcctgggtgtgccgccggaggagctgccggcgcggctccgctccccggtgtgaggcctgcaaaacggccccggaaccgagcagttccggggccgtcatccagccgaaaagacttttcggctggatgctagactttttgaagcttccagaaagcttcaaaaagtcgtttgatctaacgtgaaagggaaccctgacggttccctttcacactatccttccctccgaagtcttacgcaggaaggtttattgttagcctaacagccccggaaccgagcggttccggggccgttttcatgtcattacatttaatacttacagctttagcaccagggtggctgtaaaccgggcccccttgtaatcgccgaagagctgcacccggtcccccgcctccaactggcgcaggctggtggaggagccgctggcggacataaagctggcgtcggacacgtccgccgtgagcacgttgccgtcggtgagctgtaccatcagggtcttgtccttggtgttgggcaccaggaccgtgccctcaagctggctgctggagccggagcccctgtccacctcgatggacaccacatctccgccgctgaccaccatggccactgcatcgttgggcttgagggtgtagagggagacggcagtgccgtcctgggtgacggaaacgccctcggacacggtataggaggcggtggagccgtcggtgagcttcacatcaaacgtgatcccggcggcatcctgcaccacccgggtgatagtgccggtgacgtttgcgctttgaggcgtggtctccagggtggtgaccttgttgtagcgcacggtgaccaccacagtgtcgccgctcttgatcttgtccagagagctgctcttaccgtcccggtagatggcgggcaggtcggtgagatccagttcaaaggtcattacgctgtcattggcggtcttgaccgccagggtagtgggggtaccgtaggtgatgctctcaatgacgccctcggtggtggtggagccaggataggcgtccagcagcgtcaccacatccccgccggagagctgaagggtggcgaaggagttccgctccagctccttgagtgcgatgtcctcgccattgaagcggatggctgccttggaggagatgtcgtaggtggtggatttgccggtactcaggttggtcagggtgatgtcgttttgatccttggcgtaggtaaagctcttgacggagccctggacgtaatcggttacggtgtccaccgccatgctgaccagctcgttggcctcgtcgttggatacccgcaggctcacgtagtcgccctcatagcggtcggacacggtgcccaccacgccgttgacggtgacgcccgccccggcgggcagggtgtagcgcctggtttcgccgttaaaggccgacacctggagccgctggccgccggtgccgttttccaccttcaccagtatgccctcctcggcgcgggttccgccggagagctgcaccgcgtccagatggcccatggcgtccacatagcaggtggccgtggtgtatccggcctggggatccagcagggtgtagtcgccggcggtcttgcccacctgcacctcggtaaagcggtcgatgtccagccgtttggaagcgccgttgaccgtcacggtcaggctgtcctgctccacgccggtgacggagccggtataggaggtgaccgcgccgcccaggcgcacggactcggcagtacccttcctgtccaggttcacccgggcgtaactgcccaccttcagggcatcggcggaggagagcatattattctcgtagatctccgcgtcggcgggcagagagatgctgcgggtgccgctgaccacgctggtcagggtcagcagggtaacgccgctgctgccggtagacacggcggcgatggtgccgcccacccagtcatagtcggtgtagccgggcagctcggcatagatgccccgctcgtccataaagtcgatggcccggcggagcatggtggccatctcggcccgggtcagggagttctgtggcagaaagcggttgagctcgttgcccttgacgatgccgtacatgttcagcaggtatacatagggctgcagggaggcggaaatagaggtagtgtccgcaaagctcatggggtaggaggtcaggctctgggccaggggggcgagctgcatggcccgcaccagatacatggccagcgtctcacgggtgatggacttcaccagcccgcccgcgctgctcagggcccgcagctcggtctccgagatgatgccggtctccaggcagacggccatctcctgggccgcccaggcgtacatctcctcgggcaggatctccttcagctcgtcctcccagtcctcggcgatggcctccttgtcaatggcgtccacgccggcggcacgggagcaaaacagcagcgcttcacaggcggtcatcttctgatcgggagcaaaggtggtggcgctggtccccttgaccaccccctgggtggccaagtactccacatcgtccttggcccagtgattggtcatgtcggtaaagctgacggccgctgcgggcaccaccagcagggagagcgtcatcagcgcggccagcgccagagagagaactcgctttcctttcatatgtaatcctccatttgcataaatggtttccataatatatagtataatggttcctcagggaaaaagcaacagagaaaatcccgccctctttcgccgcttttttccagtgccctgtccatttttcctggcagtccaccgcattttcccataaactctattggatttttaagtttctcttcattgtgcaataaatccctccgcccgggcgttatacagtcaaacaggaaaacagctcccaaagattgctctgctgaaacattaaaggaggatatgctgactcacttattttgtaactaaaatagattgaaggagaacaggtatgattaggtggaatgacaattatattacgggtatagaaaaattagacaaggaacatcagcagctattccaaatggccgatcaggttttgaataagttacgggaacgaggagatgaggcaaattatcgtatattcctcgttcgggaaactttgacttatataaccagctattttgagcgtcatgctaaggcggaagaggaatacatgcgcaaaatcggctacactgggtatacattacacaagatgttgcacgatgaattttgcaatatccagctaaaaaaatatcaagatattgtgaagcgtggtgagtgcagtaaagaagagatacaagattttgtcggaagcggaattggatggctattggagcatatagcaacagcagatatggcgatcataggaaagggtattctagccgcgcctgcaaagaacagtgactttgaagcgcgactggaagaaaaaatcaatacgctgttgaccgcttctttgaatattgcggcaaatgcgaaaattataggtaggagctatcaaggagaatttttgggaaaggctgtatatcaaaaaatggtatatagtttggattcacgcgagattacaattgtttcaggtatagagagctcatttctacttcgcgttgccgaaatgatctatgggacagaagtgaagaatgagatggacttgatactatctagtctacagttgtttgctacaaacttctggagatcaataggacagcactttgctggtagtaatactatgatgattatgaagtcgaatagctttatcattgcaggacttctttcagaagaactgaggaagcttaaactaacgcactcattgctctttgcttctgatatggggaaattttttgtagctgttaattactgaaaattccaaaaacgtgatagagttgcggtgtcattccatggggaatcagaacgaggggcaatagtaacagtaaaaataggccattaactttatttgaaaaagaatactatgacccgccccctgcttaccggcgccgcccagaaataacacgaatggaagcgcagaccgcatctgcccgcggatatttgaaattgcctgggagacacccattcccggcagccggaggccaaaggaaagggacatccttgcggatgtccctttcctttggcacgcctgaggggattcgaacctccgacctaccgcttaggaggcggtcgctctatcctgctgagctacaggcgcatatgaaattgtggaaaaactggcgcgcagatgctttgatattgtaccccaattccccgcgcctgtcaacggcaaggggtgtttttgtcccccgatttgggcgttttttttgcaaaatcagttgcgcgcgttactgttctacggtataatatgtggtcgagctttcaatgatatggacagatttcggaataaattgagaggtgcaccactttgcaagatacgaagctgagaaacgtcgccattatcgcccacgtcgaccacggcaagaccaccctggtggacgaaatgctcaagcagggcggcatctaccgcgagaaccaggccacggtggagcgcgtcatggactccaacgatctggagcgggagcgcggcatcaccattctggccaagaacaccgccgtccactacaaggacgtgaagatcaacatcgtggacacgccgggccacgccgattttggcggcgaggtggagcggatcctcaagatggtcaacggcgtcatcctgctggtggacgccgccgagggtcccatgccccagacccgttttgtgctgagcaaggcactggagctgggccacaaggtcatcgtggtggtcaacaaggtggaccgccccgaccagcgcatccacgaggtcatggacgaggtgctggagctgctgctggatctgaacgccaccgacgagcagtttgagtccccaaccctgttctgctccggccgccagggcaccgcctcctactcccccgacgtgcccggcaccgacctggtgcccctgtttgagaccatcctcaactatatccccgccccggaggcggacacggaggcccccttccagatgctggtctcctccattgactacaacgagtttgtgggccgcatcgccatcggccgcatcgagcggggcactgtaaagcagaaccaggagatcgcggtatgcaacttccaccagcccgacgccgcgcctcagaaggccaaggccaccgccctctatcagtttgatggcctgggccgggtgccggtgaccgaggccaccgccggcaacatcatcgccatgagcggcatcggcgagatcaccatcggcgacaccatctgcgcgcccgacgcggtggagcccatcgagttcgtgaagatctccgcccccaccatcgagatgaccttctccgtcaacgactcccccttcgcgggcaaggagggcaagttcgtcacctcccgccagatccgggagcggctgttccgcgagaccatgaaggacgtgtccctgcgggtcaccgagaccgactccaccgacgccttcaacgtggcgggccggggcgagatgagcctgtccatcctcatcgagaccatgcgccgggagggctacgagttccaggtctcccccccccgcgtgctctaccaggagattgacggcaaaatgtgcgagccggtggagcgtctggtggtggacgtacccagcgacagcgtgggcgcggtcatcgagaagatcggcgcccgcaagggcgaccttctggagatgactccggtgggtgatcggatgaagctggagttcctggtgccctcccgcggcctgttcggctaccgcaacgagttccttaccgacaccaagggcgagggcatcatggcctcggtctttgactcctatgcccccatgaagggcgagatccagcgccgcaactccggttccctggtgtccttcgagaccggtgagagcgtcacctacggcctctacaacgcccaggagcgtggtgtgctgttcatcggcgcgggcgtgcccgtctatgccggcatggtggtgggcgagacccccaagcaggaggacatctcggttaacatctgcaaaaagaagcagttgaccaacatgcgcgcctccggctccgacgacgccctgcggctcaccccgccccgccagatgagcctggagcagtgcctggagtttctggccgatgacgagctgctggaggtcactcccgaatccctgcgcctgcgcaagcgcctgctggaccacgcggcccgcatgcgcgaggcctccaagaaaaagggctgattgccgcaacatgatttccgcccccggagcatgctccgggggcggtttttcagtctgccggggaaacgactactccacgtagccgtgctttacctggtcggagatctcgcagagggccttgctggcctccatgtcaaactggcggcactgggccagatcccccagagagaccatccctaccaccttgcccccctccagcacggggaggcggcgcacctgcttggccgccatgatccgggtggcctctctggcgtcgtcgtcgggggacaccaccgcgcagttgcgggtcatgatgtccttcacctgggtcttgagggggtcctcctccgccgccacgcagcgcaggatgatgtcccggtcggtgacaatgccccgcaggccgccgtcctcaccgcagacgggcagggagcccacgttgtgccgggacaggagccgggccgccagggaggccgactcgctgggggtgatggagaccacgctggggttcataagatcgcgtacttgcatgacaaaaccgcctttctcccaaactttactgctagtttggacgggaaaggcggttttattcctctttcagcccgagattgcgccgcagagggccggggccccgccaggcgaaggcccggcccccgtacttgtcccggaacgtgcggttggtgagcccctcgagatcggagttttccagagcgtctaccagagatgtggaaaactcgggcagcggcgagtgggccggggcggcattgtagggacaggcccgctggcagaagtcacagccccaaatcaacgggtggaccctcagccgggcggtctcctcctccgtcagcgccccctttttctgggtcagctcggacagacagcgggacacatccggccccccttctcccagggccccggcgggacaggccgcccggcaggccccgcagccggggcagtccggcgcggcggggcgctccggcacgtccagcgccgccccggtgagaatggtacccagaaatacataggtgccgtagggcggcaggatcagcaggccgtttttcccccgcaggccgatgcccgccagccaggcggcctcccgctccggcaggggggagttgtcggcggcggggacaaacgattcccccgggtatttccggcgcagggcatcacacaccgtattcagccgccgggtgagcacccggtggtagtcctccccccgggcgtagagggacaggttgcccggccgctccccggcgtagtaggggaaggccgccaccaggacagtctctggagcggggcagagggtttccaccttctcccgggcaccggtggacaaaaacggaagcagccgccggaaggccacgccgccccaggcggcggccccggcggctgcgaaccacttatccagcattgtacttgtccagcgcccgccgggccagcgtcccgtccgggatgcagggctccgggccgttcttccgcttctgggcctcctcacaccccttgcccgccagcagcaccaccgccgggcggcgggcgcccaggatggcggtctccaccgccgcctcccggttggggatcacagtgtaatccttgccgtgggcggcgagaaacacgccgatatcggcgcagatggcctccacctcctcggggccggggtcgtcctcggtgaggataatccggtcggcccactctccggcggcgttgcccatgccctcccggcggtcgatgcccttgccgccggtgcagccgaagaggacggtcagctcccggccggggtactccgcccggacggagcgcagggcgttctgtaggctcatgccgttgtgggagtagtccacaatcaccgaaatctgcccgtcggcgctgacgtagtgctccatgcggccgggcacgaaggcccgcaccagtccgccggccaccacgtcggcagggataccgtaggcctccgccaccgccacggcggccagggcgttttccacattgaacaggcccggtgtggaaatggccagctcccgctcatagcggggggtgcgcacatggaaggcgatcttctccccctccttgcgcacctgggagccgtacacgtcggcggaggggaacttctgggagaaggtcaccacccgggggcaggcggccgccgcggcgcgcacccgctccacatggtcgcagtccaggcagacacaggcgctccgggcctgctggaagatcagcagcttggagttgaggtagtcctccagatccgggtgctccaccggggagatgtggtcctccccgatattgagaaacaccgcgcaggccagctccaccccaatcacccggccgtacttgagggcctggctggacacctccatggtcagatagtccgcccccgccgacaccgcgttccagaggtggcgctggagatccagcggctccggcgtggtcagcttggcgggcctgcgctccaccccgtcgtcggtgacgatggtggacagcagggcgctctcccggtggccctgtccggccagccaggcatccacgatggacttgatataataggccgtggtggtcttgcccttggtgccggtgatgccggtgatccgcagcgccccggagggatggccgtaggcccggtcggccaagaggcccatggcctgccggatatcggtgacccggatgcagggcagggggacggcgggatactcccgctcgctgacataggcgaaggccccctgttccatagcggagcggaggtactcctccttaaatttgacccccttgcagacaaagagggtgttggggatgaccagcttggagtcacaggacaccagggacaccgggtgggtcaggccggcggccagaggggccgcgtccgccagcagtccatggcggagcaggagctgataatagtcccccaggggcagacgggttcggttggacatacggattcaccaccagtcaatcattttttggaaggccgaacgcgcgggccgatgtgggcatcggcccctacgggggcctgtggtgcaaaggcacaggggcggggctcgtctccgcccctactgtgtcgctcttgcggggcgtaaacataggggcgggtgcccacacccacccgctgctctcccctataccatgcgcagcttatagccgcaggcggtgatgcacctttccgccaggatttccatggcgtccaggtagtagtcaggcaggccgtggtaggtgcggtagacggacagctcggtacagcccaggatggccgcgtcgcagccggagccgcgcagccagcggtcgatggccgcaaacttctcccgggagcccttttcaccccgcttgatctcgtcgtaaataatgctcatgaccagcttctgcacgtcggcggggggcgtcacgccttccatgccccgggcggcgcactccctctggtagatgccggtctgaaccgtgccgtcggtggccaggatacccgcccgctttttcccgtccgccgccagcgcggccacggtctcccggggcatgtggatgagggggatggcgatatccccctgaagccggtcggcaaagtagtgggaggtgttgcaggggatggccagggcggtgcagccgccccgctccagcagcctggccccgtccagcaggcggcggtagcagccctccacgtccccgcccaggatggcggcggtgcggtcgggcatggaggtatcgctccagatcagggtgggcaggtgctcctggtcgcaggaggcgtcggtacggtccagaatccgctggtagaagtcctgggtggcctggggccccatgccgcccagaataccaaggcgctgttcagacatacccgtccctcctgtcatgctgcggcatgggacccgacgccgcgagtgcggcgccccaagcgttttggccgaaggccaaaaccttgatgccggggcaattcatttgccccgagcagatgagatcaccggggtccccgcacggcgcaagccgggtggggcggcccatgccgcctaaaatgccgaggcgctgttctgtcattttactttctccatgcacgaggcataccagcccacgtagcggtgctggccccggaggatgcgcagcttgtgcatcaggccgttgtccggccggtagaacagggggttgaccgcggcattggcccgctccagggcgcgcatctcctggtggtaccggggattgacgtagtcgtaggccaccttgggggggatgacccaccacagatggcggttttgggtcatggtcagggcgcagggcttgtgctcgatgacgtcctccaccaggtacttggccaggttgtaccccgcgccggtgacgtagtagttgctgcggccctggcggcagttgatctcaaaggccttgaacttgccgtcccgctggtcgtacttgatgtcgaagttggaaaagcccacaaagccgatggcctccaggaagccccgcagcttttcgcacagctccggctcgggttcggtgatgatcaccgcgtggttgccgatggcgtggccggtgtgctcctccagcaggacgtggcccacgcacatgaggcgcaccttcccgtcggcgccggagtagttggtcaccacccgcataaagctgtcgtccccggggatgaagtcctggaggatcagcgcgtcctcataccccgctccgtagatctggtcgatgaccgtgtccacctcctccctggtctggaggatgtaggccttcttctgggtggggaaggggtgcttccagtaggtgtccgactcggcgggcttgaccacgaaggggccgtcaaagggcagctcgaacgcgtggcccatgcccttgtggtacaccaccgtggccgggtggtcgatgccgtaccggtcgcacagctcgtagaacttctccttgtggatcagcgtctccagcatgtccaggctcacatagggggcgatgacgttttccgggtagttgggcaggttggcggagatggcgttgaggtagttgtccccgcagcccagcaccagaatcttcctgtcgggaaactcacgggccacctcggtgacgttctccagcaccttgtccacccggtcgttgtgctcccgcacccggtagtcgatgatcctgctccccgcgcacacgctggcgggaaacatgccgtagacgatggtctttacgccgtaggcctcgtgaaaggcccgggccatgctgtacgcattgatgtcggagcccagcagaacgggcacaaactcaattgccataggtaaacgccccctggaacgtaatctcataccagctcccgcccatgggccgcacgtcggcgggataggcggcggccagctcctcggcctgctccgcgctcaggcgcagctcccgccggagccgctcgcccccggcgaagcactcggagagcagccggcccaggccgctgtcctcccgcatgttctctatcttagtcatattccattctccttaaaccgggcgggcggatgaaatccgcccctacggcctcgcagagtttccgcccgccagggcggaaatcaattcaaaatctgtgcggagcaggacatgcgcctgcgcagcacaccgatgcttgctccgccaccggcgggcaaccacccgcgcgggcgcgggtgaggggggtatcgcggtcattgtaccgccctttgggcggcgcggtgaccgcgtatctaggggggacaacgttccccctagaagcgtcctcagccgctggcccgtttcacctggtacacgccctggatctgtcccagcttgttgatcacgttggtcagctcctcctggtttttgacctccaggacgatgctgacggtggcgtagccgtccggcatggagcgggccgacagactggtggtcttgaccttggcggcggagagggtcatggccacgtccagggtcaggccgtcccggtccttggcggagatgtccagggcggtctggtaggaggccagctccccggtggcccagtccaccctgatccagcggcccggctcctccgcgcgcttggcgtcggaggcgttggggcagtcggcccggtggaccgacacgccgaagccccgggtgataaagcccaccaccgggtcgccgggcacgggggtgcagcacttggcgaacttgaccaggcagttgtcaatgccctccacgatgatgcccgactggctggtcttgcccccacggatggggacggtgggcgggttggaggtagaggggtgaatgggctcctgggcggcggccgactgctcggcgtggagccggtccaggcgggtcatctcgtccttgacccgcaccaccgccttctgggcggacatgccgccgtagccgatggcggcgtacagctcgtccagggtgccgaagcgcaccttcttgaggatgaaggggagcacgtcctcggcggtgatggcggccagggagaggcccacgtgcttgagctccgactcgaaggaggcgcggccggtggcgatgttctcctcccgccgctccttcttgaaccactggcggatcttgttgcgggcctcgttggacttgcagatcttcatccagtcccggctggggccgtgggccgacttggaggtgatgacctccacgatgtcgccgtttttcagcggggtgtcgaaggtgaccatgcggccgttgaccttggccccggtcatgtggttgcccacggcggagtggatgttgtaggcgaagtcgatgggggtggccccggcgggcaggttgatcacgtccccccggggggtgaagacgaacacctcgtcggcgaagagatccacccgcatggtgcgcacgaactcctcggcgtccacgtcctgctggctctccagcagcttgcgcacccactcgaaggcctcctcggtgcccagcttggcgttggccatgccctgcttgtacttccagtgggcggcgatgccgtactcggcggtgtggtgcatctcccaggtgcggatctgcacctcgaaggggatgccctcccggccgatgacggtggtgtggagggactggtagccgttgggcttgggggtggagatatagtccttgaaccggcccagcacggggttgaacaggtcgtggatgacgcccaggacattgtagcactcgggcatgtcgtcgacgatgacccggaaggcatagagatcgaagatctcgtccatggtcttgttctgggtatacatcttgcggtagatggagtagatatgcttcacccggccgtagatggtgcagcggatgccctcctcgtccagccggtcctggatgcgcttctggatgcccgccaggaactcctcgtgggcggaggagcgggcggccagctcgtcggcaatctccctgtagccgatgggatccaggtattgcagggaggtgtcctccagctcccacttgatgcgctgcatgcccaggcggtgggcgatgggcgcgtagatctccatggtttccagggccttctccttctgcttgcgggcgctctggtactccatggtgcgcatgttgtgcagccggtcgcagattttgatgaggatcacccggatgtccttggccatggccatgagcatcttgcgcaggttctccatctgctcctcttccttggaggtgtactgcacccgggtcagcttggtgaccccctccaccagatcggccaccgtgggtccgaagagcttggcgatctcctcgtgggtggcgccggtgtcctcgatgcagtcgtggagcagggcggcgatgatggagtcggtgtccagctccagctccgccacaatctccgccaccgccagggggtgggtgatatagggggagccgtccttgcgcagctgtccggcgtgggcgttgtcggcgtaggtgaacgcgcggaacaggcgctgggcatccagcgccgggttgtattccttgattttatcctccagcgcctgatagcgctccaggatggggtccataccagccacctcacgtaaagcaatcagaatgccagcgggcggcccggtcggctcacccgttggataatatatgccgcaatttccgcatgatacaggaatcgtccagattcaccttgccgtccacgctgcgcagggcgatgtgcaggtggtcggtggtgtgctccaggcggatgagcccccgctcgtcaaagacctccaggcacaccagggtgcgcatcaccgtctcccgccggccggcggagcgggcgatgctgcgggccaggcggtgggccgtggcctccagcggggcctgccccgcgtggcccttcaggtagcgccacagggtgacgaactcctcccggctgggcagcagggcctccgcctcctgccgggtgaggggctccccccggcggaacttctcgtacagggcccgctcggcctgggcccgggtgagggcggggcgcagatcgcagagctggagctggacgctccgccacccccggtactcgttgatctggggcgtgaaagccacgtccacccggtcgcccggccccacccctgcctcctcggcggtggccgagaagaaaatggcgtcgaacgaccggccggacgcggtcagcttcagcttcaggtgccgcccgccgcccacctcgttcacggcggaaaccaggcagccagacagggagaacaccggctttgggttgcccgcgccgtagggctccagcagctccaggccctccactccctccagggtgagcaggcccacatcgtccagctccccgtcgatgtccagggcggaaaccatctcctccccgccggtacaggcgcagacatagtcgttcatggcggcggcaaaggccgggatattctcctcccggatggtgaagcccgccgccagggcatggccgccgaagccctccagcaggggggcgcagcgctccagggcggcgaacaggttgaagcccgcgaaggagcggcaggagcccttgcccttgccgtcctgcaggcagatcataaacgccgggcaggagtacttctccgccagacgggaggccacgatgcccaccaccccctggtgccattgctccccggccagcaccagggcgtgcctctgcggccgggcctcggccatggcctggcactcggtatagatctccgcctcaatggcctgccgctcccggttgaggtcgcacagggcccgggagagttcctccccccgggccggatcgtccgtgagaagcagctccccagccagggaggcgcaccccatccgcccggaggcattgatgcggggggccagggtgtagccgatggccgtggcggtaaggggccgctcatccagccccgcctcgtggagcagggcccgcagccccggccgcccggtgcggcgcagggcctccagccccaggcgcacaatggtgcggttctctcccgtcaggctcatgacatcggccaccgtgccgatggccgccagatcggcgtagcgctccagcagctcgtcccgccgggccgggccgcccagggccaggacgagcttgagggccacccccaccccggccaggcacttgaagggataggggcagtcggcccggcgggggtccactaccgccgcggcggcgggcagggcggccttgcactcgtggtggtcggtgatcaccagctccacccccagggaggcggcgcaggccgcctcctccacggcggtgatgccgcagtccaccgtgacgatgaggcccaccccctggccccggagggcggccaccgcctcccggttgaggccgtagccctcctccatccggtcggggatgtaggggatcaccgtccccccctcccggcggaggaagtcggtgagcaggcaggtggcggtgatgccatccacgtcgtagtcgccgtagaccgcgatatgttcccccgccgccagcgcccggcgcacccgcgccgcggcccggtccatgtccttcatgagaaacgggtccaggagctggccccggccggcgtccagaaaggcgctggccttctccggggtgtccagcccgcgggcgcagagggtcagcgccgccaggggcggcacccccgccgcctccatggcggcccgcgccagaggggcactggccgcccggttccactgcttgtatttcacggccgtatgcccccttccctcaaaattaccctttattatatcaaactctcagccttgtgacaaggcaagacgccgttcagcggcgattttttgccgccacccggcgcgcatggagcggacgcggccgcccctcagcccagctccagatagagcgccaccaggtcgatcgtcgccttcatcccctcaaagtgcgtccgccgccccacgggcctgcggcccgcggggaccccgtattcttttcttttatcgcccggcggaagtgaattccgccggactccgcgccacccggcgcgcatggagcggacgcgcctcagcccagctccagatagagcgccaccaggtcgatcgtcgccttcatcccctcaaagtgcgtccgctccatgccgtgggaggcgtggacgccggggccgatgagggcgccccgggcgtccatacccgcgtgccaggccacggtgatgtcggaggagtagtgggggtagatgtccaccgcgtaggggatggcgttggcccgggccagctccaccaggcgggtgaccatgccgtagtcgtaggggccgccgttgtccttggcgcagatggacacctggcgctcggtgcagcccaagtcgtcccccacgcagcccatgtccaccgccagcagctcgtccacctggggcagggtggcccctccgtggcccacctcctcatggacggtgaagcacacctcggtatcgtaccggggccgctgcccggcgatgtgcatcagcctcagcagggtgagcagacaggctgcgctccccttgtcgtcgataaaccgggacttgaggaagccgctgtcggtgaccacggtcttggggtcgatgcacacgaagtcgccgggggcgatgcccagggcctccacgccggcccggtcctccaccacctcgtcgatgcgcacggccaggttcttctcgtcccgcgggcgggtgagcacgtcgtcaaagacgtgggccgccggggacagagacaggatggttccggtgtatatccggccgtccctggtgtggatgcggcagtactccccgtccagggtgggcaggatgggcccgccgattctggtggtcatcagcatgccgtcggcggtgatggagcgcaccatgaggcccagggtgtcgatgtgggcgcacaggccgacgcgcttccccttttcccggccgggcaccgacaccaccaggtttcccttgttggtgcggcggacggcgtagccgtggtcccgggcgatctgctccgcctcccgcactacctggtccgtaaagccgctggggctgtcaatggacaaaagccgctgggcaatgttcatgagctgcccccggcatccctttgtatccagcatttgcatcgtctcctcgtttgtagtatgatataggatcataccataaccgacaggagcggacaaccatggccgaagaaaagaccaatgtgatgcgtattttagaccaaaaaagggtgccttacactccacaccactacgcccaccccaacggcgcggtggacggggccagcgtggccgccctccttgaccgggaccccgcctcggtgtgcaagaccctggtaacccagggggccagccgccagcactacgtctttatcatccctgtactccgctcgctggatctgaaagcggcggcccgggctgtgggagagaagtccatcgagatgatccctcaggccaggctactccctctcaccggctacgtccacgggggctgctccccggtggggatgaaaaagccctttcccaccgtgctggacgggagcgtggagggactggacgccatcgtggtcagcgccgggaaaatcggagcccaggtggagctggctccggcagccctctgcgccctggtgggtgggaccttcgcgccggtatccaaataatttttcctccagcgggaactttttctccgccttctcgtctaaggagcgtgcaaacccaaactgcaaaggagaatccaaatgaagaaactcggtacgcttgcccttaccctcaccctcaccggggccatggccctgcccgccctggccgcggaggagccggaactggtgatcgcccccgccgacaccggctacggccagaccatcgtgctcaatggagaaaccctggatctcaccggcatccccggcgtctccggggaggagctgctccccctgcgcctgctggccgaagccgaccacggctccgcctactgggatgaggagaacaacgagagctggttcaccttcggggacaaccgcatcaccgtcaagttcgccgacaacagtgtttggctggacgaccaacaggtgaaatccaccgcccaggtggcggatggcatcacctttgtagaggcgggcgttctgtccatgctggagggctacacggtagaccggaaccccgaactggatgtcaaccgcatcgacatcaccacccccaacaacgaccccatggtgaaggccgcctatcagatccgcgaggacagcggcatggccttcggcatgcggagcgacaacgcagaggtggcgaccctcttcgagctacccgaggacacctttgagcaggccatctgcttcacctccatgaacaccacccctgacatcatggtgctggccaagctggccgacggcgccgatgagaccgccgtgaaggaggccctggaggcccaccgccagtcccagcacgacaccttctcctggtacctggcccagaacctgcccaaggtggaggacgcccgcattctggtggaggacggctatgtgttctacctcatcgcggagaacgccgacgccggcgaggccgccttccacgcctatgtggaggcccaggcctaacctgtccgtccataacaagtgccccgccggctggcggggcacttgttttttggccggccgggccgtataatgttgcccaaaggaggaatcgtttatggaatctgccgctccccagactccggttcaggccctggaagcccttcagaacgcctacagccggttcctggacgcgcttccggaggcccgcagggccagcttgggggaggccatcggcttcttcctccgctcggacggcaatcccaagctgggcagtctggtggacgccttcgctgaagagctgcccgtccatgtggaggcactgaaaacccggctggcggcctgcccggcggaggaggccgaccgcctggccgcccaggccctggagctgatgctcctctatccccggcccaaagacggagccaccgagttctccctggccgcctttgagggctttgccgccccgctgctccccttcctggcccccgcccgccgggcggagctggcggagcgctaccgggcgctcaccccgccccagaagatgctgcccaaccagaaaaaactttggaaggccctgtccgggcgctgaaacccaagcacagccgccccccgcgcctctggcgcggggggcggctgatatgtctgttatgtccggagccgctccatgaactcctcgccggtgatcgtctccttctccaggaggtagccggccagctcccggagcttggactcgttctcccgcagcagtccgagagccttctggtgggccgcgcgtaccagctccaccacctggcggtcgactgcggcggccgtctcagccgagcaggacagggcggcgtcgccccccaggtactggttctgcaccgtctccagcgccaccatgtcgaactcctccgtcatgccgtagcgggtgatcatggcccgggccagcttggtggcctgctcgatgtcgttggaggcgccggtggtcatgttgtccgggccgaagatcagttcctcggcggcccggccgccggtgagggtggccagcttgttctccagctcggtgcggctcatgagcatcttctccccctcgtccacctgcatggtgtaccccagggcgccggaggtgcgggggatgatggtgatcttggtaacgggggcggagtgggactggagggcggccaccagggcatggcccacctcgtggtaggagacaatctgcttctcctgggggaagatgaccgcgttcttccgctgggccccggcgatgacggtctccacgctctcctccaaatcggcctgggtgacggtcttccgccccaggcggacggcccgcagggcgccctcgttgacgatgttggccagctccgcgccggaggcaccggcggtggcccgggcgatggcgctccagtccacgtccccgtcaatatgaacccgctttccgtgcaccttcagaatggcgatgcgcccctggagatcgggcagttccaccggcacccgccggtcaaaccggcccgggcgcagcagggcagggtccagggactccggccggttggtggcggccagaaggacgacgcccttgctggagtcaaagccgtccatctcggccagcaattggttgagggtctgctcccgctcgtcgttgccgcccaggccgccggtgtcccgcttcttgccgatggcgtcgatctcgtcgatgaacacgatgcagggggccttctcccccgcctgcttgaacagatcccgcaccttggccgcgcccatgcccacgaacatctccacaaattccgagccggagatggagaagaagggcaccttggcctccccggccaccgccttggccagcagggtcttgccggtgcccggcggccccaccagcagcacgcccttgggcaggcgggcgccgatggcggcgtacttctccggcccgtggaggaagtccaccacctccatcaacgactccttggcctcgtcctggccggccacgtcggcaaaggatacgccggtggacgcctcctccacgtagaccttggcccccgacttgccgaaggtcatggcgttgcccatcccgccgggcaggccgcccatacgcttcatcatccagcgggagagcagctccccaatgacgataaagatcacaatgggaagaatccagctcaccaggacggagaggatgggattggcctgggtggggatctccgcggtgaaggtgatcccctcctccgcctggagctgggccagcagccgctggccgtcatccggccagacgccggtcttgtaatagccctcccgcccgccgtcgtccttcgcaatgaatacgatctcccggctcgtctcatccagggccacctgctccacctggccgccgtccaccatggtcaaaaactggctgtacggcacctccaccacctggcgctccagcagggacgggaagagaaacacgttcagcagcatcagcacaatcagcgccgccagatagtagaagatcagcggctttttggggggcgaggtcttcatctcgctgtccttcagttctttcaaatcaaaattcctccccggttcgacgcattattttcggtacgaaggaatcataggcgctctccctccaaaagtcaacgcgcccacggcgctatttacatattgtttacaaaagaggctccatccagccggacggagcctcttttgttcaatatttgttcaccataccggcaatcagcggggtgggcaccagccacatcaccaggaacaccagcaggttggcggcggacagggaggcgtaggagcatacaaaggtgaggtaaaaggccagcagcaggccggccaccgcccccaggcaggccagcaccgcggcggtgcgcaccgcccggcgcagccgggccgcccccaccacggcctcggagtagggggctaccccctcccggcagaggacggcggtgaggatgtcgctgtggggctgctcctcgtcggacaactcccgccgccgttccaccgccgggaactccatcttgtccaccggcagcttgaagcgctggcgcagcatggcggggatcaggttgaagtcgcgggtggccatcaccggcgtgacccggttgcggatgaggctgttcagcgacggctccagcgccccgtggagcgtgtagttgagggcgaatatgcccgccagctccccgtcgatggcgcagaacaccgcgtttttcacgttgagcccctggggcagggtgatctccatcaggtgcatgaaggacgccgagcccaccagcacctgctggtcgcggatgacggcggacaggccgccctcatacacgcagaagtcggaggcgcggcggtacacgcacccctgggcgcggagcaggtcgtggaagagcttgtccagcccgcagcccgcgtcccggataagggtggcggtgtcggacaccaccttgtccaccggaaattccccaaagatcttgatgccgttgagggacacgcagcccggcgggaaaaagtcggtgtcgttgagcaggatgccgctgccgccggtggcagtgaccccgtcccacccggcgatggcggcccccgacttgctcagccgctgggtaaggctcagccacggcagggcgaagcacagcgccccggacagggaggcgcaggcggtgagcatggcggacaggcaccagagcagccgttccggcgcgccccggccgatggaggccaccacactgagcagaaggcacgcgatgaacagcagcgggcagacccggtggaagatccgctccgccccgtcggcggcctgcatctggcggccgaagccgatgggctcccccgaccacttggcgtaggtgtcccagccattccacttgccctcgtccagggtgaccagatagggttgggcggcggaggccgccgtgcggcaggccatgcgcagaccacgccgctttcgcctggcgccccgcaggagaaagaatatccccagcacaatggccgcgcagtagggcatctgaccgtcccgggggtccaggcggtacatggtcagcgcgtcggccagggtggccgcggcggcgaagaccagcagcgtatccatgcccagctccagccgcagcagtcggaacagcccccgcatgagcacatccagccccagcagcatggccgccccctggatacccgccagggcaagcacccgcagctccggggtgagcacggccgggtaggggaacagccccagggtcaggtagagggcgggcagaagcagcaggaacaccagcaccgagcgtacccccatggacttgaggcccttgccgtaccgccgggccagctccgccgcgggcagatccggggcggggggcggctggcggcgggggcggcgctcccggaagacctcctccggctcctcctcgtcggtgccggggatgtactcctccgcccggcgcacctcctcgtcgtcctccttgccctcctcctcaaacatgtgtccggcgtagtcgtccgccttctgaaacaggcggttgagaccctcggcaatggggttgtccgatgccggcccctcctcaccggggaactccaacaccttgtccccgtcctccggcggctcctccggctccggttgaggcggcggaacggggggcgggtcctcccgccggcccgacgggaaagacaccaccttgcccggcccgggcggcccggcgggagacggcgccgtgcgctgggaacggggcgtcaccggaaaggggatggtgtcctccttccaccgcggcttggccgcgccgccgccgaactccgccagaatctcctccagggagaacgtctcctcgccgggcatacctgtattccgttcgtcgtcccggtccttggacatggttctcacctgctttgcataatttggatacgcgggcggccataaaggccgccgcctttccgtcccgcttattgcattctctgccgcacggcctcatagagcaggatggccgccgccgcggaggcgttgagagagttgagcttcccccgcatgggtatgcgcaccttgaagtcgcaggtctcggccacaaggcggcccatgccgtccccctcgctgccgatgacgatggcggccgggcccttcaaatccgcgtcgtacaggagccggtccccgtcggcggcggtgccgaacacccacacgcccgcctccttgagctccttgagcagggcgggcaggttggccacccgggccacgggcacgtggctcaccgccccggcggaggtcttggccaccacggcggtcaggccggcggagcggcgtttgggaatgatgacgccgtgagcccccgcgcactcggcggtgcggatcaccgcccccagattgtgggggtcgctcagctcgtcgcacaccacgatcagggggggctcccccttggcccgggcggcctccaggatgtcgtccacgctggcgtactcccgcaccgccgccagggcgatcaccccctggtgggagtgggtgcggctcatgccgtccagcttgcgccggtcgcactccaccaccacaacgcccttggagcgggcggtggaggcgatgtgtcccagggccgcgtcggtctccccccgggccagatagatcttgtcgataggggtgcccgcccgcagggcctcggtcacggcgttgcggccctcgatgatgccgtcggcctccccgctgggggccggtctgcgctccttcatggtctgtcctgcctttctcattggtccgatactggacaacagtataccacaagacggcggatcaaaaaagccaaaattgccgcattcctgcaaaaagagcggtgggcctccccccttgtttttcatagaaagtttacaggtttcgccgcgccgttccttgttttttcaaactccttgtgctataactataattactttgaatattgaatgtttcccatcaaggaggaacgagacttgaactccaatcagaacaacaaccggggcaagggcggcggcaacaagcgcaatatgacggccatcgtctctatcctgctgtgggccctggttctcaccctgctggtcaacctggccacatccaggctgcagcaggccaattccgtggaggtgtcctacggccagttccgccagctaatcatgcaggatgccgtggagtccgtggttatgtcaagcggcaagtacaccttcacgctgaaggagggctactctctctctgtcggcgaggacggagaggtgaccgtccgcacgccggaggagggcgggcaggacagtcaggccgctcagacgccccaggagagcgggaccaccggcggagtgctggacctgcccctgttggacgggacagccccccagcagcagccggttcagagccagaatcaggcccagagcgccggcggcagggagtccctggtctacttctgcgcccccctgactgatgacattccggaactcgtatccctcatggaggcccacggcattaccaacttcggccccgaatacgtggagcccatcaaccccattctgtcggtgctgctgtcctgggtgctgcccatggtgctcattatggtggtcttctccctgctgatgcgtgggatggccggcaagatgggcggtggcatcggcaacctgggcaaatccaacgccaaggtctacgtggagcgcaagaccggcgtcaccttcaaggatgtggccggccaggatgaggccaaggagtccctggtggagatcatcgacttcctccacaacccccagaagtatacggaaatcggcgccaagctgcctaagggcgcgctgctggtgggcccgccgggcaccggcaagaccctgctggccaaggccgtggccggagaggccaacgtgcccttcttctccatctccggctccgacttcgtggagatgttcgtgggtatgggcgccgcccgcgtccgcgacctgttcaaggaggccaacaagatggccccctgcatcgtgttcatcgacgagatcgacaccatcggcaagtcccgcgacaaccgcatgggcggcaacgacgagcgggagcagaccctcaaccagcttctggccgagatggacggctttgaccctaccaagggcgtcatcctgctggccgccaccaaccggcccgaggtgctggaccaggccctgctccgccccggccgcttcgaccggcgcatcatcgtggaccggcccaacctggccggccgtctggccaccctccaggtgcacacccgcaatatccgtctggccgaggacgtgaacctccgcaagatcgccatcgccaccgcgggcaccgtgggcgccgacctggccaacctggtcaacgaggccgccctgcgggctgtccgcctgggccgcaaggcggtcaaccaggaggatctgctggccgccttcgagctggtcatcgccggcgcggagaagaagggaagcgtcctcagcgagtttgagaagaagctggtggcctatcacgaggtgggccacgccatggtggcctacaggcagaagcacgccgagccggtgagcaagatcaccatcgtcccccatacccagggcgctctcggctatacgctccatctgccggaggaggacaagcacctgcacaccagagatgagctgctggcccagatcaccgtctccatgggcggccgcgtggcggaggagctggtactgcacaccatgaccaacggcgcggcccaggatatccaggacgccaccggcatcgcccgcaacatggtggccatgttcggcatgagcgacgagttcggcatgatggccctggcctcccgccgcagccagtacctggacggcggctacggcatcgactgcgcccaggacaccgccgccgccatggaccgggcggtgcgggatctcatcgacgcctgctacaagaaggcggtggagatcctctcccacagccgggaggacatggacaaggtggtggagtacctgctggagaaggagaccatcaccggcgcggagatggtggctattctggagggccgcgaccctgccttggcggacaacttccccgacccggacgggaaaggaacggccgggcccccggcagagcccgtctccgaccccatccccctgagcggcggcgagccccagccccccgacggcggcggcatggagttcggccccgagggcaagcccaaggaataagcaaaaaggaacccccgcgagtccgcgggggttcctttttgtgcccggtcatgggaacgccgcccactccaggccggaggggccatctgaaaaggccgccccctccacttggcgggtacaggtccggcccagactgtccaccgcctccaccagcaggagcacctcgtcccctgcctccactcgggtttgacgctggaaatctgatacatcggcctccaggcggccgtgctccaccggaagggactgttcccactccggcgcgccgttccggtactggcgaaggacggcgcgctctactgtcactaaggagccctcggggggcacacaggccgcccaaatactcccgtcccaggtccatatcccgccggacagggttccgcccttccccttccgcgccgtcagctccagcggggccagggcttcggcggtcacggtccactctcccagctcctgccggtactccgcgccggagggagtgcgcgtccgcagcgtgaaatggtactcctcacccagaggaaggcgcagctccgcctcataggccaggccgtcccggtcggcccgggcggtgaatcgctctccgcccccctccgccgtcaccgacaggcccaaccccggcgcctccacctcggggacggcccggagccgccagcaaaaggtgccgtcctcccccagggcggcgactccccgctcctccacctgccacatccggccgtccgccagggcggcggccaaaagccggtcggcctggccgctttgaagggtgttcacccttaggaccagcacgacgcataccgcgcccagcgccgccgacagcaggggccacagccgccttttccacctgggtacgggccggggcggttcggcggcggccgccttctctacccccagcagcacccctaccgggaggtgaaacaggcggctcagggccaccagcttgtccacctccggcaccgcgccgtcggcctcccatttggagatggcctgccgggtgacgcccagcgcctcccccaggccctcctgggacaggcccagccgcttccgctccgcctgaatacgctgcccaagggtcacagaacacccctcccttctctgcctcccagtatagccgaacaggagcccctttggcaaccaagccgccgtttccttttgtcaaccgccggttgcccctccgctctccgggtcaaagaaggccgccagccggtctttcccgccgaacaggttgttgtactggaggcgctggtagtcctcaatccgggcggtgaaatcgttggtctccagatggctgtaggcccggcccatctgatccacgtagcccacgaaggtgagggcggacagctcctcctggagctgccacaggaagtccccgtagggagtgcccgcaatgcccgcgtaccgcaggaggtactggcccaggaagttgaggctggtcgtctccggccccgtcccgggcaggggatagttggcccagatgacaaagggcacatagtatttgcccatatactgctccatagtcatctgctcctgggtgacgccgtaggccaaatccagaaagccctgctccaccgagggctggtgatccccgaacataaccacgatggtgggctcgtcaaaggcccggagatactccaccagggcgcggaaggccgcgtcggtcttgcccgccaaggtgaggtactgctccgccatggggtactcccccggcgcgtcggctacggtgatctgcgccgggtagtccggcacggtatagccgccgtggttctggatggtgacgttgaacaggaacagaggcttcccctcctccttgtgctcaagctcccagataatctgttcaaagtcggactggtcgctgacgtagccgtgctcgaaggtctggggcacatccatgtcgtcgccgcacttgtaggagtcgaagcccagccgggggtaggcccgatctcgctgccacgaggcccgctccccggggtggaaggccagggtggaatagccctccgccttcagaatggaggccagggaggcggtgggccccagcacatactgctggtaggggatgctgcccgagggcaggaaggccatggagttgccggtgaggaactcgaactcgctggcgctggtgcccgcgccgaacaccgaggtgtaggcgtggccatacaccgcgttgtccagggagcggatgtagttggtgacgctggcgctgagggtcaggtttccgtagtcctcaaagtcggcccaggactcgttcatgatggccacaatattgggccgctccacggaaaccgccgccggctccggcggctccacgccggccatgatctgttccagccgctccggcccggcgtcctccggctcctccacctcgaggaactccgtgttgcggaggaataccgccaggcagccgccagcacggtaggagccggcggggtcccacacatcggtcttaacaccgaaacgctccagccgcccggtggggaacaggagcaggaggcaggccagccccgcccccaggcacaccagccgcaggggccgccgcgttccggtgaggcgcaggcgggccttgtgtttctccggatggaggaacacaaccagggccgctgccaaggcgacggccgccagcatctgccacgtgggcgtaaagcggtagctccccgccacatcggcggcggtgcccagggcggagagatcccagggcaggatgggggtgccccggaaggactggacaaagcagttggccgcgccccacgcaccggaggcgatgtggatgccgatgcagcagggggcgatgcgcccggtcaggccgcacagaggccagtacagcagggcgatgcacagggcgttggccagcagcgccggaaagggcatggcccagggcaggacgccgtaggtgaactgcatgagccaggcggcggtgagtggggtcagcagcaggaagcccgcctgccacaaggtgtcggttggaatcgaaatgcttcgtttcatggggtattctcctgaatctaagggtatagtctgtgattataccgcagaatttcccctctgtcaaaaaaggacggacggcgccgaaccggcgcacgtccgtccttttgctgctttacgtctcctccggcgcccctgtgcggccgccgaaggcctcgatggctcgctcgtcggcctcccgcttctcctcgatggcctctttcagtaacatgtccttgaccttcatgaggcggatggtgttggcgcgctcgttctcgt

SEQ ID NO: 4278 - DNA, 43545 bp, Unknown
  gut microbiota DNA sequence
ccgcccgcgggcggggacaagccccgcccctacagataagcgccacaagacaccccatcggaaacagaaccccggaaatgtaggggcggcctttatggccgcccgcgggcggggacaagccccgcccctacggatcattccggccggggcggaggctgaaacagggggctccccggcgttgccggggagccccctgtttatacaaactcgtagtcggcgaacttgtcctcgccctgctggttatccttggtttcccccacgaaggtgcccatcacgtggcactccgggcagaagccgaactcctcgtcggcgcttccctccagctcatagcggtatttcttgccgcactgagggcactcatagaaaaagtaataggttccccaggtcatgctgtttctccttcctgtttcccggccgctgcggcctccagctccgcccggcgggcggcccgggcggccagagtctcctccagggtctttttcgggcgcgcgttcatctccgtccgccaccgggccagccagccccgcagctcctccagcccctcctcactgaggggaaattcctttgtctcctccactgtgctgtcctgatagcgccaggggccctcccacacctcggcggtaagcctggggctctcccctgtatcgggcaccaccttgtagcgcagggccccgccgctggctgtccagaagttgccgttttcaaagtgggacagcaccggcaggaacagttcctcgtccatgtgttcagctccttatccatgtgaaagcgtggtatctcaaatgataccacgcttttgtccgattttcaattcttcaattctcgctgtagcgggccaggaactggcgggtgcgctcctcccgggggtgctcgatgacctgccgggcgtcgccctgctccacgatcacgccgccgtccatgaataccacctggtcggccacgtcccgggcgaaagccatctcatgggtgacgatgatcatggtggtcttctgttcggccagggcgcggatcacccgcagcacctcgccggtgagctccgggtccagggcggaggtgggctcgtcaaagcagaggatatcggggctgagggccagggcccgggcgatggccacccgctgctgctggccgccggagagctggtgggggtagtgccccgcccggtcggccagccccatctgggccagcagcgtccgtcccttctcctcaatctcagcgaagatgcgcttcttctcccccttaaagtcgggccgctcccgggccaggagctggccggccagagtcacgttttccagcgcggtgtactggggaaagaggttgaacgactggaacaccagcccaaagtggaggcgcttcttgcgcacctcgctctcccgctgggtgacggggtcgtccgcgtcaaagagcacctctccccccactgtaatacggccccggtcgggctgctccaggaagttgaggcagcgcaggagggtggtcttgccggagccggaggagccgatgatggccatggcctgcccctgctccagggaaaagctgatatcctccagaacccgcgtcctgccgaatcgcttctggatatcctctacctgtaaaatcgccatgctgtgcgctcctctcaaacccggaaatagtccagcttcttctcggtgcggctcagggccagggtcacaatgccgttgaacaccaggaaaaaagcgccggcgtagaacaggggccagatcatgcccttgttgccgaagtccttggccagcttgatgatctcccccaccatgatgaagttggacaaagaggtgtccttcaccagggtgatgatttcgttgcccatgggaggcacgatgcgcttgaccacctggagcagggtgacctggaagaagatctggctgcgggtcatgcccaacacctgcccagcctcccgctggccggcggggacaccctggatgccgccacggaagatctcggagaagtaggccgcgtagttgagcacaaaggccaggacggccgcccccatccgccccagggagtgtccaggcccaaagacgatgccgggcagatagaacaccaccgccagttggagcatcagtggggtggagcgcatgatgtaaacatacaggcgcaccagaaggctcaggggcttgaagcggctcatggtgccgaaggacaccaccagtcccaggggcagggacaacaccagcgtgacggcaaagagctcaatattgagcagaaaaccgtccagcagggtcatggttaccgtttggaatgacatgttctctctcctctgtccaacgcggacaaggggcagggggtatatgccccctgcctcttgtgtcggaacgttttactggttggccagcagcaggtcggccagctcgtacttgacggccagctcgttgagggtgccgtcgtcaatgagctcctgcatggcctggtttaccgccgcggtgaggtcggagccctggcggaagccgatgccgtactcctccacggacagctccagatcgggaatgaccatcaggtcggagtagtcgccggtgccggccagcgtgttggccagcacgaagtccatcaccgccgcgtccgccgctccgctcttgacctccagcagggcgtcggtctgcttcaccacagaggtatagctggcctggctgaggaactcgtcggccgcaaccgccgcctcaccggcggagccggcctccgcgtccagattggcgccggccagggactcggtggaggtgtatttgtccgcgtcggcggcgcggataaccaccacctgatagttcttgatgtaggggtcggaaatcgaaatggtctcctggagctccggcgtgatggtcataccgttccagatgcagtcgatgttcttgctctccaactccagcagcttggcatcccagttgatctccacaaacttgggctccacccccagcttggcgcacacggcagtggcaaactcggtctcaaagccggtcagctcgccgtcctcccccaggtagttcatgggctcgaacagggtatagccgatctttagcactccgttgcccttgacataatccaggtcgctctctgccgcaggcgtctgagagccggtcggcgccgcgctgccgggtgtctcggccgtaccgggatttccgccgcaggcggtgagggtcagggtaaggcccagagcaagggccagagccgtccaatttcgtttcatagcagttcctcctcagttgggtcgttttcctcttcgctttcgtatattaccacactaaagcgatattgtaaagagaaaaacggaaaaatttttccccgccccaaaaaagccccgcttccgtatagaattcccgccgattccatatcctctgagacagagaatctcaaaaacggaggcatcacacgttatgaaaaaactggctgcggccctgctggccgccgcgcttctggtcctccccgcccaggccgtcagcggcgcgcccacggtggacgccgccgctgcggtgctgatggagaaggaaaccggcgccatcctctatgaacagaacgcccacgacaagctggagcccgccagcgtcaccaaagtcatgtcgctgctgctggtgctggaggccattgacgacggccgtctggctctggacgatatggttaccgtctccgcccacgccgcctccatgggcggctcccaggtctatttaaaagagggggagcagatgagcgtggacgacatgctcaaggccgtggcggtggtgtcgggcaatgacgccgccgtggccctggccgagcacctggcaggcagcgaggagggctttgtggagcagatgaaccagcgggccgccgagcttggcatgaccgacacctgctttgtcaactgcaccggcctgcccgcggcgggccacctgaccagcgcccatgatatcgcggtcatgagccgcgccctgatccagcaccccaaaatccgggactacaccaccatctggatggactccatccggggcggtcagttccaactggccaataccaataagctggtgcgtttctatgaaggggccaccggcctcaagaccggctccaccgacgcggcaggctactgcctgtccgccacggccgagcgggacggtatggagctcatcgccgttgtgctcaaggccaagacctccgagcagcgctttgagtcggccaagagcctgctgaacttcggctttgccaattataccctcacagacgtctaccccggacaggccctccctcctgtcgacgtgctgctgggcgagcaggacacggtacagcccgtcctcgcccagtccagccggattctggtggacaaggcccagctcaacaacgtgacgagcgaactgcgcctgtgcgagaatgtggaggccccggtggagcaggggcaaaagctgggcgagatggtgatctccgtgggcgggcaggagcagcagaccatccccatcgtggccgaccgggccgtggcacggctgacccttcccggtattttctcccggttcctcaaaacactgtttatggcggaataatccgattgtgcaggggggagcggcaatgccgctcccccctctgcgcaatctctccaaaacgaccgtccgcccaatatgggaaattttacacttgcttttccatacatgtcttgactatgtctccatcacgttgtataatttatacaaataatttccacctcttctggagttattttatcaccaatgacaaggatctcctggctcccagccctctttttggggatttttgccaataaggagtgacacctatgccgatatccaatgacaccgcgcccctggcgcagttccttgcgggacaggcggtccgggcgcaggaattcctgggctcccaccccactgtacgcggcggacagtccggctggctgttccgcgtctgggctcctcatgctcaggccgtcgccgtaatgggcgacttcaacggctgggatgacagggccaaccccatggccgccctggagggcggcgtgtgggagctcttcctccccggcctgcagcagtatgacaactataaatacgccgtgcacacccgctcgggcaaggtcctggccaaggccgacccctatgccttccatgccgagacccgccccggcaccgcctccaagctgtacgatctgtccggttaccagtggggcgacgggagctggctggattaccggaagaacaacccggtctaccagaagcccatgaacatctatgaggtgcatctgggctcctggcggcgcaccggcgacgaccaaatgctctcctaccgggacatcggcagatatctggtgccctacgtgaaggagatgggcttcacccatgtggagctgctccccgtcacggagcatcccctggacgcctcctggggctatcagtgcaccggctacttcgcggccaccagccgcttcggcaccccacacgacttcatgtggctggtggatcagctccaccaggccggcatcggcgtcatcctggactgggtgcccgcccacttccccaaggacgccttcggcctgtacgagtttgacggggagccctgctacgagtatgccgatccccggaagggggagcacgccgactggggcacccgggtgtttgactacgggcgaagcgaggtgcggtccttcctctactcctccgccctgttctggctggagcagtaccacatcgacggccttcgggtggatgcggtggcctccatgctctacctggactacggacggcaggacggccagtgggtgcccaacgtattcggcgggcacgagaatctggaggccgttgaattcctccagcagctcaatacccacattttcagcgcccacagcgacgtgatgatgatcgccgaggagtccaccgcctggccccgggtttcccatccggtggacaaggggggactggagggcggcctgggctttaacctgaagtggaacatggggtggatgaacgacattctccactacattaaaatggacccctacttccgccagttcaaccaccacgatattaccttctcgctgatgtatgccttctctgagaattttgtgctccccctgtcccacgatgaggtagtgcacatgaagggctccctcatcaacaagatgcccggaacggacgaggagaaatttgccggcgtgcgggctttctatacctatatgctcacccacccgggcaagaagctgctgatgatgggcagcgagttcggccagtggaacgagtggcactatgagcactctctggactggcacctgctggagctggagggagaggacggagaccgccaccgggcccttaaggcgttcttccaggcggtcaacgccttctacctggcccaccctgagctgtgggagctggacttctcctgggagggctttgagtggattgaggccgacgacaaccaggccaataccattgcgttcctccgcaaggacaagaagggcagcaccctggtgacagtgtgcaacttctcgcctgtggaccgtaccggctataccatcggcgtgcccacggcgggtacctatacctgcctgttcagcaccgacgcccccgccttcggcggactgggccggggcgatgccgggccggtcaagagccagtatatcgagtgccacggccgggagcaggccatcactctgtccctgccccccatgagcgccgccatctacaagtgcacccgcaagttcccgtcccgccggaaaaaatccgccgaagccgcgcccaaggctgcaaagtccgacaaggcagccaaggcggcccccaaaaagaccacccgcaagtccaaggaatcctgacgctttttccagttaaacgctgaggtgataagaagtgaaaaaggaatgtgtcgccatgctgctggcgggcggacagggcagccgtctccacgccctcaccagccacgtggcaaaacccgcggtcccctttggaggaaagtatcgcatcatcgactttcccctgtccaactgcatcaactccggtatcgacacggttggggtgctcacccagtaccggccgctggagctgaatgcctacatcggcaacggcgagccctgggacctggaccggtcctacggcggcgtccacatcctgcccccctacatgcgggagggagaaaagggcacctggtacaaaggcacggccaacgccatctaccagaacatcaacttcctggagacctatgacccggaatatgtactcatcctgtccggcgaccacgtctacaagatggactacacccaactgctccgccgccacaaggaggccgacgccgcctgcaccatcgcggtgctggaggtccccatggaggaggcttcccgcttcggaattatgaatgtggacgagaacgacgacatctatgagttcgaggagaagcccaagcaccccaagagcaacctggcctccatggggatctacatcttcacctggtccaagctgcgggagtacctcatcgctgacgaggccgatgagaagagctccaacgacttcggcaagaacatcatccccgccatgctggacgccggcgaaaagatgaccgcttaccgtttccagggctactggaaggacgtgggcaccatcgactccctgtgggacgccaatatggatatgctttcccccgacaacggcatcgacccctacgacactgaatggcccatctacgcccgcacccccatccgccccccccatttcatgggcaaggacgccaaggtggaccactccatggtcaccagtggctgtgaggtgtacggcacagtggagaactctgtgctcttccactccgtcaccgtagaggagggcgcggtggtgcgctactccatcctcatgcccggcacggtggtgaagaagggcgcggtggtggagtacgccatcgtggccgaggaatcggtcatcggtgagaacgcccgggtgggcgcctctcccgacggcagtgaggactggggggtggctgtcattgcccagcacctgaacatcggccccagcgccgtggtttcccccaaggccatgattacccgtaacgtgaaaggaggtggggtgaaatgatgaacaagctgcacggcatcatcttcgcctacctttccaacccggatctgcgggagctgacccagcaccgcaacacctgctccatcccctatggcggccggtaccgggtgattgacttcatgctctccaacatggtcaacgccggtgtctccgatgtgggcctgatcgtccacgccaactaccagtccctgctggatcacgtcggctccggcaaggactgggacctcagccgcaagcacggcggcctgcgcatcctcccccccttcggctactcgggccggcgggagggcatctaccggggccgcatggacgccctggcgggcgtgcgctcctatttgcagtacatccggcaggactacgtggtgctggctggaggtgatctggcggtaaacctgcccctcaatgacatctttgaggcccatatccgcaatgacgcggacattaccgccgtgtgcaccagccgccctatgggctcgcccaaggactgcgactacttcaccatcggcgccggagggcggatcaccgacgtactggtgcacccccccattgcccagggctgcgaatccctggaggtctacattctctccaagcagctcctgctctccctggtggaccactgtgcggcccacaatattccctccttcagcaccggcgtgctccaggccatggccggccagctcaagatttgcccatacgtctttgacggctatgccgcccgcctccagtccgtggctggttacttcgcccgcagcatggagctgcttaaccccgaggtgcgaaccgacctctttgcccccggccgccctgtccgcaccaaggaccgctccgacccgtccacctactacggcccaggctccagggcggtcaactccctggtggctgacggctgcatcattgagggcgaggtagagaactccatcctcttccgcggcgtccgtgtggagaagggggccaaggtctctggatgcgtgctgatgcagggcaccgctgttcaggccggcgcggtgctcaagtacgccatcaccgacaagaacgtgcgggtcaaccccggccggatgctgatgggccacaacacctatccgctgtccattgcgaagaacgaaattgtatgacgactccaggggggacgctgtccccccctagatacgcggtcaccgtgccgccctctgggcggcacaatggccgcgatacccctcacccacgctcgcgcgggtggttgcccctgccgctcaatttcgacataaggagagcctatgaacatcttatttgccacctctgagtgtgcgcccttcatcaagaccggcggactggccgacgtggccggcgctctgcccaaggcgctggccggaaacggccatgacgtgcgggtgatcctccccctctacgaaggcatcggcgaggaatggcgcagtcagatgacctacctccagtgcttccacatcaccctggcctggcgcagcccctactgcggcatctttgagctgaagcgggacggcgtcacctactggtttgtggacaacgaatactacttcaagcgttccaacatttacggccactacgacgatggcgagcgcttcgcctacttctcccgggctgtggtggagagcatgggctggctgaactggcatccagacgtgctccactgcaacgactggcagaccgccctggcgcccatctatctgctggaggagcgccaccgcatcccccagctctgcgacaccaagagcgtgttcaccatccacaacatcgagtaccagggccgatacggcagccagactttgaaggatgtgttcgggctcaacgacgggtacttcaacgagcacatgctggcctaccacggagacgtgaatctgatgaaaggggctatctatgccgccgactacgtgaccaccgtctcccccacctacgccgacgagctccagtattccttctatgcccacggcctggagggggttatcgccgacaaccgccacaagctgcgcggcatcctcaacggcatcgacaccgaggtgtatgacccctggcgggacaagggcctgaccaagttcttctcggcgcggcagatggcgggcaagaagaactgcaaagccgccctgcagcagatgtccggcctgcgggagaacccggacgcccccatcatcgcctgcgtgtcccgcctggtgcggcacaagggcttcgatctggtcaccgccgccatccacgagattatgggtatggacgtacagatgatcgtcctgggcaccggcgactggaactatgaggaggccttccgccaggctcagaaccagtaccccggccgcttcgccgcccacatgatgtactcccccaacctgtccaccgccatctatggcggcgccgacctgttcctcatgccctccatctccgagccctgcggcctgagccagatgatcgccatgcgctacggcaccatccccgtggtgcgggaaaccggcggcctgcgggactccgtggtgccctacaacaagttcaccggcgagggcaccggcttctcctttgccaacatcaatgtgcaggagatgaccggcgtgctgagcgaggcggtgaacctctaccacagcgagcccaaggcgtggaaggccctccagaagaacgccatgaccgccgacttctcctgggaaaagtcggccaaggcttatgaggagatttacggctgggtgaccgggaaatagggccgctttttacgcttgacagtaccatattcccatgatagaatgagcgctccgtggcgggtgtgtccttccgcggagcgttcctatgttgatctcaacagaaacaggagatgtctgcattgcacaaatataccaaaaaagagctgatgaccctcatcacgggcaaactgcgccgcaacttcggccgtgacgtggaggaggccaccagcctgcacatgttcaaggcctgcgccctggtgctgcgggacatcatgtccgagcggcaaatgaagaccgccgaccgggtggccgtggagcacctgcgccaggttcactacctgtccctggagtttctgatgggccggtccctgatgaagaacgcctacaacctgggcgtggcggagccactgaagcaggccatcgagggccttgggttttccgcgcccgacctgtttgaggccgagcccgacgccggcctgggcaacggcggcctgggccgcctggccgcctgctacctggactccatgaccaccctggagatccccgccacaggctactccatctgctacgagctgggcatcttcaagcagaagatcgtggacggccagcaggtggagctgcccgacaactggctggggctgggcgacgcctggctcatccccaagatggacgagaccgaggaggtccgcttcggcggcaaggtggaggacgagtgggacgcgctgggccgccaccgggtaaagcacaccgggtatgatgtggtgctggccgtgcccaaggacatggagatcgccggctacggcaccgagcacggcaacctgctccgcctgtgggacgccaacagccccacgccggtggacatgaacctgttctcctccggccagtatctgaaagccgtggagcagcgggccatggccgagtccatctccaaggtgctctaccccgaggacaaccactacgagggcaagtccctgcgcctcaagcagcagtatttcttcgtctccgccaccatccagtccatcgtgcgcaagcaccgggccgagtacggcaccctgcgcaacttccacctcaagcatgtcatccagatcaacgacacccaccccaccctggccatcccggagctgatgcgcatcctgctggacgaggaggggtacggctgggacgaggcgtggtacatcgtcacccacaccatcgcctacaccaaccacaccgtcctggcggaggcgctggagcgctggccccagcagctcattgagaagtggctgccccgcatctggcagatcctcatcgagatctccaaccgctaccagcgggcgctgaccgactacttccacggcgatctgtccaaggtggcccccatggctatcatctggggcggcgaggtgcgcatggccaatctgtgcgtgtgcgcctgcttcaagatcaacggcgtgtccgccctccactccgacattctgaagcgggacgtcttccacgacgcctatgcccgcacccccgacaagtttaccaacgtcaccaacggcattgaccaccgccgctggctcagcgagtgcaacccggagctggacgccctgatccgcgactgctgcggcaaggacaaatacctgctccagcccgacgccctcaaggagctggagcagtaccgggacgacgcgggcgtgctctcccgcctggggcagatcaaggcggacaataagaaggccttcgccgcctgggtggcccgggagagcggcgtcatcctcaacaccgacgccctctttgacgtgcaggtgaagcggctgcatgagtacaagcggcagctgctcaacgtactgcacatcatctacctctaccagcgcatgaaggccgacccccacttcgacttcaccccccgcacctacctgttcggcgccaaggcggcccccggctacgcggtggccaagcggatcatccgcctcatcaactccgtggccgacatgatcgccagggaccccgcctgcaaagaccggctccaggtggtcttcctggagaactaccgggtgagcctggcggagaagctgatgcccgccagcgagctctccgagcagatctccaccgccggcaaggaggccagcggcaccggcaatatgaagttcatgatgaacggcgcggtgacaatcggcaccctggacggcgccaacgtggagatgcaccaggtgctgggggacgagaacatcttcctcttcggcctcaaggcccacgaggtggccgagatgaagcagaagggctacaagtcctatgagtactatgtccacaatccggagctgcgcgcggtcatcgaccagctcaacgtgggcttcggcgacggcgtggcctatgacgacatcgcccgccgcctcctgttcggcgacggcggcccggcggacgagtacctgctgctggccgacttcgagagctaccgggacgcccaccagcgggccggcctggcctatcaggaccccaagcggtggaaccggatggccctcatgaacatcgcccgctccagcatcttcgccgccgaccgctccatccgggactatgcccgggacatctggaacgtgccggtgcgcaccctcaagtaagctctctcccgcagcggcgggcggcccgtggggccgcccgccttttttgcctttcgtgcaatcattttcctctctaccccgctgggtcttctcttcttccacactggactgtggcggcgctttctgccgaatagccaccgcaagcagcatttttgacaaggcccgcccaaaacccgggcgggccttgactttcaaccgggcagagcataaaatatttaatactgtctttattccatccatggatgaggtgaccgcaccatgcccgtatatttagataatgccgccaccacccgggtgtgtccggaggccgcccgggccgccctggaggccatgactgaggggtacggcaacccctcctccgggtatgccctggggcaggccgccgccgccgcgctgaaggagcaccgcgccgccgtggccggccgcctaggctgcgcgccggaggagctggtcttcacctcctgcggcaccgagggggacaactgggccgtccggaccgccgcggagtacggacggcggaagggacggcacatcatcaccaccgccatcgagcacgccgccgtgctggagccggtgaaggccctggccgcccaggggtacgaggtgacctacctcaagcccgatcggagcggccacgtgtccgccgacgccctccgggccgccctgcggcccgacacggtgctggtgtccatgatgctggtgaacaacgagctgggcacccttctccccgtggcggaggccgcccaggccatccgggacgccggctcccccgccctgctccactgcgacgcggtgcaggcctttctgaaggtacccttcaccccggcggagctgggggtggatctgctcaccctcagcggccataaaatccgcgcccccaagggcatcggcgtgcagtacatccgccgggggctgaacctcaagcccctgctgacgggcggcgggcaggagggcgggctgcggcccggcaccgagcccaccgcccaggccgcggccctggcggccgcctgcgcggcgtggcaggaggactatcccgctcgtattcaagaaatcaaagaatacgcgctggaatcactctccgccgtccccgggctggagatcatcagccggggggacgccccccacatctgcgccgtctccctgcccggctaccccagcgaaatgctggtgcgggagctgtccgaccggggggtgtacgtctcctccggctcggcctgccaccgcgggaagcccagccacgtgtttgcggccctgggcctgcccaagcgcaccctgatgggggtgctccgcgtctccttctccccggagagcacccgcgccgacgtggacgccctggctgggggactgaccgaaattgccaagaccagaattgcagcgaggtgagcgtttgttccactatatgaaccggggggcggccttctaccgcaacgtggcgcggctggccctgcccatcctgctccagaatctgtgtaccaccctactggggctgatcgacaccttcatggtgggcgccctgggggaagcccccctggccgccgttctggtggccaacatccccgtctttgtcatccaactggtcattttcggactccagagcggctcctccgtcctcatcagccagttctggggcaagggggacaccgagtccattaaccgggtcatcggcctgggctgctatgtggccggggccatctccctggcctttgcctccgtcatgttcttcctgccggagcagctgatgggccttctcaccgacaaccaggagctggtacccctggcggctcagtacgcccgcatcgtgggcttctcctatattttcaacagcctcaccggtgtgtacgtgggcgcccaccgctccatggagaaccccaagctgggcatgatcatcttcggcgtgtccatgctgaccaacgccttccttaactgggtgttcatcttcggcaacctgggcgctcccgccctgggcgtggtgggcgcggcggtggctaccctgtccgcccgcgtgttggagttcgtcatcatgctctcctacgccttgaccaaccggcgcttccggctcaagcccgccgtgctcttccggccgggccgcgccctgctggccaaatttctccactactccgggccggtggtgctcaacgagaccctctggggcctgggcacctccctctacaaggtcatcatgggccacatggaggggtccaccgagatcctggccgcccgcgccctggcgggcaacattgaggatctctgtaccgtggccatcttcgccatcggcaacaccaccgccatcatcgtgggccgggagatcggcgcaggccggcgggagcatgtctatgaggtgggggctaccctggacaccctggccttcctctgcggcctgatcatcggcattcccctgatcctgggggcctggttcgtcttcccctggctggtctaccccttcttccacctgtcggagaccgccggctccatcaccaccatgatgctgaccttcatcggcgtctttctggccctgcgggccttcgactcggtcaacaccgtgggcgtcctgcggggcggcggcgacgtgcgggccgccaccatcatcgacaccacccccctgtggttcgtctccctccccctggccgccctgttcggcctggtgttccagtggggcatcttctgggtctatgtgggcatcatggccgagcaattcgtcaagttcggcattggcctgtaccgcctccgctcccgggagtggatcaacgacgtcacccagttctcccgtacggagtgaccgcgttgtaaaaaataccccggctccgcctgtgggcgcggagccggggtatttttctctgtaagccggctcacagctcccgctccatgcggatgtcggagagctggaaccatttatcagaataggtgacgtatttgaacccaaaccgctcatacagccgcagggcctccctgagctgatggttggaggtgaggaccgctttcttctgccctgtatcccgggcggcctggagcgccgcctccatcaaggccgtaccaatgccccggccccggtatgcctccttcacgccgaacttgagcagctcgcactggccctccccctgaagctccagcatgaccatgcccacaatctcctccccccagcgggccagcagcacccggccaccgccggacaggaagcggtggggctccgccagcatctccagatccaccggctccagcaggtcgtattccagcagccagggcagggagatctcctccagcgcctgcttgtagcggtcctcatagtcgataatcgtgaagcctcggccctcgtccacggattcacccctccttttttacatagaataccattgttccgccgccccgtcaacgcccgaaacttgcagtccacccctttgcctgctgaattttctacgttcacatttaatttacatccagaacacttgactttttcgggggacggtgctacattatctttagcactcagagagtttgagtgctaacattgtgaaagggtggccggaatggatttaacagagcgcaaaaaacggattctccgcgccatcatcgagagctacatccagtcggcggagccggtgggttccaaggccatcgccgcctccatcgatatggaggtatcctccgccaccatccgcaacgaaatggcggatctggaggcgatgggcctgttggaaaagccccacacctccgccgggcgcatcccttcgcccaagggctaccggctctatgtcaacgagctgatggaggagcacaagctctccctccaggagacccagcgcattaaccaggccctggccatgcggatgcgggagctggaccgggtgctggaccaggcgggccgggtggtgtcccagctcaccaattacccctccttcgccctctcctccggtctgagccgcatgaccatccggcggttcgatctgctgatggtggagcgcaacgctttcatcatcgtggtgatgaccgacacggacatcgtgcgcaaccggctcatccgcctgccctccgacctgacggaagcccagctccagatgctcaacaccctgctgaacaccacctttaccggcctgacgctggaggagatcaccccggagctgatgcgggtggcccagcatgcggccggggaggcctatgggcttatctccctggtggtgtctttcgctatggaggtgctggagagcctggagcagcgcaccgtccacacctcgggtctggcccatctgctggagctgcccgagtaccgcagcctggagcgggcgcagccgctgatgagctacctctccgaggacgccgaccccgcccgcttccccgttcccaaggacgatcccatgaagatcctcatcggcccggaaaacgtggccgacgcgctgaaggacaccagcgtggtggtcgccagctacgacatcggcgacggcatgcggggcgtcatcggcgtggtggggcccacccggatggattacgccaagataaccgcccgcctgtcctatctggccgagggcctctcccggctgttcggacagggtgaactgccccagggcagggacgacgagaaataggagatgaatgcatcccatgagcaagaaggaaaaaaagccggaggacgtgaccccggaggagcagaccgagcagaccgtccccaccgaggagacggaggccgaggctcccaaccccctgctggaggagctggaggccctcaagaagaacctctccgaccaggaggacaaatttctccgcctggccgctgaatacgacaactaccgccgccgcagccagaaggagaaggaatccgcctggtcggacgccaaggcggacaccgctgcggccttcctgccggtgtacgacaacctggagcgggccctcaagcaggagaccgccgacgaggcctacaagaagggcgtggagatgaccatgacccagctcaaggaggttctcgccaagctgggcatcgaggagatccccgccctgggcgagccctttgaccccaaccttcacaacgccgtgatgcacgtggaggacgagggcgctggcgagaacaccattgtggatgtgttccagaccggcttcaagtcgggcgacaaggtggtccgtttcgccatggtaaaggtcgccaactaagaagcgcggagggtaggcacataggggcgctaaggcgggacggagacgaaaaaacaggcgacgggcgcagcccgaagcggcatttttcgcgcagtctggacttagcggcccggccatgtgcccaacccatagcgtgacatcatggcgcacatggtgcgcccaccactcaaccttgtaaaaaaccaatttctttattattggaggaactgctttatgtctaagattattggtatcgaccttggtacaaccaactcctgcgtggccgtcatggagggcggcgagtccgtcgtcatccccaacgccgagggcaaccgcaccaccccctccgtcgtggccttctccaaggacggcgagcgcatggtgggccaggtggccaagcgccaggccatcaccaaccccgaccgcaccatcatgtccatcaagcgcgagatgggcaccaactacaaggtgaacatcgacggcaaggcctacaccccccaggagatctccgccatgatcctgcagaagctgaaggcggacgccgaggcctatctgggccagaccgtcaccgaggcggtcatcaccgtccccgcctacttcaccgacgcccagcgccaggccaccaaggacgccggccgcatcgcgggcctggacgtcaagcgcatcatcaacgagcccaccgccgctgccgtggcctacggcgtggacaaggagcaggcccagaaggtcatggtgtacgacctgggcggcggcaccttcgacgtgtccatcctggacattgacgacggcgtcatcgaggtgctggccaccgccggcaacaaccgcctgggcggcgacgacttcgacaagtgcgtcatggactggatggccgccgagttcaagaaggacaccggcattgacctgaccggcgacaaggtggccatgcagcgcctgaaggaggccgccgaaaaggccaagatcgagctgtccggcgtcacctccaccaacatcaacctgccctatatcaccgccgatgccaccggccccaagcacctggatctgaccctcacccgggccaagttcgaccagctcaccgccaacctggtggaggccaccagcggccccgtgaagcaggccatgagtgacgccggcctgtcctccagcgacatctccaaggtgctgatggtgggcggctccagccgtatccccgccgtgcaggagatggtcaagaagctcaccggcaaggagggcttcaagggcatcaaccccgacgagtgcgtggccatgggcgcggcgctccagggcggcgtgttcaccggcgacgtgaagggcctgctgctgctggatgtcacccccctgtccctgggcatcgagaccatgggcggcgtgatgaccaagctcatcgagcgcaacaccaccatccccgccaagaagagccaggtgttcaccaccgcggccgacaaccagaccagcgtggaggtccacgtgctccagggcgagcgcgagatggcccagtacaacaagaccctgggccgcttcaacctggacggcatcgcccccgcccgccgcggcgtgccgcagatcgaggtcaccttcgatatcgatgccaacggcatcgtgaacgtgtccgccaaggatctgggcaccggcaaggagcagcacatcaccatcacctcctccaccaacatgtccaaggaggacattgacaaggccgtcaaggaggccgagcagtttgccgccgaggacgccaagaagaaggaggagatcgacgtccgcaaccaggccgaccaggtggtctaccagaccgagaaggccctggaggacgccaaggacaagatcagcgccgacgacaaggctaccgtggaggccgcgctgaacaagctgaaggacgcgctgaagggcaccgacgtggccgccatcaaggccgccaccgaggaggccagcaaggccttctatcccatcgcggagaagatgtatcagcaggccaatccccagggtggtcagcagcctggccccgacatgggcggcgcccaggccggttccgccagctccgatcccaacgtggtggacgccgattatgaagtggtagacgacgacaaccagaagtaaattcgtccggtgagcacgggccggtctggagttggctcctacgcagtagggggcggcccccagacccgcccgtttctcccgttaagaggtgatagaaccctatgccagaacagaaacgagattattatgaagtcctcggcgtgtccaagggcgccacggacgaggagatcaagaaggcctaccggaaaaaggccaagcagtaccacccggatctgaatcccggcgacaagaccgccgaggccaaattcaaggaggccaatgaggcctacgaggtattgtccgacaaggataagcgcgcccgctacgaccagttcggccatgcgggtgtggatcccaatttcggcgcgggcggacccgggggcggctttggcggcttcggcgggtttgacatgggcgacatcgacctgggcgatatcttcggctccttcttcgggggcggcttcggcggcggctccagccgtgcgcgcagcggccccatgaagggtgacaccctgcgggcgtcggtctccatcagctttgaggaggcggccttcggctgtgagaaggagatcaccctcaaccgaaccgaaccctgcgacgactgccacggtaccggctgcgcgccgggtaccacagcggaggtctgccccgactgccacggcagcggccagatccgtatccagcggggcggcggggcctttaccttcgccaccaccaccacctgccccaagtgcggcggcaagggcaagatcatccatcagccctgcaagagctgcggcggcgcaggcagcgtccgccgtcagcgcaagctcaccgtctccatccccgccggcatcgacaacggccaggcggtctccctccggggacagggcggcgcgggcaaaaacggcggcccggcgggcgatctgctcatcagcgtcaccgtccgcccccacgaattcttcaagcgggacggcacgtcggtctatctggagcaccccgtcaccttcctccaggccacgctgggggcggagttggagattcccaccatcgacggcaaggtgaagtggagcctgccggcgggcacccagcccggcaccaccttccgcctgcggggcaagggcattcccagcgtcaacggccggggccggggcgaccagtacgtcaccgtgaacgtacaggtgcccaccggcctgacccacgaacagaaggaggcgctgcgtgcctatggcgaagccatgggcgagctttcgcccggtcccatggagggcgtaaaatctttctttgacaaaaagaagaaaaagaaataaactagaggacgggctaatgcccgtcctctagtcttacacaggaggtgaccgcccccgtgggccccattcgttatattgtcatactctttcccgtcctcaccctgctggcgctgctgggcttcttctgctggtactggcgcacccagcgctctcccctggcccagcagctcgcccccgcgccgcagccgaagcgccgcttcacctttgccgggcggtgccatcccctggcgcgccgggatgccattcccatcctgctcatcacctgtatttacgccgtcaccgccttcgcccacttgggctccctccaggcgccccagagcgcctgggacttcggggacggggaatcggccaccttctccctgccggagagcgtccaggtgtccaggctgtggtactaccccaacctgggtaccggcaaataccaggtggagatctccgccgacggcacccagtggctcaccctctggagccggacggagaccgatgaaacgggcagtgaggagaccgtttactactgggccgacccggagggctacggcgagagctacgccatgacccagaactacaatcagctcttcaagtggaatgaactcaccttcgaaaacccccagtatatccgatacctgcgcatcaccggccaggccaataagggcctgctggagctgggcgaggtggccctgttcgatctggaggggaaccgggtgaatctgtccgcctcggccagccccctcttcgacgagcaggagacggtacccgaaaagaccacctattacgactcggcctactttgacgagatctaccacccccgcaccgcctgggagcacatccggggcattgaaccctatgagatctcccacccgcccctgggcaagctgatcatgggcgtcggcatccgcctgttcggcatgacccccttcggctggcggttcatgggcaccctgttcggcgtggggatgctccccctgctgtatgtgttcctcaagaacctgttcggccgcacctccatcgccacctgcggcaccgtgctgctggccgccgacttcatgcacctgacccagacccggctggccaccatcgacacctacgccttcttcttcatccttctgatgtattatttcatataccgctacctcaccctcccggcgggcgcccccttccgcaaatgcgccctgcccctgttcctgtcggggctgttctggggcatcggcgcggcctccaagtggacggtgatctacggctgcaccgggctggtggtactctacttcatcggcctgtaccaaaagctgcgggactggccggcggacggggagacgggggcgcggcagcccgggcggctgaagtgggccttccagattctcgccttctcggtgctggtgttcgccctgatcccggcggccatctataccctgtcctatctcccctacgcctgggcggagggagacagcagcctcacgggcctcgtcggtgccatgtgggaaaaccagaagtatatgctctcctaccacagcggcgtcaccgacacccacccctactcctcccgctggtatcagtggctctttgacatccggcccatcctctactatatggacaactcggtgccggggtacaccacccgcttcgccgcctttgtcaacccggtggtgtgttggggcggcctgctggccgtcctcgcctgcgccgcgcaggcggtgcggcggcggtgtgccaaggccctgttcatcgtcatcggctacctggcccagctggtgccctggttcttcatcggccgcatcaccttcgcctatcactacttcccctcggtgctgtttctcattctggccctgtgctatgtgttttacagcctgtccgagcaggaggagctcatcgcctggaagcccgccatgtacgccgtcacggcgggggccgcggccctctacgccctgttctatcccgtgctggtgggcatccagatcccctcctggtatgggacctgcctgctgcggtggctcccctcctggcccttctaatcccccgcccagcggcacttgtgaggtaatttgtatgtatctgtccgactatcacacccacagccggctctcctttgatgcccacgcccccctgtccgagctggcagaggcggcggcagacgcgggcctggatgaactgtgcgtcaccgaccacttcgacttcctcgacgaaaatggggttccggcggagggctacgactgggcccccgccgtggcccagcatcagcaggccctccccgccgccggggagcgtctcaccctcaagctgggcctggagctgggcatgccccatctgaatccggccgccgctgcggccatctgtgcccgcccggaggccgacttcatcctgggctcggtccacaacctctcgccggaaaggggcggcaccgacctgttcttcctggatttctccaccgtccaggcctgctatgatgccctggacgactactttgcctccctggctctgctggccgccacggatttttacgacgtgctggcccacctcatctaccccctgcgctatatgcaggcccccgtcaccctgaaccgttaccaggacgccatccgggccatcctgcgcacggcggtggagaagggcaggggcatggaggtcaacacctgccgggggcgcaccctggaggagtggcggcccatcctggccctctaccgggactgcggcggcgagctcgtcaccgttggctccgacgcccacaccccggcggacgtgggcaagggggtccgggcggcctgcgcgctgctgcgggagtgcggcttccgccgcgtctgcacctatgaaaagcaccagcccgtatttcacacactcggataaggaggaaatatatatgatcgcattgggttccgaccacggagggctcgccctcaagcgccacgtcatggagtacctggacgcccgcggcctggagtatcaggacttcggctgctacaccgcagagagctgcgactaccccgacttcggccgggcggctgcggaggcggtggcctccggcgcgtgcgaccggggtatcgttatctgcaccacgggcatcggcatctccatcgccgccaacaaggtgaagggcatccgctgtgccctgtgcagcgagcctctctccgccgagatgacccggcggcacaacgacgccaacatgctggccatgggcggcggactgatcgggaacaatatggccgaccgcatcgtggacgccttcctcaacaccccgtttgagggcggccgccaccagcggcgggtggacaaaatcgaaggctgaacgcagagcggcccccggaaccattcaggttccgggggccgctttgcttttgcctcagagcgcctggagcacggcctccgccgcggccagggtggcgtccagctccgcctgggtgtgggcctcagagatgaacatagcctcgaactgggcgggggccagggccacgccccgctccagcatcccctggaagtaacgggcgtacttggccacgtcgctgcccttggcgtcggtgaaggtggtcaccgccgtgggggtgaagaagggggccagcagggaaccgagctggttgacgaccaccggcgcgccggtgcgcttcaccagtccccgcaggccctccgccagagccgcgcccttggcgttgatgtgctcgtatacctcgggatgctcccgcaggtaggtgagctgggccaggccggcagccatggccaccggattgccgctgagggtgcccgcctggtacaccgggccgcagggggccacctgctccagcagcgcgcggctgccgcagtaggcgcccaccggcatgccgccgccgatgatcttgccgaaggtgaccagatcggcccgcacgccgaagtacgcctgggcgccgccgggggccaggcggaagccggtgatcacctcgtcgaagatcagcagggcgccgtgcttgtcgcacagggcccgcaggccctccaggaagccgggggcggggcccaccacgcccatgttggcggccaccggctccacgatcaccgccgccacctggccggggttctgctccagcagggcctccacgctggccagatcgttgaactgggcggtgagggtgtccctggccgcccccaccggcacgccggcgctgctggggtgcccccccgccagggcggaggagccggcgttgaccagcatacagtcggagtggccgtggtagcagccctcgaacttgatgagcttgtcccggccggtggccccccgggccagccggagggcggacatgaccgcctctgtgccggaattcaccatgcgcaccatctcaatgttgggtaccatgccggtcatcagctcagcaatctccacctcccggcgggtgggggcgccgaaggagaggccgtcccgtaccgcccgctccaccgcctcccggatcaccgggtggttgtggcccaggatcatggggccccaggagcagacgtagtcgatgtaccgcttcccgtcctcgtcgtagatataggccccgtcggcccgcgtgatgaagcggggggccatgcccacggcccggtaggcccgtaccggggagttgaccccgccggggagcacccgcttggcccgctcaaagagctgttccgagatgtccatcagccgatgtcccccttctgaatggcctgggccagctccttggcgtagtaggtgatgagcatattggccccggcccggaacacggacagggcgctctcgcacatgatgcggtactcgtccaccagccccgccgccccggctgccttgatcatggcgtactcgccggagacggagtaagcgcacatgggcagatcaaaggcgtcggagcactcacggatcacgtccagatagctcagggcgggcttgaccatgaggatatccgccccttccgcctcgtccagggcgcactccttgagggcctccttgcggttatggggatccatctggtaccccttccggtcgccgaaggagggggtggagccggccgccgcccggaaggggccgtagaacgcggaggcgtacttggcggagtaggccatgatgggggtggtctcatagccgtgctcgtccaggacggcccgaatggcggctacccggccgtccatcatgtcggagggggccaccatgtccgcccccgcctccacatgggagagggcggtcttggccagcacctccaaggtcttgtcgttgtccacctcgcggccgcagaggatgccgcagtggccgtggtcggtatactcgcacatgcacacgtcggtgatgacatagaaatccgggtatttggccttgatggcccggatggcctcctgcaccacgccgtgctttgcccaggcggaggagcccacggcgtccttctcacggggcaggccgaagaggatgcagtgggtcaccccggcggccaggcagtcggacaccgcctcgcacaccgcgtccaggccgtagtggaactggccgggcagggcctcgatgggccgcttgccgcggagggtctcgtccacgaagatggggtagatcaggctgtcgggggacaggcgggtctcccggcacaggcggcgcaccgcgtcgcttccccgcaggcggcgggggcgttgaatgagttccatatatgtgcttcctttctcaatcccgcagggctgtaatcaattccaccagggcgtccatggtggcctcccgggccaccgccgcggggatgccgtgcttccgggcctcggcagcggtctgcgccccgatacaggcccccaccatgcgggagaagtccgcgtcctcccccacggaggcgacaaaccccttgaccgtggaggcgctggtgaaggtgacgatccccgccgcgccggactccaccgccgcccgcagctcgtcggagcgggggttctcgtacacggtgcggtagcaggccacgtcgtcatacccaatgttacgccccttcagggcctctgtcaaggcaggggagccctcctccgcccggagaatgagcacccggccccgggcgggcaggccggcccccaggtgggccgcgtcgtagacctcgggcacatagtcggcccgcaggccgtgggcggacagcgccttggcggtgccggggccgatggcggccagcttcaggccgcccagggcgcgggcgtccaggcccttcccgtccaggcaggcccacaccgcgtccactccggcggggctggtgagggccagccactcatagccggacagccgctccagcgccccgtctacggcggggcagggggtgatgggcacggtggcgatgcaggggtactcccacacgtcggcccccagcgcccgcaggcgggccgacagggtgccggcccgctcccggggccgggtgaccaccacgcgctttcccttgagggggaggtggtcgaaccagtcgaactggtcggccagggcgcacacgtcccccaccacaatgacggcggggctctggacagcggccgcttccgccgcccggggcagctccgccagggtggcgctcacccgccgctgggcaggggtggtgccccgctccaccacggcggcgggggtgtccggagccatgcccgcgtccagcagcccggcgcagatggtgggcagggcggacacgcccatgaggaagaccagtgtgcccccggtgcgcaccagggcctcgaagtcgatggccagctccttccccgcccgctggtgtccggtgacgatgtgcagggaggagcagcagtcccggtgggtcaccgggatgccgccgtaggccggggccgcgatggcggaggtgatgccgggtacctcctcgaaggggatgcggtgctccgccagcagctccagctcctcccctccccgaccgaacaggaaggggtcgccccccttgaggcgcaccacgttgtggccctgctgggcctgctccagcagaatccggttgatctgctcctggggcacggggtggcgggacgcctctttgcccacgttgatcttcaccgccccctcgggcataagggccagaatgtcggggctgaccaggcggtcgtacaccaccacatcggccctctccagggcctccagccccttgcgggtcagcaggccggggtcgccggggccggcgcccaccagtgtcacttttccaggcatgttccgccctccttcagcctgcgggccagcgcctcacccagggcctccccctgggcgcgggggccgctgagccgcccccgccgcacttcgcccgcgtcggttacatacagtccgtctatggtcacggtatcgccctccagccgggcgtgggccgcaatgggggcggagcagcccccgtccagggcgcggacaaaggcacgctcggcccgggcgcagtcggttccgtcggcgtccagtacgccgtccaggcaggacagctcctcccccacccgggtctggagggccaaaatgccctgacccgccgcggggagcagctcctccaccgtgaagtaccgggtgatgcgctcctccagccccagccgcttgaggccggcggcggccagcaccaaggcggagaactgcccctcgtccagcttgcgcaggcgggtgagcacgttgccccgcaccggggccaccgccacgccgggaaacagcgcccgcagctgcaccgcccgccgggcggaggcgcagccgatgggcctggaggggtccagctcctccgccccctggggcagtaccagcacgtcccgggggtcctcccggcgggagaagcccgccagggggatgcggggatcctcctccatggggagatccttgcagctatggacggtcagatccacccggccgtccagcagggcggcgtccagctccttgacaaagaggcccttgcctcccaccttgtccagggtgcggtccagtatcttgtcgccggtggtcttcatggtcaccagctccagccccacctccgggtgggcggcgcggatggcgtccatcaccagctcagactgcaccaccgccagccggctctcccggctgccgacacgtatggtcttcattccaatccctccaatgcgctgcggatggcccgggccgcccgggcggtgcgggcgtggtcgtcgccccggccgatgaccccggccaccagattctcgccggtacagacggcggggaaaaagaaggtgcactcctccgggcagtcggccacgctgaccggaatccccagcgcgcgggcctcctcccccaccgcccggttgacggcgcggtcgtcggtggcggccactgccagggccgccccggccagatcgccgggggcatagggccgcccctcccactgtatgccctggggcggggtcttacagcggggggcgatcaccgtcacctccgcgccgaagcgggagagcacctccgcccggcggcaggcgacggccccgccgcccacgaccaccgccttctcccccgccagattgacgaacagcgggaagcggaggggccgctgctcgggcaggggccacctgggtttggcggcggtatgtacctcgatcttgcgggcgcagcgctccagctcctccggcgtcaggttctccttgagcgcgccggagaggaggtccaccgcccgccccacggccagctccaccaggcccctggcctccgggccgtccagatcggtggacagtacccgggcggccaccgcctgcttcacccgctccaggccgggcaggcaggagcggtagttctcccactgggccatctgctccaggtgccgctccacgatctccgcggcggcggcgggcacctcccgccgtgtgtccacccctagggagtccacgttgtagagggtcacgccgggcagctcccccacggcgggctcgatgtcccgtgggatggccaggtcggccagcaggcgggggtggtcctccaccgccgccagctcccgggcagagatagtgtagtgggggctggtggtggcggagaggagcaggtccacccccttcatggcggcgtagcgctcctcatagggggccacggcgcacccggcgggcaccacggtctccccgtggcggtaggtacgcagggtgacggtgacggcgcaccccagccggtggagcagagcggcggacaggcggcccatctccccgttgccgatgaccagggcccgcttgccctccaggccccctgcgtcccgcgccagccgctccaccgcgctctgagccgcggagcggggcactccggtgaggggcaccttggtcttgatctccttgcccgcggcggcggcgttgcggaacaggatctccagcaccccgtctgccgtgccggcctcccgggcggcggccgccgcccccttcacctgggtgaggatctgatcctccccccagatctgggagcgcaggccgccggccacctccatcaggtgccgggcggcctcctcccccgtgcgggtgacgaaggccccggcgaagggggcgtagggcagccccgccgccgcgcacagcagcgcccccggctccggctccgccccggaggcgcaggagaggtagagctccgtgcggttgcaggtggacaggagcacgcagccctccaccccctccgccgcccggagcagccggtccagctccaccacccggctccgggtgaaggagagggcttcccgcagaccgatgggggccttccgccagtccaggccggtcatacggatgttcaagcctcttcccccttcttcaccagcaccacggagaagtagccgctgccatcggtcagctcggcgaagcgggggtagaccgcctccccctccatgccgcagttggccaccatggacgcccgctccagcaggcccttctccgccagcttctccttcagcgcgccgatctcccggcccgccttcatgaacaccaggttggcgtccacgtccaggcagtcgtccacgtccttgtgggaggcggggacaatgagcagccgctccgatttctcgcacagggcgctgcccagccgggccgccaccgcgcagaaggagggtacgccggggatgatctccgcctcatacccccgggccgtcaccttgcggtggaggtagaggtaggtggagtagacggtgggatcgcccagggtgaggaaggccacgtccttccccccgtccaacagggcgcacacccggtcggcgttggcctcataggccgcgtccagggcggcggcgtcccgcaccatgggggcgtcgcagaggagaatctccttcccctcggccagctcgccggcgatggtcagcgcggtcttctccccgctgcccttgtcgggcaccgccagcaccgccgcctgggcgatgatccgctgggccttgcgggtgatcagttccggatcgccggggcccaccccgacgccgtacagaatgcctcgtttcacaataactcctcctgtttcaacaatcgcagcagctcccgccgggccgccccaatggtgcccaccggggccacgtccaggccgtcccggtcgcggagaatcgccatcaggtgggcgatgcggggcaggcgcaagtggttggcccgcagcagctccgcctgggcaaacagctcctccggcgtcccccgggccagcacgcttcccccgcccagcagataggcgtagtcgcagcacaggggcaccacgtccatgtcgtgggtggccatgagaatggtcatgcccaggccgtcccgcaggctggccagcaactccagcagatcgctcaccccctgggggtccagcccggcggtgggctcgtccagaatcagcacctccggctccatgaccagcacgccggcgatggccgcccgcttcttctgcccgaaggagagggcgtgggtgggcttgtcccgcaggtgggacactccggtgcgctccatggccgcctccacccggcggcgcacctccgcctcgggcaggcccaggttgaccgcgccgaaggagatgtcccggtacacgtcggcggagaagagctggtcgtccggatcctggaacacgatgcctacccggcggcgcagctcggtcaggcccttccggtcccgcttcaccagcgcgccgtccagcaggatctccccggcggacggctggagcacgccgttgaggttcagaaatagggtggacttgcccgccccgttggcccccaggatgcccgtaatctttccccgttcggcccggaggttgatgcccttcagcgccgccgtgccgtcctcataggtatagcgcagctctctggcctcaatcgcggcctccatcatcccatcacgctcctctcgagataccatgccgccagctgaaccgccgccaccgccgctgtcagcgggtagagccacgccccccgcgcatagccgccggacagggtgaccaggcttccgctgtagccgcgggactccagggcggtatacacccggtccgccttccgccacgcccggagaaacacaatggaggccagggtgcccagggaggacagggagcggcgcagcccctgatagcccagccgggactcctgagccaggcggatgcgggaggcggtctcggtcaggacaaagataaagcggtagatcagctccatcagctccaccagcaggtggggcacgtgcatccgctccagcgccatggtcacatcggtcaccggggtattcagtgccaggaagtacatggcccccaccgcccccagcgccttgcagaacagccgcccggcccggagcagcgccgccccgtcaaagccccacagccgctcccccaccggcacggccagcagcaccggcgcgccctgggggtagctgttgatcaggatcgtcacgcatccgatggccaggaaggccatcgggatgcacagaaagcgcaggaagacgcgggggctgagtccgcccagggcggtaaccagcccccacatccccagcagggtgaccaggccgaccgttacgctgtcgcagagcaggcagagcaccagcgccgagccggtcagaagcagcttcggcatgggggagatccgccgcagccgcgattgataggcgtagcggtcggttcccatcagccctgctccctcttctccggctttttggtgatgcggcccaggacgaagcccaccacgcccgcgccgatggcggcctggagggcgaagaggagggactccacctcgccgctggccggctccagaaccggctcaaaccagggctcatagtcgggctgaagctccaggatcgcttcctccgcctggccgtccgcgccgccgaactcggcgtcgggcagcagccacagcggcagcgccgccagcagcaccaccagcacgatcaggatcaggtttttctgccataccttcattccggttccctccttacagcacgcacagggcgtggagctcttcccggctgtacttctccagcacgttgaacaccaccacggtcagcaggccctcggcgatggccagggggatctgcgtgacggcgaatatcatcaggaatttcccaatgccgccgtggaccacgcccaactgcaccgaggtcaccacataggtgaacaggtcgcccagcgcggccgcggcgaagaccgccaccgccgccggggcgtttgccttgcgcagcagcttgtagaccgcccaggacacgatggggccggcgatggccatggaaaaggtgttggcccccagggtggtcaggccgccgtgggccagcagcagggcctggaacagcaggacgatcagccccagcaccgccatggtcatgggcccgaacaggatggcgcccagccccacgccggtggggtgggagcaggagccttcaaaggaggggattttcagcgcggagagcacgaaggcgaacgctccgcacatggctagcaggattttggccttgggggcctgggcgaccttcctctggatggagaggaagcccgccaccacaaaggggacgcataccacgccccagccggcggcccagcccaccggcaggtagccctcggcgatgtgcatggccgaggcgctcatggtgagcacgcccagcaggccgacgagcaccgccgccgtgcgcagaagccgtgtgtttcgttgattcatcatgtgtttcatcctttcctatcgctcgtaggtggctgtgaattcggagccggtacggttttccggcttgagcgtctccgccgctgcgcgccttcccgggtcgccccagtggcccgtgcgcaccgactgttctcttacggcagcgggactgcgcgggatttgcacccgtcttcccgtttccggcccccggatctatatcaacaggcttccgcctggagctgttccgcctgcctggcgtgctccacaaacagcgcccgcaccgccgggtactcccccaagccggtgagcacgcaggccgtctcatagccctcggcctccagacggcgccgccaggagtcctcctcgtcccccgccagatcgttcttggcgtgatcccccgccacggtcatcagggggcgcagctccaccctccgcacctggggccgctccttcagacggcgcagggcctccccgaagccggggtatccctccaccgtgccgatcaccacgtccttccgccccagatcgtggaaggtgtactccatcagggcataggccgaattggcctgatgctccgagccgtggcccatatagagcacggcggtgtccgcccgctgggcgggcagggcctccatcagggcgcggcccagggccgcgtagtcctccgccgccgtcagcagggggcggccgaaggccatgtgggcaaagcgggcgcggtacggctccgcctgggccagcagcttgtggtactcctccccgctcatcacgtgggtgggctgcaccaccacgtcggtacagccctcggccagcaggcgctccagcgcctggggcacgttgtcgatgtgggtgccctcccccgccagcttgcggaggatcatgccgctggtaaaggcccggcgcaccgtccgctccgggaaggccgcggccagagcggcctcaatggccgcgatgtttttctccagggtgtcccggtggctggtgccgaaggacaccgccagaaccgctctctctgtcatcgtgcgtccctcccgttattcccgcgcgttgttgctggcctgatagagcatggcgttgcagatggcggcggccacgttgctgccgcccttccgcccccgggccacgatgtggggcacgtccagggtgagcagcagctccttgctctccaccacgttcacgaagcccaccggcacgccgatgaccagggcgggcttcagctcccccgcgtcgatcagctcgcaggcccgtaccagggcggtaggggcgttgccgatggccagcaccagcggcccctccagccgggcggcccgctccatggacacggtggcccgggtctccccccgcgccttggcctccgcggccacgtccgggtcggacatgaagcacaccgcccggccgccgaatttctccagcacccgcttgttcaccccggagaaggccatctgggtgtcggtgacgatggtgcagccctgccgtatggccgcgacgcccgcctccaccgccccggcggaaaagagcaggctgtcggcgtactcaaagtccgcggtggtgtggatcacccgcttgaccacgggcagctgctccgccgggaacacccgctcccccagctcccggccgatgagctccatgctccgggcctcaatgtccgcgggggccacccgctgcaattcaatgtgtttcatggctctattcctccccgttgagaatccggtaaatgcgtttcatgtccaggctggcccgcaggccggccgccagcttgtcgtactgctgctgggcgtacgcctgccagtccacgctggccgcgcccggctccagccccttggcctccagcagggcgttcaccagggcggcggccgcctccgccttgtcgaagatgccgtggacgtagcagccccacacgttgcccgcgctgaggccgtcggagcgccgctccccggtctgggtggtgaactccgccaggggggccgccccgctctcggtgcggcccatgtggatctcgtagccctcgaaggccacgccggccagggagcggaagagcccctccggggcgcgaaaggcccccgtcacccgggtgcgggtcttctccccctggaacaccgtgtcggcggggagcaggcccaggccccggagggagccgcccccctccaccccgtcggggtcggagacggtattccccagcatctgatagccgccgcagatgccgatcaccgctccgccggccgaggcatgcttgagcacggcggcctccatgccgctctcccgcagccagcgcagatcgtccatggtgttcttggtgccggggaggagcaccagatcggggtgccccagctcccggggattgcggacgtagcggagggtgacctcctccatccgctccagggggttgaagtcggtgaagtttgacaggcggggcaggcgcaccaccgcaatgtccaccaggcccacccttccccctccgctcaggcggtgggagagggagtcctcgtcgtccacatccacgtccagcatggggacaactcccagcaccggcttgccggaaagccgctccagctcccccaggccggggcggaggatatccacatccccccggaatttgttgataatcaggcccttgatcctcgcctgctcgtccggctccagcagcttcaccgtgccgtagagggaggcgaacacgcccccccggtcgatgtcgccgcacaggagcaccggggcgttagcccggcgggccatgcccatgttcacaatgtcgtcctgccgcaggttgatctccgccgggctgcccgccccctcgatgacgatgatgtcgtactccgccgccagggactcgtaggccgccatcacctcggggatgaggctcttgcggtagcggaagtactcccccgccggcatggtaccccggggcacgccgttgacgatcacctgggagcccacgtggctggtgggcttgagcaggatggggttcatccgcacgtcgggggccacccccgccgcctcggcctgcaccacctgggcccggcccatctcgaagccgtcgggggtgatggcggagttaagggccatgttctgggatttgaaaggggcaaccttatagccgtcctgggcaaagatgcggcacagccccgccgccagcagggacttgcccgcgttggaggcggttccctggatcataatcgcgttggccatcacaacacttcctttaaggcggccagcagccgccggttttgttccgcctgtcccacacacacccggtaccagtcgttccccaggccgtggtagttggcgcaggagcggatgagcacgccccgcatgagcatccgctccttcaaatcggccgcgcccgccgcccggaacagcaggtagttggcctgtccaggcactacctccagccctagggcggccaggccgtccgacagggcggggcgctccgacgccagcagggtccgggccttctccggccagtcggggcactgctccagggcggccagccccgccgcctgggcgggggtggagacgctccagggcgggccggcggcggccatccgctccagaagtccgccgttggcggagagggcgtagcccagccgcaggcccgccatggcgtagctcttggtgaaggcccgcaggagcagcaggttggggtgctccgccagacagggggccagccccggccccgccccgtcggagaggggcaaaaagcactcgtccaccgccagcaccgcccccacggcccggcattgctccgccgccgcccgcagcagcgccccgtccaccagccgcccggtggggttgttgggggtgcagaggaagaccagctccacccccggcgcgatgacgtccagcagcccgccgtccacgtcaaagcggttctcccggcgcagggggtggcgcgtcacggcgcacccagccgccgtcagcgcctcctcgtactcggagaaggccggggcggtgaccagcgcccgccggggccgcagggcgtaggccagccggaagatcagctccgccgccccgccgccgcagagcacctgctccggcgccaccccgtcgtgggcggcgatggccgcccggagggcgcggcacagggggtcggggtagcgggccgagtctgcggcggcggccgcggcggccgcctgcaccgccgggggcatccccagggggttcaggttggccgagcagtccagcacgtcgccgccgaagcgggcccgcgccgtgagcacgtcgccgccgtgggtatatggggtcatggtgattcccttctctctggtcaggatggtggacgggtggggcggcgggccggtgttacgggaacagcagaatcagcaggggcacgccgcagaagagcagcagggcaaaaaaggcggtggcgtagagaatccggcccgcccgcaggatgtccagggcctccaccggccgctgatcgtcgccgatggtgggtttatccaccagctggccgaagtagtagttgggccccgccagctggagctggagcgctccggcgcaggccgcctcggtgtgggcggagttgggggacttgtgcctcttccggtcccgccggaagatccgccaggcgttcttcccgtcgtaacccgccgccgcgccgcccaggcacatgagcaccccggcgatgcgggcggggagaaagttgagcgcgtcgtccagccgcgccgccgcccggccgaagtagagatagcggtcatttttgtagcccaccatggagtccatggtgttgaccgccttgtagagcatacccaggggcgcgccgcccagggccaggaagatgaggggggcgatcaccccgtcggaggcgttctccgccacggtctccaccgccgccttggccacgccggcctcgtccagccgctcggtgtcccgccccacaatcatggacacggcgtgccgcgcgccgggcaggtctccggccttgagggcctcgtacaccttgtcgctctcgtcccgcagggacttggcggccagcagctgatagcacagcagcgcctccgccgcgaaagccagccaggggctgagcaggccgcacccccacagcaacagggcggtgaggccggttggaatggcgatggtgagcgccaccagcgccgcgccgccggccagctcgccgccgggggacttgggaaagagccgccgcagaagcttctccagggcggcgatcagcacaccgacggcccgcaccgggtggggcgcccagtggggatcccccagcaggagatccaggcagaagccggtcagcagggccagcaggtgggataccccccagctcatagccccttctcccccctgtactcctccagaatggtcagctccagggtgtccggattcagctccgcccggaagccgccgcagttgggacacatccagccgtagtagtcccgctccggccggccgtacttggccagcagggccatgagggccccgccgtgggacaccactcccacccggccaaagccccggcgggcggcgtcggccgccgtcttttccaggccgatggacacccggtcggtgacctgctgggcgctctcccccaccggcatggcggcaaagttgggcctgtcccccatgcccagccacgcctgatagagggggtcgtccttcagctcctcgtggttcttgccctcaaaggggccgaaatcgctctcccgcagctcatccaccaccgtcatctccacgccgggccacagcagctcggcggtgcggcggcagcgctggagggggctgcggtagatgtgctccaccgccggcagggtggcgcccacccgccgggccaactcctccccctgggggagcagcggcacgtccagcgtgccgataaagcgccgttccaggttgccctgggtggtaccgtggcgcatcagaatcagttccatgggccttctcctttcaataccatgggcaggccgcagaagatgcgctccacccgctctgcccgctccgccaagcggcagcaaagccgtcccaccgcctcccggcgcgcccgctgggccggctccaccggcaccacgccgcagcccacctcgtcgcagatcaaaatcacgtccgggttggcctccagcagcgccgcctcgtccagctccggccagtcctccagcccggcaaagacgggccgtgtccgggcctcctccggggtgcgggccacctgggcggggccgtacccggtcttttgcagcacgtagtccagcttgccctggcccgcgccgccgataatcaaaatcataacagcacctccagcctctgccccaccgcggcgcagagcaccatccccagctcgcacagctggaggaagaaccccgccagatcgccggtgacgccgccgaactgccgccgggcggtcaccacatagtagacgcacgccagacccgctcccgccagggcggccagacccgtccgcacatccgcggccaccatggcccctccggtgaggacggcccacgccgccagcactccccgggccttgaccgcgtccatggggccggtgaaggtggccagcaggccggtgccccgggcgttggggagggtgacggcgaagaggccggagaggctgcgggagaaggccggccccagggccagcgccagggcggccccccccgcgggcgccgcctcacaccaggcggcgaagaacaccagcaggtacagcccacagcagatgatggcgaaggccccggtgtgggagtccttcagaatctccagcttccgctcccggctctggtgggaggacagggcgtcgcaggtgtcgcagaagccgtccagatggatgccgccgctgagggcgatggggagcagcagggccagggcggcggtaaagaccgcgccgaaccccagccagccggccagggccagccatagccacagcaccgccccgacggccagccccaccagcgggaaccagcacagggcccaggagagggcctttttctcccagtccacccggggcatggggaacttggagtacatggcaaaggcaatgatgagggatttcacgggtttgctcctttccaggcgatggggatgccgcagaccacctcgtacacccggtcggcccgccgggccaccgcccggttcagccgggccagcacgtccaggtaggccagggtctcggggtcgtagtccattccgtcggagaacagctcgttggtgaccaccaccagcagggcggcctgctccgccgcccgctccacgccggagagcacccggccgaaggccccctcccgcccctgggggccgaaaaactcgttggcagtcaggttggagagatcctccagcagggcggcgcatccggccggcaggacggccccggccaggttcaccgggcactccacggtggcaaaccccttgcccgcccgcatccggcggtggcgctccacccggcgctcgctctcggcgtcccacacctgcatggtggccaggtaggcccgcgtctccaggccggaggcggtgaccagcccctcggcaaattccgacttcccgctggccgagccgccggagaccagtatcagcatggatgcacctccttcggcgggggcttgccccgccctgctgcctcgcagagtttcgcccacttgcggcgaaatgaaatgaaaatctatgtgaagccgccgtatctaggggatgcaatccccctagcctaagggctggtaggcctcgatgttggtgtcctcaaaggtggccatctcccggtagaccgccagccccatatccagcaggggcatgacggccacggccccagtgccctcgcccagacgcatcccggcgtagaggaaggggcgcaggcccaattcagagagcaccagccggctggccggctcctccgacgcgtgggagcccagcatgtagtccttacaggccgggcacaaccgggcggccaccagggcggccacggaggagatgaacccgtccaccagcaccggcgtatggcacagggcgccccccaggaacaccccggccagcccggcgatgtccaggccgcccaccttgtggagcacgtccagcacgtcggaggggtcgggccggttcaccgccacggcggtctcgatggcgtggatcttcttctgtaggcccgcgtcggacaggccggccccccggccggtcatcaccaccggctcctggcccagcagcacggcggccacggcggaggaggtggtggtgttgccgatgcccatctccccggtggccagcaggcgcacgcccccggcgcacagctcccgggcggtctccaccccggtcaggacggcctgcacggcctccccccggctcatggcggggccctgggtcatgtcggcggtgccccggcggacgcaccgctgcacgatgcgcgccccggtgagggggacggccgtaccgatgtccacgggcaccacctccgccccggcggagcgggccatggcgcacacactggtgtcgccggtggacatgttctccgccacgatggcggtgacctcctggccggtctgggtgaccccctgggccaccacgccgttgtcggcgcacatgaccaccaccgcccggcgggagatgtccacgtcggcgctgcccgtcatgccggcgatgcggatgaccgcctcctccagcgcccccaggctgcccaggggcttggcgatggagtcccaccgggccttcgcccgctccatggccgccatatcggcgggggtaattcctgcaatcaccttatccagtgtcatagcgctgcctcctgtgcatagcggcgggccgccgccacaaaattgcgggccgccgacggcgcggcccagaagtggaagtggggaaagccggcgtacagcgtcggggtgtggaacgcgcagtcccacccccggtcgctctggggcttctgcgcatgaaaatcggttccgggggtggtgctgtcccagtagtgg

SEQ ID NO: 4279 - DNA, 8181 bp, Unknown
  gut microbiota DNA sequence
cgcggtgagggtcacatagccgaagcggcccagcctgccggtgttggccgcccggccggggagcgcccccgccatgggccagtcccggccctctccgtcggagagaagccggttgaggtagaggaacccgccgcactcggccacggtgggcaccccccccgccacggcggcgcgcaccgcctcccgcatgggggcgttggccgccagggccccggcgaacagctccggatagccgccccccaggtagaggccgcaggtaccctcgggaagcgcctcgtccgccaacggagagaactccgccagctcggcccccagcgcctccagcagctccaggccgtcggcgtagtagaagcagaacgctttgtcccgggccacggcgatgcggggccgcccctccaccgggggcggcagggcgggagccgcggcggccagcgccggggcggaggccgccagggccagcaggccgtctatgtccacgcttttctccgcctgggcggccagggcggagagcttctcccgcagccccgccacctcggcggcggtgaccagccccaggtggcggctctccagggcgcagccgggcagattgggcagatagccgtacaccgtcacgccggtctctccctcgatggcctccttgagtcgagggtagagcatgggggacacccggttgagaatcacgccccggatgccgctgtccggccggaaatccctcatccccttcaccgcggcggcggcggtgagggcccgcccccggccgtccagcaccagcaccgccggggtgccggtagcccgggccaggtcataggcgctggcgtcggcgctcaggccgatgccgtcatagtagcccatgaccccctcgatgagggccaggccgctgccccggctgtttttctccagcaggtaccgggcggtgtcccggcccaggaagaagagatccaggttgcggcttttggccccgataatctcgctgtgaaacatggggtcgatatagtccgggccgcacttgaaggccaccggcccggccccccggttgaccagggcctggagaagggcgcaggtgacggtggtcttgccgcccccgctggcgggggcgcagaggagcagacggggcgcgctcatgcccggccctccccggagaagatccaaaccgggttctgggcgtccatcaggtggtagcgcccggcgggccgggtgcgggtgacggccacctgcaccatgtccgccccctccagcccggcaaagcaccgggcggcctcccccaccgtctccagggtgacggcggtgcacaccacccgggcggcggggttcttgcggaagatcacgttcaaaatgtcctccagactgcccgaggtgccccccaggaagacccggtcgggggcggagagggcctccagcgcctccggcgcggtgcccgccaccacctccaggttggcggcgtggaagcgggccctgttctccgccagcagggccagggcctcctccttcttctccacggcgtacacccggccggcgggacaggagagggcgcactccaccgacaccgagccggtgcccgcccccacgtcccacaccacatggtgcgcctccagacgcagcttggacagggccagcgcgcgcacctcctccttggtcatgggcacgtccccccggagaaaggccccgtcgggcaggccggagccgttccacggccgcgccaccggatcggggttgaccgccagcaggacggagaggtcggcaaaggtctcccccgccagctctgccgccgtgccggtgacgatgcgctcgtcggcgtagctcagccgctcgcccacggagacccgcacctgtcccagcccccgctcggccagggcccggcagatgtcctccgccttggtggccccgccggtgagggcaaagaccttggcgctgcgctggatctcccccaccgcgttgtggctgcggccgtgggcgctgaccagcctggcgtcctgccaggtggtctggagcctggcgcagaagtaggacagggaggagataccagggatggtgatcacctcgtggttccccagcaggggccacagccccttggccccgctgtaaaatccggtgtcgccggagaggagcacccccaccggcccccggggggccttgtccacatacgcggcgatgtccgccgcggcgatgagggggacgcagtcgtgcccctccgtccagggctccagcaggcggggggcgcccaccagcaccgggctgtccccgatggcctccagggcctggccggtcagggtggccgggttgcccatgcctacgccgatgagatagaccttcatgcgttctcctcctccataagcttcttctgaatttcctccagggtcaggccggtctcccggcgggggcgctccaccaccagcagggcgcagcccgcctcccgggcagcctccgccttttcccggaagccgccgtaccccccggtgtccttggtcaccagggtctgaatgtgatactgccgcagcagggccacgttcagctccctggagaacggcccctgcatgcagatgatgttttttgggggaaagcccagggtcaggcaccgctccagggagtccgccatgggcagcacccggggatagcaccgctctgccagtccggggcgggcaaagtggtggagctccttgctgccggtggtgagcagcacatgaccgggcatctgctccagcatgtccgccgccccggccatgtcctttgccctgcggcaaagctccccgccgtcgggctgccgcaccagccggaggacgggcaggcccgccgcctccgccgcggcccggatgtgctccgtcacctccacggcgtaggggtgggtggcgtccaccgccagggagtatcccccggccctcatgagcgcctccatttccccgctgtccatccggcccacatgggcctccgccccggccgggaggagggtctcgccgtactcggtggccacgcagacggtgtgggggatgtcccgggccaccatccactccgccagcgcccggccctctccggtgccgccgaacagcaataccttattcatgcgctttcctccccctgtgctggtttcaggcccgccttcgccgggcgtatttccctattccccccgctggagatagccccggggggtcaccatctttccgccgatcaccttggtctggctgttgccgacgaacacggtggtgaacatgtccacctgggtgtcccgcagctcgcccagggtgaggagcgccgccgcctcccccgcccggccgatgttgcggacggtgccgcacacggtggcggggtccttcccggcggagagcaggatgtcgcaggcccgctggaggtagtccggccggctgtggctggcggggttgtagaggcagagcacgaagtccgcctgggccgcggcggtcagccgggccgtaatcttctcccacggggtgagcagatcggacagggacaccaccgcgaagtcgtgggtcaggggggcgcccagcacggccgcgccgccgcaggcggcggtgatgccgggcaccacctcgatctcgatggggtcatactcctgggccacctcgtagatgaggcccgccatgccgtacacgccggagtcgccggagcacaccaccgccacgtccttgccggtgcgggcggcctccaccgccgcccggcagcggtctacctcccggcgcatgccggtggacagggtctccttctggggaaaatccgcccgcaccagatcgatgtaggcggtgtagcccacgatcaggtcgcaggcctccagggccgcccgggcgcggccggtgagatccgcgccgccgccggggccaagcccgattaccgttactttcatagcatatcctttctcgccaccgccgcggtgacgccgttgtttgcctgtttggggacgataatccgcccgccggcggcggccgccgcccgctcgcacacgttgtccaccccggtgatcccccgcacaaaggcggagggggtgaagtccccctccaccgccgccagcgcctccgcggagtaggtggtcaggggcaggccccgccgggcgcagaaggccagcaggccggactcgtccttcttaagatcgatggtggcgacgcccgccaccgcctcgggggcgaggcccgccagggaggcgtccgccgccgccgcaatggcggcctccggcgtcccccggcggcagccgatgcccagaatcaggctccggggtaccagacgcagggcgcgggggaagggcccctcccccgtccggtcggtgatccacacccccagctccgccgggcctgtggtgaggccctccgggcaggggtggccgaagtcactggcaaagcccaccggccttccctccagcagggcggcggacacctccttggccagaacccggtctgtgatggccatgttccgctcccgggcccacacgtccacggcgaacagaccgttgacgtcggtggcggtggacaccgccgcctgtccgccggtgagggcggccaccctccgggccagctcgttggcgccccccacgtgcccggagaggagggggacggcaaaccgccccgcctcgtccacactgaccacggcggggtcggaaaacttgtcccgcacatggggggcaatggcccgcacggcgatccccgccgcccccacaaataccagggcgtccgcccgcgcccaggcccaggccgtccacccctccagagaggagtaggcctccgcccctacctcgggggcgaagcgggccgggacgtggagggtaccccccagggcgtccgccaggctgcggcccagcgccgtcccccggcgggtaaaggcgatgaccgccgtggtcacttgctggcctcccggaactcgtgggtgaaggtggggtcgtagagctttgaccgctcgtaatcatcccccaggaaatgaccgattgtaatcagtgccgtcttggtgacctggttctcacgggcggtcttggccagggtggagacggtgcagcggtacacccgctgctccggccaggtggccttatagacgatggccgccggggtgtcgggggcatagccccccgccgccagctcctgttccacatcctccagcaggccggtggacaagaacagcaccatggtgcagccgtgggaggccatcttgcgcagctcctccccctcgggcacgggggtgcggcccgccatgcgggtgatgataaccgactgtgatacctcggggagtgtatactctgcgcaaagggcggcggccgcgccggagaaggaggacacgccgggggtcacgtcgtagccgatgcccagcttgtccagctcgtccatctgctcccggatggcgccgtagagggaggggtcgccggtgtggagccggacggtcatgccgccccgggcctcggtgtccttcatgacctcgatgacctgctccagggtcatggacgcgctgtcgtacaccgcgcagctctcctttttgtagctcagcagggcggggttgaccagggagccggcgtagatgatcacgtcggcctcccccagcagcttcgccccccgcaccgtgatcagatcctccgctccggggcccgcgccgataaaatgtaccatggttttaacctcctatgcccggtggagggccagcaggccctccgcgccgggtgtctttcctaaaattccgtattggttggagaagaaaatgccctcgatggccagctccggccccgcccgccgcttgagctgggcgtccagctccccggcgatggaatccatcaccggctccagcaggccggcccccctcagcagctccacccccgcgtcggtggtggggctgtcgaacagggcctttaccagcgcccggtctccccccgccagggcggcgtgggcggccagggtctcccgccgggcgtcggccaccttggagtgggtgttcatgcacccggcggacaccttgatgagcttgcccaggtggcccaccagcagcaccgagcggaagcccgccccggcggcgtggtcgatggccgcgccgatgtagttgctgcacgtgcaccagcgggccaggctgaggcccagcttctcccgggcgaaggcctcgccatagttgccgggggtgaccacgatgtcccgcgccccggcggccctctgctgatccatctccagatagagggagtccagcagggcggcctcgctcatggggcggacgatgccgctggtgcccaggatggagatgcccccctcgatgcccagccgcgggttgaaggtgcgccccgccagggcctcccccgtggggacggagatcaccgcccgcagcccgccggcgtagcccgcccgggccgcggcggcctccagctgctcttggatcatgcggcggggggtggagttgatggccgcctcccccaccggctggtcgagaccgggccgggtcacccggcccaccccctggccgccgtcaatggcgatccccggctgggcgctccgctccacccgggcgcagatgagcgccccgtcggtcacgtcgggatcgtcgccgccgtccttgcgcaccgcgcaggcggcccagccttccccggcggcgtgctccagcagctccgcctccacccgcacccccgccggggtgtcgatgtgcacggcgggcagcgccaccccctccagcagcagggcggcggccccggcggcagcagccgccgcgcaggtgccggtggtatagccgcagcgcagccgctcccgccccaccgggatatagagctccaatttccccatgtgtgtccccctttcgacgcaaaaaggccctcctcgcggctgaggagggccctaatcccagggtacaccgcacctctccacctcagagctacgcaactgccactctgcagcgggtctcctggcttgcgcttcctcctccggcgcgccttctcagccccgctgggccaatggcttgtgcaccttcgtccgcgcttacagtagaggtaagactgcgccggagttccaccggcttccccgttctgcggcaccgccgcaactgcatgtgcattgaattctctgccattatagcagtatgaggggaaaaagtaaaggcagggtttcaaaattacccgcgggaaactgccagcaaaaagcggagccctgccgtcagcagggaggcccccaggccggtgtagaacacggcgatgaagccctccggcgccagtccgctggcccgcaggccgatgccgaaggccatcataaataccatgatcaaaaatgatttcccatcaaaaaactgccagaaccacttccgctccgtgccgtacccccgtatgcgcgcggtgtgccgctgaaccagccttccgaacaccatgccctgaaacagcccgaagaccagcgcagagagcgccagattccacagggttacatgtccggggtaagccagcagcccgatgcgcaggatgttgaagcctgccgccccccacaccagccccgccagcaaaagcaatgtttctttttttaccatggtaagttcctcctcattatgaacattgttcattttatgtgcaaaacagggcgcgggttcccgcgcccgtctcagcggtagagcagcctgcggagcacctgctccagcccctcacagttgtccgcgccccggctcatctgccccagcaggctgtccagcacgaaagcggcaagctgctcccgggaaaaggaagcatcaaaggcggacggccgcaccgcgcggtccgcctccagcgcctccagcagcgtccggcggacgcgcccgagggcctcctccatggttcgccggcccgcgctccgcccctcgggcaggaagcccgccgcatgtccctggaaaaagcccgggtattccccggccccgctctgaatgcggtggaacagccagtggacgtaggccgcaaagccgtcccggggcgcctccccctccggcgcggacagaatctgcatccagatctcctccaccgttgcggccagcagctccgtcttgccggaaaaatagttgtagaccgagcccacggagacccgggcctcggccgccaccgcgcggatgctcagcccgtccagcccctgccgccgggcgaccgtccggctggcggccagaagcgcctgccgtgaggtgaccacggtattcatgcgcacacgcctcccccattctgaaccttgttcattttaacagatcccactcgtttgtcaacagcagaacgcttccgcacacagggcg

SEQ ID NO: 4280 - DNA, 21151 bp, Unknown
  gut microbiota DNA sequence
gtatagatgatgcaaagggacggccggcgcttacagatagctcttgagcttctccaccatgtcggtgtgctcccagggcagatccacgtcggtgcggccgaagtggccataggcggcagtctgctcgtagatggggcggcggagatccaggtgctcgatgatcttggccgggcgcatgtcgaagcactcgttgacgatggcggagagcttctcctcgtccagcacgccggtgccgtaggtgtccaccaggacggagacggggtgggccacgccgatggcgtaggccagctcgatctggcacttgcggcacaggccggcggccaccaggttcttggcgatgtagcgggccatgtaggcggcggagcggtccaccttggtggggtccttgccggagaagcagccgccgccgtgggccgcggagccgccgtaggtgtccacgatgatcttgcgtccggtcaggccggtgtcgcccacggggccacccaccacaaagcggccggtggggttgacgtagaacttggtgtccttggtgatgtactgggcggggataatgggcttgatgatctcctccaccacggcctcccgcagctccttcagggcgatgtcggggtcgtgctgggtggacaccacgatggcggggcaggagagcaccttgccgtcgtcgccgtactccacggtgacctggctcttgccgtcggggcgcagccaggagagcttcccgctcttgcgcacgtcggtgagctggcgggccagcttgtgggccaggtcgatgggagcgggcatcagcacatccgtctcgtcgcaggcgtagccgaacatcatgccctggtcgccggcgccgatgagatcggccgcgtcggtgccgccctcctggtgctcataggactggttgacgcccatggcgatgtcgggggactgctcgtcgatggcggtcatcaccgcgcaggagcggtagtcgaagccgtaggccggatcggtgtagccgatgcgctccacggtgcggcggacgatggagggaatatcggtgtagtgcttggtggtgatctcgcccatcacggtgacaataccggtggtggtgaaggtctcgcaggccacgtgggcggtggggtcgtgggccagaatgtcgtccaggacggcatcggagatctggtcgcagactttgtcggggtgtccctcggtgacggactccgaggtaaacagacgctttgccataatgtagttccttcctttctcactcgggcacgaaaaacgcgccccgccggatggcggagcgcgtggtgctcatccatcctcatctttcgatttcctcgccggatttggcaccttgcattgcaggttgccgggtttcatcgggccgttccctccaccgctctcgataaggcatattcaattgactgtagctattctatcgacttttttcccgatatgcaatagacaaaacaggggctttgtatagcgccggcggggggcgccgttgtgcaagccgccggatttgcacagatgggcatcggcccctgcgcgtggagcggctgtcacgccttccagccgttgaggtactcctcctgctcgggggtgagggcgtcgatggacaggcccatggcggccagcttgacccggccgatggcgtcgtcgatttcggcgggcacctggtagaccttcttctccaggccgtcccggtgcttgaccagccactccagggccagggcctggacggagaaggacatgtccataatctcggcgggatggccgttgccggcagccaggttgaccagccgcccctcgccgatgacgttgagcacccggccgtcgggcagggtgaagccctcgatgttgtcccggcgcacctcccgtttgaccgccatggccgccaggcccgccacgtccacttcgcagtcgaagtggccggcgttggtgaggatggcgttgtgcttcatcacagcgaagtgcttcggggtgatgacgtccttgcagccggtgacggtgacgaagatgtcgccgtacctggcggcctcgtccatgggcatgacccggaaaccgttcatggtggcgtccagggccttgaaggggtccacctcggtgacgatgacgctggcccccatgccggcggcccgcatggccacccccttgccgcaccagccgtacccggccaccactaccgtcttgcccgccaccaccaggttggcggtgtgcatgatggcgtcccaaacagactggccggtgccgtacttattgtcatagtagtgcttggccttggcatcgttgacggccatcatggggcagggcaggatgccctcccgctcccgggccttgaggcgcaggatgccggtggtggtctcctcgcagccgccgatgaggtgctcgcccaggtcggcgcacttgccgcccagcaggtggatcaaatcgccgccgtcatccaccaccagatggggcttgaacttgagggtctcgatgaggaggttctcatactcctcccccatggcgccgtggatgccgaaagtctccacgcccatgtcggccagtccggcggccacgtcgtcctgggtggacagggggttggagccggtgaggcgcacctccgccccgcccttggcgagcacatagcccaggttggcggtcttggcctccaggtggacggacaccgccacccgcaggccggcgaagggcttctcccgctcgaagcgggcctcaatgccgcccagggcgggcatgaagtcccgcacccagttgatcttccggcggccggccggggctaggttctgatcctttacaatactcatgctgttcctccttgcggggcggccgccgaggggctggggccgtcccagaaatccaatgtcagaaggggcttgctcctgcggaactcctgcacacgctggtgaatggcctccaactgctccaggctggccggctgctccggtccgtaggccgggcaggtaaaaaaccagcagaatttggctccggtggcaattacccggtcataatagagttcggtggccacccgctctgcgttctccgctgtgcagcggcaggccacgccgaagggtagcttgtaccgccgcagcagggcggtggcccgtgtggcgtcggcgccgtcctcgtccacctgaatggcgggaaacaggttgcgcacccgcagcagatccgcgcacagctcgccggtgatgaaccggggcggcgtgaaggcggcgaacacgcagtcggtgtgcttgttgcacagggcaatggtctcctgctcccgggccagagggttgccgccgctgaagataaagagatggcagccccgccccttccgggcctcaatctcctcgtccaggctgtcgaactccatatagggccgcacgccgtagatggacgcgccgcagccgcggcagcccatctcgcagggaaaggaggggtcgatgatcaccgcccagggggcgcggccgttccccagttcccccgccgcgttgcggctgggccagtccatcagcccggcgtgaatcacaaagttctcaaaaatctttttcagcacccggctgtcgatatcggtatacatgctcttgatgaggcggtgccagttgttgccggggtcactcatggccctgtgaaacagctcccggtagggtgaggccagccgctcccccgtgtatttatccaaccagtccatcagcttgggaaggttggcgtccgggtcccgctccaggtagtccagggccttggagatgccgaaggccctgagtctggccggcaagctcatgaatctgcacgctcctttcccacggacaatttttataattgtatcataatgcatccatcgccgcaacgccatagacaaaactgcggttcctgttggaatttcagacacaatggcaagagtgtctaacagccggcgttgacaagccccgcagttccgggatatactgaactgatttcatctcagattttctaggagtgagcgccatgcgcaccggactcatcacctttcatttcgcccaccactacggggcacagctccaggcacttgccaccatgcgggccatccagtccctggggcacgactgcgagatcatcgactaccgcctgccccacaccacccgcaccaaccagcttttcaaaaagagcggcggcgtgcgcggcatggcctccgacgcccataccgccctccactacggggcgttccagcgccgcttccggcgcttcgaggcctttgtggccgaggagatggccctctccccccggcggtacaccgcctttgagcagctccgggccgacccgccggcctacgacgtgtatgtggcgggcagcgaccagatctggaacccctatatcttccaggacaagcagttcgacccccccttcctgctgggcttcgtccgggagggccgccgcatcgcctacgcccccagcctgggagtgcctgagctgccggaggacaaggccgaggagctgcgccgctttctgactcccttctccgccctgtccgtgcgggaaaagcgggggcaggttctgctgcgggaggctgccgggcgggacgcccgggtggtgctggaccccaccctcctcctcaccggcgaggactggggagagctggccgcggcccccaaacggcaggggccctatatcctgtgctactttgtctccgaccccggcgaggcggccccctacgctttggccctgtcggcgcgcaccggttggcccatcgtgcagctcgcgggggcccggcggaagatcgacggggcggccgagctggtctttgacgccggcccccgggagtttttgggcctgttccggcacgcctccgccgtggtgaccaactccttccacggggcggccttctccctccagtttcagaaggacttcttcacctccatgtcccccagggagcgggcggagcccaccttctcccgcatctacagcctgctctcccggctgggctgtgccgaccgcatcctgggcctggacaccaccgccccggtggacgcccccatagactacggcgcggtgtacgagaagctggcggccgcccgggccgactccctgtcctatctgggggccgccatcgagggcgcccccctgcccgcggaggagccggagccccaggccgccccccgtccggtgctgtgcagggcggaggactgcaccggctgcaccgcctgcgcgtcggtttgtccggtgaacgccattgccatggagcccgaccatgaaggcttcctgcggcccgtcattggggagcggtgcatcctgtgccgcaggtgcgagcatacctgccccatcctccaccccccggtgcccggccccgccccggcggcggcccacgcggtctggaaccgcgacgaggccgagcggacagccagctcctcgggcggcttcttctccctgctggcccgccatgtgctggagcaagggggcgcggtgttcggcgcggcgctggacgaggacatgaccgcccgccacgtgtgcgcccgcacggtggacgagctggcccccatgcggggctccaagtacgtccagagcgatctgggcggcagcttttcccaggtcaaggcgctgctggaggaggggacggcggtgctcttctccggcgtgccctgccaggtggacgggctcaaacgctacttggggaaggactaccccaacctgctcacctgtgatctggtgtgccacggggtgccctccccggcggtcttccgggcttacctggacggcctggaggccgcccgcggctccaaggttgtctcggtgcgcttcaaggacaagtcccacggctggtctcacccctggttcaccgctcagtttgccgacgggagcgtctataccgaggacttcaaccgcaccggctacggccggggcttcgggatgcagctcttcctgcgccccgcctgcgcccggtgccggtacacctccaccagccgccccgccgacttcaccctggccgactactggggcctggacgagaagctggccctgccggtggagcgggacaagggggtctccatggtgctggtgaactccgcccgggggcaggctgtgttcgatgccctctccccccggttcggccaggtggagcgccccctggccgaggcggtggcgggcaacccccggctggcctcccccctgaaggccaacccccgccgggccgccttcttcgccgccttcgctgccctgcccttcgccgaggtggaaaagcgctttctggccctcccctccctgccctaccgggcggcggccaaggtgctcaccccggccatgaaggaaaaaatccgcaagctgctgaaataacggcggcgaaatgtttacaatttattcgggaatttttcccggccgtctggtacactactttgtacgtcacaacggggcgggcattccgcccaacgggaggtaacttcacttgagtgcaattcaacgctggctggaccggttctgctacaagcacccccggttcggcatacccaacctgatgttggtcattgtggtcggcaatgtacttgtctggctgatggatcagttcagctacggcgtgtccctgtccgccctgctcgccttctcgccgtactacattctgcacggacagatctggcgcatcatcacctttgtctttgtcccgctggacagcaacctcttcttcctggccgtctctctttacttttactatatgatcggctcagtgctggagcgggagtggggtaccgctaagttcaatgtgttctatggcttgggtatcctgctcaacgtggtggtcggtttcctgctctatgcggtcaccgcccctctctatccctcccatctgctcccgcttctcaccaccgccagcatgacctacgtgaacctctccctgttctttgccttcgccaccctgtatccaaacatgcaggtgcttcttttcttcatcatccccatcaagatcaagtggctggcgtggatcgacgccgccctgttcggctggagcgtcctcagcagcctctttggcgtctttacctccggcctggccgccctccccggcgtcatcatccccctggttgccattctgaactactttatcttcttctgggacaatttcctccagctcttcggccgggtcaaataccagacctcccgccagaccgtcaacttcaagaaggccaccaagcaggcccagcagcagaagggctatatccacaagtgcgccgtctgcggcaagaccgacaccgactaccccaacgaggaatttcgttactgctccaagtgcaacggctattactgctactgttcggagcacatccacaaccacgttcacatacaataaaaaagcagcgcggcggacggccttcaggccgtccgccgcgtttttgtaaccgggctgcggtggtttcccaccccatattctgttataattgattgaatagatactatttgttattaaaaaaggaggtctcatatgaatcggctcatagcctgcaccctggcgctgctgctggtactgctcacgccggcctccgccaactcggcccctacccgtttgggcggtacgggcggttccgccctgacggtggacgagggctgccctgtcactgtcaccgccgagcagctcacctttgatgtcagcggagcgggagactcaaatggcctgaccgcccaggtgaaagctgtctatcagatggagaatcccacagaaaatcccctttccgtccagatgagcttttacctggaagagcaccggggacatatggactctctggtggatgtggacagtgccgtgtcctccatcactgccgacggccagagtctccccttcaccatccaagaggtagagacaggggacgcggctgttgaccgctttgccctgacctatacggtggagtttcccgcctggggaacccgtgaggtggcagtagcctatctcagcagcagctacggtcttcgggagggcaccacctactggacgcaggaattcacctacctgctctcccccgccaggcactgggcggagtttggctctctggacatcacaattcgcaccccggagcctgtaccttacatcgtccgctcctccctcccccttcgggaggcggaagagcggtgctacaccgcccacttcgacggcctgcccgacggggagctcaccttcaccctctatccacgcctctccatcaccctggccgaccggcttcacgccgtactgacctcctatcagttcaccttcgcgtttttccttctcattctgcccctgactctcctggcgcttccggccctcttgatcttcctgcttcagcgccggagccgtcgtcagccctgacgctccttcaccaccgggctgcgagtccactccagcccgcagggccgggctgtggggaagcacaggccgaacagatctgtgcggcgggcctccgcctcaaagagggcgcgggcgtccccatccagagccctggcctgggcgggcttgaccaccaccggaagggcacaggtctctttcatgcggcgcagcagctcccgcccccggccgctgaggcccagcacccgtacatagggcgccaccgggggccgctccgccgcccgcagccccaggaaggcggccagggccagccgccgcagccgggcgtgagggtagcgcttggtcttggcccgggcataaaagtcctccaggctgtccgccgtccgggcggaacgcgccagccgggcgggcaggccctccgccgccccgccgtcggggagggcggcccagtccgcctcgtccatcgtgcgcagacgggccagcaccgcccggtcgatgtgcgccatggacgccgtctccccgctccagggggcggggagataggggtccgcctccgccgcccgtccggcccggaggagggcccgcagctccgaggcggaggcaaagcccccggccgccgggccgtcgtgggccgccccccgccgggggatggtcagggcctccatgccagggggcagggcccgcagatactccacccccaggttgtcgtttgggctggccaggcagtcggcccccaccgccgcctgccgggccgccgggaaggacagcccacgggtcagcccggcccgcagccgctccgggtagtccggaccatccagagccgccgccgccgcccgcaggggcgccagttcccccgtctcactgccgaaggagagcacgtccaccacccccgtggcggccagcaggcccaccgccccccgggcgaaagcctccgccgaggccatggcccagggggtgggcagctccagcaccagatccgccccgccggagagggccagggccgcccggctccatttgtccgtgagggcgcactccccccgctggacccagtggccgctcatgacgcacaccaccgccgtgtccgcccccagggtccgccgcgtccgggcgatgtgccaggcgtgtccccagtggaaggggttgtattctgcgacgattccggctgtggccatgggctgaacctccaaacgcaagagtaaaatttttctctctttcaagcaaaatatgggttgtcctttgggaaaaaaggggctaaaataaaatatgtatgtgctcttattctactacgggaatatccggctcacaagccatagtttaacgtaaggagagaagatttcatgaaagttctggtcatcaacgcaggcagttcctccctcaagtatcagctcatggaccccgccacccgtgaggtgttcgccaaggggctgtgcgagcgcatcggcatcgacggccgcctgactcacaaggtgcccgccaaggacgccaagtatgagttcgagatccccatgcccacccactccgaggccattcaggctgtgctggacgccctgctggacgccgggcacggcgtgatcaagagtgcctctgagatcgacgcggtgggccaccgcgtggtccacggcggcgagaagttcgcctcctccgtgcgcattaccgacgaggttatggccgctctggaagagtgcatccccctggcccccctccacaatcccgccaacatcaccggcatcaaggcctgcgagaaggtcatgcccggtgtgcccatggtgggtgtgttcgacaccgctttccaccagaccatgcccgccaagagctatatctacgccctgccctatgagttctatgagcaggacaaggtccgccgctacggcttccacggcacctcccaccgctatgtctctgcccgcgctgccgccatgctgggcaagcccattgaggagctgaaaatcatcacctgccacctgggcaacggctcctccgtggccgccgtggatggcggcaagagcgtggacacctccatgggcttcacccccctggccggcgttcccatgggcacccgcgccggtgatttggatgccggcatcctggagtacctgatgggcaagcacggctacgacatgaaggaaatgatgaccatcctcaacaagaagtccggcgtgctgggcatctccggcgtgtcttccgacttccgcgacctggagaacgccgccaaggagggtaaccagcgggctgagctggccctggaggccttccagtacagtgttaagaagctggtgggcgcttatgctgccgccatgggaggggtggacgccatcgtgtttaccgccggtgtgggtgagaacgacgccgctacccgcatggccgtggcctccggcctggagttcatgggagtaaagatggatgccgaggccaacaacgtccgcggcaaggagaccgtcatctcctccgccgactccaaggtgaaggtgctgctcatccccaccgatgaggagctcatgatcgccatggacactgccgagatcgttggcaagtaagacctgacaacagcgcctcccggagctggtaccagctccgggaggcgtttttttatcttctcacgcctgcggcgtgttgttgtttgtctgcccccacagccggggagcagtatgcagggaagccggtgattcgaacgcgccccggatagcatttctcctcccgcgcattcccggtctatcgccttgcctgtctggtaccttggctgtaaaaataagataccacctttttcccattcagagttggataaagtataacaggcctgtgaacgttttgtgaaatctccgccctccggcgctcttccatttatacccttatcccacatgacaaatatttaacaataaggttgtggaaactgacgatatcagtattttgacctctcttctttatggaacactccgccaaaatttccccacctctttttgctatattgcacaaatctgcgcacttaccacactgtttctacttactttttggttatttgcttaccgaattgtggggattgaaagatagcctgcaaaccgttaaattatagtccgcaaaggatgccgggctgtgttccggcaaaatctatcacagagagaagagggaaacgtatggcaaaaccaaccaaggataaccgcaagtccgtagtcgacttcggcgtgggctgggtcgtcatcatctactgcctgctgatgttcttcctgtacgtcggcatgtgcaacgacggcgccaacatcaccgcccccaatgtggcctaccgcctgggactggagcagggcgacatcatgaacatgaactccctggccggtctggtgggtgtcgtgttcttcatcattgccggccaggtcaaccggaagatcggcgcgcgcatgacctccggtatctgctgcatcatctccggcatcgcttacatcctggcctgcaacgcccccagcatcgttatctacaccgtctgcatgtgcttcgtgtacggcggcatcatgtccgccggctatgtggcgggcggcaccctggtggcctcctggttccccaaaaagaagggcgtggttatgggctataccaccatgggccacaacttcgcctccgctttctatgtgcagctggtagccattctgatcgcccctaccgtggcgggcaccaccaatatcggcgagaacttttccaccggcatcgtccccatcggcatcgccgccattgttctgggcattctgggtatgatcttcatccgcaacgagccctgggagcgtggcatcaaccccgacaacgtctccgacgagatctatcagaaggagtatgacaccaaggacgccgtcgagggggacggcgggtggaccaccggcaaactgctggccaccaaggagctctggctggcggccattaccaccggctttttccagatctgctctgtgggcgtcatgagccagttggttatccgcaacactcagctcggcttctctcagcaggccgctatgaacgtcatgaccattctggccctgggcggcgtggttggctcctggctggttggcgtcattgacgacgctatcggcaccaagaagaccatggtcatgttcggtatctggtatgctatcgccctgctgctcaacttcaccgctgtggattccgtgaccccgctggtctacgtgtccctgttcatgattgccatgggcatcggcggctccgccaacttcaccacctccctgcccacctccatctttggccgccagggtttcgacaaggtgaacagtgtcatcttccccatccagggtgcagtcactgccctgtgcttcctggtcaacggcgtggtgcagaagattaccggcggccagatccgcatggcctacctggtgttcgccggcgtggccctggtgaacgtgctcctggtgctgatggtcaacgagcacaagtacaaccgcgactggatggcggcccacaagaagtaagctgcaccgcttctgagcctctcccaaaaaaagctgtccccgcagccgcggggacagctttttcgttgcgccccatgccccattctgctatactgatcttatctgagtgaaacgaggtggcggcatggcggaagaaaatggcctggtgcagatctattatggagacggcaagggtaagaccacagcggccttcgggctggccttccggtgtgcgggctgggggcggcgggtggtgatcgcccagttcctcaaaagcagcccctgcggggagctgacggcggcggagcggtttcccaccctcaccgtcctgcgcagcaagggcatccacaagttcaccttccagatgaacgacgaggagaaggccgtggtggcccggaactgccggaagctgttccaggaggccgttgccctggcccgggcggaggatgcccgcctgctggtgctggacgaagtgatcgacgccctccggggcttcctgccccaggaggaactctgcgcctttctggacgagcggcccgcgggcctggaggttgtgctcaccggccacagcctgccggaggcgctggagcgccgggcagactacatcacccacatggtcaaagagaagcacccctacgaccggggcgtaaccgcccgcagggagatcgaattttaacccggcagcccccggagtgaactccgggggctgctttttattacgcgcaaaagcggtgcttgccgatggtcttgatgagggggcggctccagatccacgcactggtggccgtgtccgggttaaaatagtagatggctccgccgctgggatcggctccgttgagcgcatcttgggccgcccggtaggccgagtcggccaccggctcgttgaactgcccgtccaccatgcaggtaaaggcccccggctggtacaccaccccggcgatggtgttggggaaggaggggtgctccacccggttgaggatcaccgcccccaccgccacctggccgctgtagggctcgccccgggcctcggcagagatcaccctggccagcagcgccgcgctgttctgctggctgctgctccccccgcctccagaggacatgcccagcgccttgagggtggccggcccggcgatgccatcggcggtcaggccgttcttccgctgaaagtatttgaccgcctgggccgtctgactgccgtagatgccatccaccgcgccgtcatagtagccccaatttttcagcttggtctggatgatccgcacctgctcaccgctggagccctgccggtaggtggccgcctcggcctgctgggccagggagatcaccgcaatattcaccacaaacaaaagggccagcgcccacgccagccgccgcttctgcgtcatgccttcgcctccattcctggcaatagtgtacggcggcaaacgggcggatatgagcggcaattctttccggccgccggaataggtattctaaaaagcggccatactggaagaaaacaggaaaggatgtgtcccggttggtgaaaggtgtgtccaggcaggtcatcgtggtcaaagcgcctgacccccgcttttttgagcaggcgatttttattttgaaggaggacgccttcggcagaggcgtgacggcggacgatgtgcttcaggaagcccgccgggtggctgacgggtatatccgccgcaactcccgctggagccgcctgtggcggcatatccccgcccccgcctacgtggccgccggcgccctgggggctacggtatgctggtgcgtggccctggtgctgtagaaataggccgccccggagcaaatggctccggggcggttccgtttgatttttgtgctggtcagcgggcgatgatgacgcggatgcgcccgccggcgctctcgtccttgtcgtaccagccggtgagggagtagtcccctccgctgatgcgggccaggctggagagctgatactccccgccctcatagacgtacaccgccacattgtctgagagagtgtacttctggttgttggtgcccacggcggtgctgccgctgacgctgtccagcttgcgctcggacaggttatacagccgctcgacggcgttggggccctccattttgatctggcagggacctaccttcagattgtagatggcgttggtagagccaaaggtgagcttctggccgcccacgtcgtaggtataggaggaggaaatgcccatcatggtgcccagatccaattcctccacgctggtaatgacgccgtactggtgaaggtcgccggtcacgtcgttgaggatcagatggctgatctccccctgggcgttgagggcatagaagcggaccatattgccgtcaaacttcacgcccttcaggcggtcgggatagatgcggatgggggtacagctctcgtaggtgtccagaatctgcacgtcgtcagccagggggtaggtgcccagcttagtgccgtcgttgctcatcttgccggtcagggtggaggtggtcaggcgcttgacctcgatggtgtcgccgtcggtattcacccgcaccagatcgccctcgtccaggctcttattgtcggtctgatagcggtaggagccgccgtcggtaccggccacggtgacggtgcgggcgttgtaggtgccgccctttccgtcgtcgtaagaggtgctctccaccttggtgacgacgccgtagatgaggttgtcggccgccacggcctcgcccactgccgccacgccgccgctgcggcccagcagcagggtcacgctgtcgccaatctggtagccgcccaggtcggagagggcataggcggcggaggtggtctcaatggtgtagctcttgcccgccacggtgacggaggtggggctagtgaccgagggagaagccgcctcataggtgccggtgatcttgtcggagtaggcccacagggtatgcatggactccgaccagtacaccacgtcctgattctgcaccgcggccaggctgctcttggcgccgttgcggtagaccgtggcgctgccggcgtcgaagggcacgctggactgccagccagcggcggccaccacggggccctccatagcggagttgatgagggccacccggtccagctccccggcggcattcaccaggctgagggtgggctccagcacgttcaggtagtaggagccctccttgtttttggtgatcatcaggttgtagaacaggtacagggcgtcccggcgggtcatggcgctgtcctgtccggcggtgacgccctcgttgagcttgagggcccggtactgggccatctggccggagggccagacgccggtgaagtcactgtcctggtagcccagcaggcgcaggacgatggtcacgccctcggccagcgtaatggaacggccggggttgaagttgccgtgcagatcgccctgcaccagccccagatccaccgccgccttgatatagggagcggcccagtggctctgaggcacgtcggggtagggcttgacggacaccgtgtcgcctacggcgtcccggctggtggaggcggccaccgccagcttggtgaactcggccctggtaacggtggcgcccaggttcaggttgccgctctcgtcgcccaccataatgtccagggcggccagcacctgggcggcctccccctcggccggcgcggcggccagggccgccggagccagccccagcaccagcaccacggccagcaggccggctaacagtcgttgtttcattgcttttctccttctcatgctcgtgaaaatggaaacggcgggccggcgggagcgccggtccctgcctcttatcatataccatccgcgccggttcggcaagggcgggccggcgtaccgtcaatcatagcgcagcgcgtcaatggggttcagctttgcggccttgttggcgggcaggtagccgaagagaatgccgatgcccacgctgacgccaaaggacaccgcaatgcctccggcgctgggtacggcggagaagccctccgcaccggccatcacaacgcccaccagggcggtaaagacgttggccagcaccacacccagaataatgccgatgacgccgccgatggcggaggtggtacccgcctcgatgataaactggctgcggatatcccggcccttggcgcccagggacttgcggatgccgatctcccgggtgcgctcggtgaccgacaccagcatgatgttcatgatgccgatgccgcccaccaccagggagatggcggcgatgaccaccagaatggtcatgagcacccccagcatggagtccatcatgtccatcatctccgcggaggtcatggccatgtaggcgttctcatcctggtagatgcggaacagcaggctctccaccacgcccttggcggcggaggaggtctccttggtggtgctggtgaccaggtacatcttcatgcccatgcccccgctggcggcgttgagctgctccaccatgccgtagggcaggtagatgaggtcgtccccgctgccctcggtggaatcggccttctggaccagtgtgccgatgaccttgtaggggacgcccccgacggtcagggtctggcccaggccgtccccgccgaacatatcctcgttgaggtagctgccgatgacgcacaccttctggtcccgctccacgtccacataactgaggaagcgcccctcctcaagctggtcgccgctggccgtctggcccttttcggcgttgtaaaaggtctcgctgacgccgtacacgctggtgtggtcgtactcgtcggcgccgcggcgcacggtggtggaggcgctgaggtaggggctgacggagtcaatgtactgggggtacttctccgccagggcgtacatgtcgtccggccccacctcccggtttccgccgtaagagtagatggccacctgaatgagattgacgccgatctgctcaaactgggcgttcatatactgctgcatgccattgcccagggagacgatgacgatgacggccgccacgccgataatgatgcccagcatggtcagcagggcgcggaccttgctgaccatcaggctcttgagggccaggcggaaggattggctcacattcacagcgcgcccacctcctcgtccagctccggctgtaccacggcctttgggtcgtgggcatcaccgtcatagatgatccttccgtcctgtaggcgcacaatgcgcttggccttgacggcgatggagttgtcgtgggtgatgagcaccacggtatccccctcggcgttgagcttctggaggaagcccagcacctcccggccggtgcgggagtccagggcgccggtgggctcgtcggccaggatcaccgaggggttgcccgccagcgcccgggcgatggacacccgctgctgctggccgccggagagctgactgggcaggtttttgcacttgtccgccagccccacccgctccagagagcggatggcccgctcatggcgttcggcagcggacactccggcgtagaggaggggcagctccacgttctccagcacgttgagcttgggaatcagattgtactgctggaagatgaagcccagcatcttgttgcggatttcggcctgctggtcgtcatccatggtggacacgtccacgccgcccagatggtaggtgccggaggtgggcacgtccagacagccgatgatgttcatggcggtggacttaccggagccggaagagcccacgatggccacgaactccccggggtccaccgtcagggagatgccgtccagggcgtggacggtctcctcgcccatctggtaaatcttgtagacgtccttgagttcaatgaggtgttccatggcttaacccatccccatcgcactcatgaggctggagccctgggggctcagcgccagcaccacttcgccctcctccaagccgtccacgatctcgatgtactcgtcgtcgttgcggcccagggtcacctggcgctcctcagcggcggagagatccttgatgacgccgttttcatccaggcagccctccttggccaccagcacagtgttaccccgctccaccgcctccaccggcagggcgagcacgctgcccacctcctccacgataatcttggcggagacgttcatgccggggtagagcgcctcgggggagccctccaccttcacggtaacgggatagctggtgtggccgctggtggtggtgccgttgatgttgatcttatccaccacgccggtgaagctctggtcgtccagtgcgccggcagtgatctccaccttctggcccacctggatcttgctgatgtccttctcatccacgtccatgtcaaaggtgagctcggagcggtcatagatgatggccgggtaggtgacggaagcgccggaattggacagaccgctgatgttgtcgcccacatccaggttcttctcgatcacctcgccgtcgatggtggaggtaatggtgtagtcctccagcttctcctgggcgttcttcagggagagctgggcgttttccagagcgatgcgggcattctcaatctgggtctccaggtcggcctcagagataacgccgatcacctggcccttggacacccggtcaccctccttgacattgagcacgtccagatcgccggcggccttggccgtgatctgggaggaggaggcataagtaaagctgctgccggaggcgcaggccgcccctcccacggaggcggttccctggctggtttcagacaggacgccggggttgttgaccaagatggtcacctggcggaccagggtgccgccgggtcccacctcgtcggtggcggcgatggactccaccgttccgctcaccgtctcggcggtgccgttcacggtgacggtcgcggcctgacccacatagaagcccgacgcatcggcggagtggaagggcaccttcagcttcatgtgatcccggtccagcacgtcggcgatgacggtgccgacggtgacgctgtccccgcggtccacgtgcagctcggtgatcacaccggcgtcgtcggccttcacattgcggtccttctgattgtcgctctgggtcttcagcaggtcgttgagggccagttgggcggactggacgttgagctggagctgctcgatgttgttctccacgtcgctggcgtcgatgcggaagagcacgtcgcccttgtggacggtctgcccctcctcaaagggggcctccaggatctcgccgctgaccagcgtggtcaccttgtaggactggatgggctcgatggtgccggtgcccgagacggccaccgtcatgtcgtgcatcgcggcggtgtagggcaggtacgcgctgctgagcacctgggttcccgcactcatgcagcgggagagcgccagcaccagcagcgccgcgatcaccaagaggatgaccagccgcttgacccacttccgcttcttcttcgggggcgtgagctgcgggcttttcttccccggcccctccggaggggcgaccgtcgtttctggcttaacttgggttgcttccatagtggtttctccttttctttgctatgcttcttcgcggcggaccgccttggaggccgcgccccgccgaaggatgccaaatacacgcatcagacgggcccgcgcgcccgccggatcgcttgaggccccggccgctaccagtgtaccggctacggcggagaccagcaagtggaagatatcggaaaggtcggtctccgtgcgcagatccagtcgggacaggtccaccctgtcccgcaggcgagccaggctcgcctcaggcccctcccggttcagcaggaccccgggctgcatctgccggttgcagcggagtatgtccgccatctcgcggtatttcccgtccccccaatgggcctgaatgtggtcaaacaggtccaggaaggcggcaaagaggtccccctcccgctgctccagcagctcccccatccggcgctccagcagtgcgccataggagtccatcaggtggccgaacagctcctccttgtcggtgaagtacatgtaaaagctgccccgcgggatgccggcggaccggatgatccggttcaccgaggcgctctcatagggaacgcgggagaactcctccctggcagcccgaagcaggcgctcccgcttctccgccggcagattgtaaaacgtcgcgctgggcatagggcacctcctcgcctgacaagctgtcataagcttagacgacaagttgtcatatgtcaacgcctccggcaaaaaattcgcagttcgttcatattttccagataggctaccagcataccagaatcctatgtaagacgccatgaagagaagattaaaattttcttaaatcttaaaccgtctctctttcgctctggcccctcttctgctcatttgagacatggcatcctgccgattctgcaacttttttagtctcatcgttatcaccaacaatttgccgttagtaacacagcaagcccccgctcggcgagcgggggcttggcttatttgtctgtcgtatcctgtccccctagcttgtcccctgctccgtccacagtggac

SEQ ID NO: 4281 - DNA, 1281 bp, Unknown
  gut microbiota DNA sequence
cagcgcttcatgttctgtgccttcccgctgcgctggtatatgggcgacggcaccatcgtccgcgccgtggccatgatcgacgaggacaagatcaataaggacgttcccgatcgcgtttacaagtacggcgtgtattgattttgactgcgcactcaagaagacctgctgcatgaatgcagcaggtcttttttcacttcccaggctccccccggaattcttatgaaataccggatgctccagaactgctttatccgcctcagtctgttccggtacttcctcatgcagtgctccattatcagctttatgtgtactctaatccgggtctatcaatgtgtttagactgtactaggtggtactcgaatcaacggagatgctgctccaataccgcccccacagttcccggccctcctgggtctctctggtgtgttgtactatgcaggtatagacgggctccgcagccagccagccccgtcgagccagagcttttagacaggctcccagcccgtcatgtgtaaacttctcccggtacttgtgaatcatctcatccgtaatgcccatctgcctgatcaggatttccgcatagcccatgccattgggaagcacacggtatctattttctacccgactcccggcacataacagtccgccgggtccatggggccggtggttaggttctgtttcccggtcagtttctccatcggttcgtcataaacgagccgaaccgcggcccgttgtcgtacggataagttatttttcggcccagtgtataaaaatatccagaaatattcctcacttaatgagatttagagtttctatttaataaatgtctctatatgaaataacaaaatagaaagctgagaacagcaaaaatatttagaatttttatttctctttttacaacggaatatatcaagttatatagattggttccttaatctcactgagctataatttgcgacaagaaaactcttctttgtatatattaggacataaactgctaaaatattcatgtttaaacttcttccacataataaagggggaatgtaaaattacatcccccctttttgatatgcctggctccttattgcacaggtggcagacatccagtatgaatttttgacatgctatagcatcgaaaatatgattggcagaaatgcaaaatattaaatttaggacgccgccgggacggcaatgaactaaaattttgcaatttaaggcaaaaagaaaaaccctggaaccattgaagttccagggtttcttatgaagtgccagatcaatctg

SEQ ID NO: 4282 - DNA, 208 bp, Unknown
  gut microbiota DNA sequence
tgaaactggaatttgagtacgggcagggcctgctgggcgcggagctgcccgacagcacggacatcttcatccccggggagacggtagcggatcctccctgtctgccccaggactgggacagtctgtacgccgctaccctggcgtccatccgcaaccccatcggcatgcccccgctgaaggagctggccgggccgggcaagtcggtggt

SEQ ID NO: 4283 - DNA, 3611 bp, Unknown
  gut microbiota DNA sequence
gacgctctgcctcctatacaaagcggcttgccaagatctcggaagttctgggcacctcggtggagtatttactgactggtgaaaaaaaagagcccgcccccgctccgaagaatggggacgagctggaccgtgacaccatcatggcggcattcatgggtggggacatggatatgagccccgaggagagagacgccctgtgggatgacgtgtacgaatacgccagattcaaggccgagcagtggaggaaaaagaaagaccaggaatgaatctttatgagctctatgattttgccgtggatcaggggattgatgtagattggtacaccatgcccttcgccaagtccttctcgattttcattccatcgcttgaccggcgtgcgatcgcgctggacccgtggaaattcgagactgtagcagacgagttcaccaccctgggccacgaggtcggtcattgtatgacctacagcttctataaccgctgggcggcctgcgatgtaaagaaaaagcatgagaaccgggccgacaagtgggaaatcgagcagttccttcccctggacgctctggaggccgccgcgcacgaaggctgcacagaggtctgggatctagccgagcgtttcggtgttactgaggatcttgtccgcaaggccatctgctggtataagcatggtaaccttgcggtggatcaatacttatgaatgtgtccaacttggacacatttacattggagaagaggagcgcagattatggactttatcgatcagttaaagcaattttcaaagcgtgtcgagagcatgaaggactccattcagaccgaagaggctacgaagactgcgatcattatgccttttttctccatgctcggctatgacgtgttcaatcctcaagagttcgtccctgagtttaccgcagatgttgggataaagaagggtgaaaaagttgactatgcaatcatcagagatggtcagcctgtcatcctcattgagtgcaagtccatttctgaaaatctggatcggcatgactctcagctcttccgctattttggtaccaccacagcaaagtttgcaattctcaccaacggtattatctatcgcttctatacggatctggacagcccaaacaaaatggatgatgatcccttcctgacaatcaatattttggacgttcgtgagaaccaggttcctgaactcaagaaattttcaaagtcggtctttgatattgattctatttttagtacagcatctgagttaaagtacgtccatgaatttaagcgcgtctttacggaacaactggatacccctgcggatgactttattcgctttttcctccaaggctgctactctggcccaaaaacacaaaatgttattgaaaaattccgtcctgtccttcggaaagccctcaatgacctcatcagtgagatgatgaacgataagatcaaaactgccctgggcggctccggtggaagtgtttccgttatcgagcaaaagcccgttgacgatattccttctccttctgaagattccgtcgagcaagagaagcgaatccccaatattgttacaacggaggaggaacttgaggcatttttcattataaaaaatttgtttgcagaccttgtggacatccatgagattacatataaggataccgagtcttacatcaatatcctgtataagggcaacatcagaaaatggatttgccgtcttcgcctgacagacaatcaaaaaaccttgattgtcccggacgaaaacaaaaaagaacgtaaatttacactatctgatatttatgaactcagaaattataaggacactctgaccgaagtactgcaacgatatctataacggcaaagggtccgtataagcgtgtccaatttggatacatcttacctttcaacccgtgttgacattgtgcgcacatatgctatactatacacaaaggagatgatagtatggcaaacatcaacatccgcattgatgacaacctgaagaaggatgccgagaacctgtttaatgaccttggcctgaacatgaccaccgccaccaccatgttcctcaagcagtgtctgtactgccacggcctgcccttcgaggtacggatggatcccttctactccgccaccaaccaggcccacctgcgccgggccatcgccgatctggacgctggcaatggcaaggcccacgagctgatcgaggtggaggatgaataagctgtggcaggatgaggcgtgggcagattatctctactggcagcaacaggacaagaaactgctcaagcggatcaatcaactgctcaaggatatcgaccgcagtggctatgacggcatcggcaagccagagcctttaaagggagacctatctggctggtggagccgccgtattgatgacacccaccggttggtctaccgcatacgggacgggcgcattgagattgcccagtgccgcacacattacggagaatagcaaagagccggggccacggccctggtctcttaaaacgcctagaatcgaacatttgtattatgccaaggagtaaacgccatgaaaatcaccgtaatgcaggtcaacaatgaactcgccagcaccggcgtctccgtctacgtggacgggcagcccctgggcagtatagggcccggcggcagcgtctctgcgtcgctggaggcccctgcctgccgcctcctggtggagtgcggggtctacagccgggaactcattttggggcaggacagcgccctgcaagtctcctggggcctaaatccgcccgagatgattgtcagccatgccaaaaaataaggggggctactcatgcgacgtgcaaacggcaccggctccattgtaaagctctcaggcaaccgccggcgcccctatcttgtgaagatctccgccagggataaagacggctatgtgcgccaggtggcgctgagctaccacgccaagctccaggaagcccaggaggcgctggaggagtataaccgcaaggctgccgccgggcagacccccagtgcggatatgctctcctggaccgtggaacaggtctataccgcctggtcggagcgggagtaccccaggagcgggaaatcctctgttgcctcccacaaggcatcctggaaccagcgtgtctctcgctacgccgcccgtaaaatgcgcagcgttaccctggacgagtggcaggccatcctggacgagggtgaggacgagggccgctcccagtccagcatcaataacgatgcaattttgatccgcgcattgcacgcctacgccatgaaacgtgatattattgggaaggattactcccggtatttagatatccccaccgtcgacatcaaggtcaaaaagggggcgctcaatgatctccagcttgccaaattggaggagctggcgagggccgggtttcccggcgcatcagaggccatggttctgtgctataccggcttgcgtatcagcgagttcttgtcccttacccccttcgcttacagctccgaggatggcggctacctccagtgcggcgtgaaaagcgcggcaggccgtgaccggattatcccgatccaccccaagatctccgtctacgtgcaacaatggctgtcagcggaaaaaggcatgtcctccgaccgttaccgcatct

SEQ ID NO: 4284 - DNA, 3680 bp, Unknown
  gut microbiota DNA sequence
tgctgctctggccggctatgccttgggtaagaagcggttctacggccgggccatcctgttcaccattatcatctgcgccatggctctgcccaagcaggtcattgttatccctctggctcaggagatgaagctgttgcacctgagtgacaccttgtgggcggtcatcctgcccaccgtgggctggcccttcggtgtcttcctgatgaagcagttctctgagacgatccctaatgaaattctggaggctgcccgggtggacggcgccggggagctgaagaccttcttcagcgtggtgttccccatgatcaagcccggcatcggcgctctggccatttttacctttgtcaatacctggaatgactatttccttcagttggttatgctgaccagtaaggagaagtggaccctgcccctggcgattgccaacctacagggcgagatgtcctccgacttcggcctcatcatggccggtgctgccctggcggccatccccatcatcgtggtgttcatcgcgttccagaagtactttacccagggaatagccatgggagcagtcaagggctgacgcgccgctcgtgctgcccctccgctggcacagccagcggagcctgcgctacaaatgtgccgccaaaagaacggagcctctataaaatgagattctgattgagaagagagaaggatactatcatgagcgatttgaagaaataccacggtgttatccccgcgttttacgcctgctatgacgaggaagggaatatctcaccggagcgggtgcggggcctgacccgccacctgattggcaagggcgtaaacggcctgtatgtgggcggttcctccggcgagtgcatctatcagggcgtggaggagcgcaaggtggtgctggagaacgtgatggccgaggctaagggcaaggtggttgtcatcgcccacgtggcgtgcaacaacaccgccgacagccaggtgctggccgcccacgcggagagcctgggggtggacgccattgcctccattcctcccatctacttccacctgcccgagtacggcatcgcccagtactggaatgatatctccgccgccgcccccaacaccgactttgtcatctacaacatcccccaactggcgggggtggccctgaccacctctctgctgcgggagatgaagaaaaacccccgtgtgatcggcgtgaagaactcctccatgccaacccaggatatccagatgtggcatgacgaggatctgctcgtttttaacgggcccgatgagcagttcatctccggtctggccatgggcgcctgcgccggcatcggaggtacctatgccgttatgcccgagctcttcctgaaggtgtatgagcacttccagaagggtgagatggaggcggcccgccagatccagaatgagattgaccacatcatctacaagatgtgctccgcccacggcaacctgtacgccgtacagaaagcaattttggccaaggacggcgtgccctgcggctcggtccgcaagcccatgcccgccctgatcgacagcgatgcggctgtagtggacgaggcccacgctatgatcgccgccgccgtggctaagttctgctgatccattggaacgccccaggggcgggcgtaggctgcgcccgtcccactctgtaaagataggagatggttgcaatgcgcatttatcaagccgaaaactacaaggccatgagccgccgggcggccaacattatctctgcgcaggtgatctacaagcccaactgcgtgctgggtctggccaccggcggtacccccgtagggctctatcagcaacttgtggagtggtataagaagggcgacttgtccttcgcggagacccgctccgtcaacctggacgagtacctcgggctgtccccccaccatgagcagagctaccgctatttcatgcaggacaatctcttcgaccatattgacatccatccggagaacacccacgtgctcaacggcctggccaaggaccccaatgccgagtgtgcggcctataataaactcattgcggagctgggcggcattgacctccagttgctgggcatgggccataacggccacatcgccttcaacgagcccggcgacgacttcggcctggagacccacgtggtggatctgaccgagagtaccattgaggccaacaagcgtttctttgagagccgtgatgaggtgccccgccacgccctgagcatgggtatcaagaacatcatgaacgcccgccgcatcctgatggtggtcagcggcgaggaaaaggcggacattgtctgcaaggcgtttacgggccccgtgaccaaggaggttcccgcctctgtgctccagctccatcctgacgtaactctggtgggcgacaaggccgcccttcacaagctggtggaagcaggtgtgaccgtatgcggataaccggcgctcaagtgttcgacctgcaggagggctttgtccagcgggacatctgctttgacggccgcctgctctccggctccagcgcggacggaaagacctatgacgcctccggctgctatgtgatccccggtctcaccgacgtccacttccacggctgcatgggccgggacttctccgacgccgaaccagagggcctggagattatggcacaatatgagctctcccggggggtcacccagatctgccctgccggtatgaccctgacggaggagcagctcaccaagatctgtcaggtggccgccgcccatcgggccgccgataagcccggcgccgccctctgcggcatcaatctggagggacccttcctctccatggccaaaaagggcgcacagaacggcgcgtggctccacgcccccgacgtggctatgttccgccgcctgatggccgcctcccagggactggtcaagctcgtttccattgccccggaggagccgggggccatggagtttattgaggcggtggagggagaagtcaccgtgtccatcgcccataccacggcggactatgacacctctatggaggctttccgtctgggggcccggcaggtgacccatctattcaacgccatgccggccttcagccaccgggcccccggcgtggtgggagccgccctggacacccccctgtgcaatgtggagctcatctgtgacggcgtgcacatccacccctcggtggtgcgggccgtgttcaagatgttcggctccaagcgggtcatcctgatttccgatactatgcgggccgccggcatgcctgacggcgactataccctgggcggtcaggccgttcaggtcaagggcaaccgggctaccctgagcgacggcaccttggcaggctccgtcaccgacctgatgaagtgcatgaagaccgctgtatccttcggcatccccctggcggatgccgtgcgggccgccgccgtcaacccggctatggccatcggcatcttcagccgggtgggcagtctggagcccggcaagcgggccaatgtggtggttctggatcaaaatctagacgtcaaggacgtcttcttccgcggcgagctggtcagccggtaaacgtgcgccccaaaattcaagccttccgaccctactccattttcatagggcggaggagcggtcaaaaaggaggaacacccgccgggccggcggtgcggcagtgtggagacctgccgtaacgtccgcagagtgacgctctctgcgggcaaga

SEQ ID NO: 4285 - DNA, 26920 bp, Unknown
  gut microbiota DNA sequence
ggggatgaagatgtccgtgctgtcgggcagctccgcgcccagcaggccctgcccgtactcaaattccagtttcacaaaatcacctcttctaatttacgcaaatttgctttaagaaaagttaagtttattcctaatactttttatgactatataatattactaaattgcaccaagatattaacacactatatcattaacttcaacaatattactcaaactttggcacccgtttttaagcaatcgattgttttttgtgctaattttattgatttaatacaatatggagtagtataccttttacatattgcacataatataaaaaattttacaaatatcttgccacttggcacgagagttcataaaatttcttaagtgtatctcttgttttactcaaaatttgtgttaaaataataacaaattattcaaacagggaggcgtatcatgacactcaaagaaattgcgaaagaagcgggcgtttccatctccactgtctcccgtgttttaaaccagccaaacaccaaagcggccagcgctcaggtacaggagcgcatctggaacattgttcgaaaaaccgggtatgtccccaatccagtcgcacgcgagctccggcatgctttacagcccaccccggttatgcagtctatctacggattaattgcctgttcacccggggaggtacgggatgacccctttttcccccgcattatctccagtattgagcaggaagcatttcaaagcaactttgtactgaaatacacctattccatgctggaatttcaaactccggcggcagcacgccagtccgggggctgcgactcagacaacctgatcattgtgggacggtttcagccctcgctcctcacctccatgaaaaaacgattccgcaatattgtctatgttggcctcaataatctggaggctgaatgtgaccaggtactctgtgattgtttttttgccgttcgggataccgtacgctatttttatgaccggaatcatcggaatatcgcttttattggagcagagcaggagggacgctaccgcggctatttagaagggctccgcctatgcggcctgcccccttgtccggagcatctggttcaaatcaatacgctctccatggacggcggtcttcagggtatgaagcagcttctcagccagaaccgcaacattacagccgtcatctgcgccaatgatatgaccgctatcggcgcgcttcgggcctgcaaggagttgggcgttcaggttcctgacgaaatttccattattggaattaacgacattccaaacgtccgctatgtccagcccaaaataagcagcatacacgtccctttggatgaaatgggcaagatggcagtccgtaccctagccgaccgaatcaatggcggtcaccaactgcccgttaaaattagcttgccctaccatatcgtcgaacgcgccagttgcatgccctgcgccagaccttccggaaacatgcagacgtaactgcgcgcaacatatctccccgctccgacgcatatacatgccccgtgagaatcattgcggggagtgttgctgtttgaaagggaacatcgaggagcgcgcctgccagctggcgctttacatcatagagaacaaagcgacggtgcgcagcgcggcccagaggttcggcatcagcaaatccacggtccacaaggacctaagcgagcgtctgcccgcctttaacaagcctctttacctccaggtcaagcaggtgctggacgaaaataaagcggaacggcatatccggggcggtatcgcaacccgcaaaaagtaccggggagtcacctaaaaagcagcggcgcacgggtatccgtgcgccgctgtagcctgtcaaaaaagtccggccggacttttccgacaggctgccggactttttgatgtctcaaaaagtcattctattttacgcgaaagggaaccctgacggttccctttcacactttccctccctccggcgcctttggccggaggcattatatgcaatcgcagcggcgcacggatatccgtgcgccgctgcttctatcatccatttatctaaattctgacgtcttaccagccaaagggccagggaaaatagccgccattctgctggggctgctgctgttcctgctggggctgctgctgttcctgctgggcctgctgctcctgataatccttctggagctgctccatagcctcctgggtggtctggttatcctcatccagggtgatctcaagctccactgtgtccccgtcccggtaaacggagaaggtcaccttatcgcccgccttacagtcctggacggcggctttgagggcctcgctgcccgacactgcagtgccgttgacagcggtgataatatcgcccgcctggaggccggccttgccggcgccggagccgtccaggacagccagcacctccgagccggcgggaacgccgtactgctgggcctcctggggcacgtccttcatcagaatgcccacgttgggtttgccggtgacgtagccgtgctcaatgatggaggtaaccatatccttcacgtcgttgatcgggatggcaaagcccaggccctccaccgaagcctcggagttggagctgctggacagcttggcggagacgatgccgatcacctggccgtactcgttgaacagggggccgccggagttgccggagttgatggcggtgtcggtctggagcatgttcattaccgttccatcgctcatggtgacggagcggtccttggcggagacatagcccccggtgaaggtaaaggtcagctcgcccagggggttgccgatggcgtacacgtcctcgcccacgttgagctgatcggaatcgcccagggtgaccgtctggaggttgcccacgtcgattttcagcacagcgatgtcgttctccttttcaccgcccaccagggtggcgtcatagctcttgccgtcggagaaaaacaccttgatgtcgctgacgccgtcgatgacgtgataattggtgaggatgtagctggagctgccgttgctgccgatgacgaagccggagccggatacggcgttcttcaccgtatagccgaacacattggtatccacattgccgttgacgcccaccgtcgcgcccaggttggcggcgtagatctgctcgggtgagaggacggtctgcccgtccacatgggccagggatacgatgctgttgggggaggtaccctggtaaatagtggtctttcctccgctcagatggctggcggccagtacgccgccgccgcccaccaggccgcccaccagggcacagcaaaggcccagggccacaaacctggccgccccgctctttttcctggggggcttgggggactcagcgtcccagacgtgaaaatgctcggtctctatgggctcccgctcctcagggggtctgttatagtcactgttatacataactggtcactcctttgacgggttcatttcttttaacggtacatagaataaccgcaaattatgtataaagcgtgaagaaaatttgcatgttttttaaattccgcataaaacttcatgcgcacagggcgcaccagaaagcgatgcaaaggcttagggcttatttgaaaattggcgatgtgcccagcggcgaggaatttggggccgctggcaagcaattttttcgcaggaatcctgacggatttcaaggaaaaattgcgccgtccagcggtcaaaaggcccgtcgattgggcatgttgacatttttcaaacaagccctaggtgcacgaagtgtttgcgcacgtgggccgttccggcccacgtgcagtcatcccatggccgtgccgctgtaagcggaacatggccaattttgctatgcgtttgcatagcaaaagccgccggctatgccggcggctctgttaggcaggctcagatggggagggccttggtcagggtgaccgcccgggcgccggggccgatgtggcaggccacggagagggagagggggtccatgtggatggggtagccgggaaaggccgcctccagctcctccagccactcctgggcctcctcccgcgttccggtgaaggcggcggcgatgtgaagatcctccggcccgcggcagccggcaaagtcggtctccatcaccctgcgggcggtgtccagcatggtcttcttggcggccttccagccccgggccttggcaaaggagtccagcttctcgcccttgatgcgcagcaccggcttgaggttgagcaccgtgccgatggcggcggcagccggggtgcagcggcccccctttttcagatacttgagggtgtccacggtaatatagatgtccgagtcaaacttggtctgttccagcagcgccttgatctccgcggcgctccgacctgcggcggccagggcctgggcgtccagcgcagactgccgcagggtgacggagatgcgctggttgttgaccacctgtactcttccgccgtagtcctgggccagcatcaccgccgtctcgcaggagctgctcaggccgctggacatggggatgtaaaccagctcgtcatagtccttcagaatccggtcccacagctccagcacgtcgccgggggcgggctgggtggtcttaacgtcggccccctcctccagacgctggtaaaactgctcctgactcagggtgatgtcctccagaaagagctcgtcgttgatgtaaaagggcatgggcatcacaaagatacccagctcccggccctgggcctgggttatgccgctgttgctgtctgtggcaatggctattttgctcataaagaacctctctcccatcgttgcgatgtaggtcttgttcatccccgctccggtgcgccgcgccggaagaactcggccacccggcccagtgcgcggagggtgcactccgcctcctcgtcggtcagtccgtccaggacatgggccaccatctgccggtgaaagtcccggtggcgcgcgtcggcggcccggccccgctcggtcggcagcaggtgtaccacccgcttgtcgcgttcatcccggcggcggagcaggtacccctttttctccagcaggtttactgcggaggtcagggtgcccgctgtgatccccagggcggcggcaatggcggtggagcggttgtccccgccctgatccaccgcccggcacacggcgtcgatcaggtgcagctcccgcagggagaggtctttcccggccagacaggcggcctccgccttcaggatctggccaaacacctccaccagaaactggttgagcacctctccgcggctctccacccggaccgccccctctgcattcgatcgtaaaagcattatatcgaattgactgaaaaagtcaagacaggccctctggcatattccccctgtggggcgcatagagatccatatccgcccccgagggggacatcttacttacaaaggatgatgaactatgaagcccagaattcaatggggccgcctgctccgccgcagtctcgccctctttctggccaccctggcggtatggaccctgctggtgtgcagcggcggaggctccgccgccaatgccttccgcagtctggggcaggaccccggctttgtctccgccgccctctccgcagaactgggacaagtagcggaggacgacggtcccctgtccggcctgagcggctgggcccgcctggtggtggaccagtctcctctgctgcgggggaatggggacgccgtggccggccatctggacggctccgcgcccgccacccccgatctgcccgccgggcagcccgcccaggatcacgacgacatcagcgagccgcctcccgagaccactgccgcgccggaggacatcatcgcccgcaccctggtgcccaccagcacccagggctatgaggtgtccgggagcctgtacctctacaaccgcaccgggctggacgtggatctggccgccgccgcggcagcccccgtaaacattgccctcccggcggaggggccccagattctcatcgtccacacccacggcagcgaggcctacacacccgacggcaccgacatttacgagccctcggacaacaacacccgcactctggacgaaaactacaacgtggttcgggtgggggacgagatggagcgggtgttcaccgagctgggcctcaccgtggtacacgaccgcaccctatacgactaccccaagtacaacggggcctatgaccgctccgccgaggcggtacagcggtacctggagcaatatccctccatcaaaatcgtgctggacgtccaccgggacgccctggtgggggaggacggcacggtatacaaggccgtcacccggatcgacggggtggacaccgcccaggtcatgctggtgctgggctccagcgaggggggagaacaccccaactggatgcagaacctgtccctggcctgccgcatccaggagagcatgaacaccctctatcccaccctggcccggcccatgaccatgcgctcctcccggtacaaccagcagctctccaacggttctctgctggtggaggtgggcacccacggcaacacccttcaggaggccctggccggggcgcggctctttgcccgggcggcggggcaggtgctgctggggctgaaggagtgacgggcggcaagagaaaaggcccccgccggcacacgccggcgggggctccgttttggatgatcagtccagcaccagctccacggggcagtggtcgctgccctccacctccgcgtggatgatgttgtccctcacccggggaagcaggcggtcggacacgataaagtagtcgatgcgccaccccgcgttgttcttccgggcgttgaagcggtagctccaccaggtgtacgcccccgtccgttcggggtagagggcgcggaaggtgtcggtaaagccgctggagagcagctcggtcatcttgccccgctcctggtcggagaagcccgcgctgccccggttgctcttggggttcttcaggtcgatctcctcatgggccacgttgagatcgccgcacagcaccaccggcttctttttgtccagctctatgaggtaggctcggaagtcgtcctcccactgcatccggtagtcgatgcgggccagctcgttctgggcgttgggggtgtagcagcagaccaggaagaagccgtcgaactccgcggtgatgacccggccctcgtggtcgtgcgcgtccaggccgatgccgcaggtgacggacaggggctccacccgggtgaacaccgccgtgcccgagtagcccttcttttccgcgctgttccagaagagccggtagccgggcagctccagtgcgatctggtcgggctggagcttggtctcctggaggcagaccacgtcggcgtccacccgctggaagaagtccagaaagcccttgcccaggcatgcacgcaggccgttgacgttccaggtaaccagtctcatatctctccctcctccggcagccatttcatgggcctgccctcgctgtccagcaggggagtgaggccgccggcatagccgctcaccgtctggagatagagcacccccgtccgggtgtccagcaggatacgggtgatatccgtgatcccctgggtatagatgatctgaaagcggtcgttctttcccatcggtcaggctcctttcttccgcctgcgggcggacatgagcagtataatcccttattcattgtttcatccaactgggcttcggcacaggactcaacctcagtacctccgcaccacggccaccaccttgcccagaatggtacagccgtcgccgtcaataggctcatagtccgggttttccggcataagccaggtgtgtccgtccctgcggcgcagggtcttgaccgtggcctcatcctcaaagagggccaccacgatctccccgctgcgggcgtcctgctgctggtgtaccaccaccaggtcgccagggaggatgcccgcgtacctcatggactccccccgtacccgcagggcgaagtgctcccctgtcagtcctccggtgtcaaaggtcagatagtcctcaatgcactcctgggccagaatgggggctccggcggccacactgcccaccacaggcacctggtcgggctcctctcccgccggctccggcgcgcccgggtgtgggccgctgatggtaatggcacgggtctttccctcggccttggtgatcagccccgccgcctccagccccttcaggtggaagtggacagtggagggggacttgagccccacatactccccgatctcccgcaccgaggggggatagccgtggaggccggagaaggaaacgatatagtcatagatctgctgttgcttgggcgagagcgttttcatggcagaccctccttattggtatactcccaagccagtatagcatagcctgggttaaaatgcaaacatatgttccctaaaaccgccgtatagaggtagttttctcttgcaatctgccgtcgaaaggagtatgatacagatagtatcaaaataaaactaaaaagttcaaggaggagacgatatgggtaagtttaacggcagagtagcgattatcaccggcggcggcaagggcggcggcatcggctacggcctgtccaccgccttcgccaaggagggctgcaatctggtcatcaccggccggaacaccaagaagctggacgacgccaaggaggagctggagcggctctacggcgtgaaggtgctggcctgccaggccgatggcggcgtggaggagcaggtggccgccgtggttcagcaggcggcagacaccttgggccgcatcgactttttaatcaacaacgcccagaactcggcctccggcgtccccctggccgagcacaccaaggagcagtttgaccaggccatctactccggcctgtacgccgccttcttctatatgaagcactgctacccctacctgaaggagacgaagggctccgtggtcaacttcgcctccggcgcgggcctgttcggcaagcccggccagtcctcctacgccgcagccaaggagggcatccggggcatgacccgtgtggccgccaccgagtggggccccgacggcatcaactgcaacctcatttgccccctggtgatgaccgacgccctcaagaagtggcgggaggagtatccggcggtatacgagcagaccatcaagggcatccccgccggtcgcttcggcgacccggagaaggacatcggccgcaccgctgtgttcctgtgctcagaggatgccaagtatatctccggtgagaccatcaccatgcagggcggcagcggtctgcgtccctgacacatccaaacagaggcgcgcctgagatcaggcgcgcctctgtttttccctggcaaagcggtaggcctcggccagccaggccgccagcagcccgtccacatcctccggtgcggtcaggagcagatggtgggtccagcggccgggatagggctccacggcctggaggatgcgggggtgctccacccggcggcccagccccagggtggccagcagagccccggtccgccgctgggcggcccgccggggctgggagagaacggcaaactgaagggggtttccccaggaaatctgggttttggacaccttcatggtgctctccccgcaggccaggacggcctcctcccatgcctcaaagagggaaatggggcccggagcgcctcccaggaaggccagcacttcggcggtcatgtctgcgcctcccccagaaccgagtggttccaccggccggtgcggaagtagaggagctggaggagcacctggatggcggaggccgccggcgcggccacaccgatgtgcagcagagtgacaccggggagcaggctgatgaaaaataccgccggtacccgtaccaggaaggtggatgccaaactgttgaacagggtgaagccggtgcggccgcagccgctgtaaaaaccgttgagggtgaacacaaaggtgaccagaatgcagtcgatgctgtaggtgcgcaggtagagcaccccgtggtagatcacctcggcatcgggggtgaacagccgcatggccagccccgggacaagctgaaccaggacaaacatggcgatgtcggccgccagacaaaacaggataccgtatttcagcccctgccgggcccggtcggggcggcccgcacccatattctgggcggtcatggcggaaatagccgactggaaggcgatggggaagagcatgataaagccggtgatgcgctctaccaggcccacagcggcggattgggccagaacatccatgtggtttacaatggcggtgatgataagaaaagagagggtaaccagcacattctgcaccgccacaggcaggcccaggcggaggatgcgggccgccttgtccccctgaatccgaaaggaacgccgcttaaaatcaaaggggaagtcccggcggcggagtaccgccagggccagggccaggctcaccccctgggcagccacggtggcgagggcggcccccgccgcccccaggccgaacactcccaccagcagaagatcccccacgatgttgatgatgcaggccaccagcacgaagtacatgggccgcttggagtcccccaggccccggagcacgccgctgaccatattgtagccggtgatgaacaccaggccgcaggcgcagataaacaggtactgccgggcgggcgccaccgccgcggcgggcacctgcatcagcgccacaatggcgttggtggacagggcgaaggcggccgccaggaccacggcgatgagggcaaagagggaaaacagggtgccgatggcccggtttacgtcctccccccgccgggcgcccaggtactgccccaccagcaccgtaccgccggtggacaggccgataataaaattggtcaccgcctgcatgacctggctgccggtggacacggcggcgatgcccgcctggtcggcaaactgtcccaccacgatcaggtccaccgcgccgtacagaaattgcagcagggaagcaccgaggaaggggatggcaaagcggcttaacgcccgcctgacatttccctcggtgagagagagctgggacatggcggtacactcctttttgtttcgtacccggacagtatagcacgcccccggcggaaagacaacctttgacgggccgggcggcgggtgttatactgggcacagtcaacccaaaaagaaaggcagatgtgaccttgagcgcgcatgtttccatcgcccatcccgcgtggatggatatcaccggccctgacggggccgtgacccacggggcggatcaggactggtttcccgatctgtggcagcagcgggcgggctgtggacccaccgccgccgccgtcatcctctcctatctggcccggacccggccggagctggcccccctctacccggagggggccatggaccgcgcctccttcaccggcctgatgtgccgggtgtgggagcacgtgacccctgtttcccacggtctcaaccggccggagcagatggcggagggcatggcctcctttgccgccgcccggggcctcactctgacccccggcctgttcgtattcccctccgcccgcaccaagcgcccgccctatgagcaggtcgaggcctttgtccgccgcgccctggagcgggactgtcccgtggccttcctcaacctccacaacggcagggtgaaggagctggattactggcactgggtcaccatcaccgctctggaggacaccacggcggtcattctggacagcggcagcgcactgcgcatcgatctaaggctctggtacgagaccaccaagcggcggggcggctttgtggccgccctgggggacccggcatgaagtattttctgttctgggtgctgtgcgccagcctcctggactttgccctcatgggtgtggacaagtggaaggccaggcacaaccgctggcgggtacccgagagggccttcttctgcgtagccctgctgggcggcacgccgggggccctcctgggtatgtggaccttccggcacaagacccgccactggtatttcaggtacggcctgcccgccctgctgctggcgcagctcgccctgggcacgtggattgcgatacgtgttttttgacctccgatgtgccggaaaggccgcccctcccaacggaggggcggccttttttcacggctttttccccagcttatgcttggtgccgtcgggctccacgatataggtgttttccaactggctcaccaggctggcccggtaggcggcgatatactcccgccgcagccggtcccgctccgccgtctcctccggggtgaggccctcagggcttttggcctttttggccagggcattgatccggtcgatttttgcctgttccattatacataccgctccaatacgatgagaatacgcccctttttggacgggccgcccacctctgtgagcacgcacttgcccagcccccggcagctcagcacgtccccctgggccacggcgtggtcgggcttgacacattcccggtggttgagctgcacccggccggaggcgatcaggtcggcggccttgccccgggacagggagaagccggaggcggccaccgcgtccagccgcagggagctgacggtgtcccggatggttctggtctccaccgccgggggctccagccggtccaggggcagaggggagcacttgagttttacacgccccgcctgctccatgtggaacaccagaaagtcggcgacctcctccagcgccagcacgtcgcagcgcccgtcgcccaccagcagatcccccaccttctcccggtccaggcccaggccaaggatggagccgagaaaatcccggtgggtaagcttttggccgccgctccaggtgcaccgcagggcgcggacgggacagctctccccgtccccctgccagtcctccgcctcctgccagtcgggcaggaaggcgcacacggtgcgctccgctccctcgtacccgccgaagaagaggtggcggggatggccgcaggcgttgagcaggttttccacactcacccgctcctgtggggataaaaagccggtacaggccggtatgttccgctgccgggccagctccagcttgtccagcgcccgggccaggagcagccgctccccgttgtcccgggccagcttattcagcagttccgttttattcacacatacttcctcgcttgtggaaaaagggcgccccgacgggcgccctttccatttgtcataactgtctccgcaaagcgccgctctctctgagtcagcggtgctcgccccggctgtacgccaccaccgtgcggcggttgggctcagtgccgatggagtaggtggtgatgtccggggtctcctggagggcggtgtggatcacatggcgctcataggcgttcatgggctccagggtgacgttgcggcggtatttgaccaccttaccggccaccttctgggccaggcggaccagggactcctcccgcttggcccggtagccctcggcgtccacatgaatacggacccgcttggactggccgtggttgacggcgtagccggtgagctgctggatggcgtccagggtctcgccccggcggccgatcaggccgcccagctcccggcccaccagctccacctgataggttccgttctcgtccacgcggatgacgggtctggcctcggcccccatctgggccagcaggccggtgagaaaggcgtcgatgcgctccgccttctccccctcggccacgggggcggcgggggagggggtctcctcccggacggcgggctccaccgccttgaccggctccgcctcggcaggggtaatctccgccggagcggggcgctcctccggctcgtcgggggcctcatagctcaccttgaccttggccgggcagctcccgatgcctaaaaatccggacttggcccgctccagaatctccacggagacctcatcccggtccatgcccagcttctgcagggcggcctcgatggcggcctcctcgctcttgccggtgctctcgatccatttcagcataatgggcatctctccttatgaatccacggcagggccgttattcctttgtcttgtcggtgtcgtcctcagcctcggactcctcggcgtaggggtcctcggactcctccccggcggagacaacctccgtctcctcctggacaggggcctccagggccttttcctccagaatggcgtcctcaatggcctcgtcggtgtggatctcccgcagcttctcctcgatctcatgggcctcccgcttcagcgcgcgggagtcagatctgggcgggaagatgggggcctctccggggtaggcggtgggaccctcctcgctgtagcggtaggggtcgtaggcccgtccgcgggcatactggcgcaggcccacgcggctgtgctccttgacggagccggggatcttgtcctcgtcttcgtcgtgcttcttctcggtcttctttttcttgcccttgttgagcttggcctcctcgatccggcgggcgcgctcctcggccttgcggcggcgctcctccttctcctcctccttctccaggcgctcctgctcggcccgggcggcggcggccttctcgtagtcctttttgagcagcttgccgcagatgaactcctgcaccatgctcaacaggttctgggcaatccagtacaggcacagggcggcgggcatggagaagccgatccacagggaaatcaggggggaaatgatcatcatggacttcatgctggcgttgttccccgcctgggcggcctgctggttgacggcgttggtcttcatggagatgaaggaaaacaccaggctggaaccggcggacaccacgggcagcaggaacagggcgaagccgcccgccacggtccagaatttcagagttggaatacgggccagatccaccaggcccaggaaatcaaagttgacggcgaaaatccggctgcccacctcgcccacagcggccttgaccgcctccaggttttccggggtgatcagggaggacaggtaaagctggttatagcccacattggagaaagcttcgccggcctccttgatccagccgttgctcaccgcaatggagttccagtccaccacctgggcaatctggttgagtatctccacatcgttgatgcccatcatatacttgatgggctggcggatgatggcgtacaggggaatcagaatcagcagagggagaaaagaccacaggcagccgcccatggggttgaccttctcccgctcataaagcttctggacctccagattatagcgctcacggtctctgccgtactgcttctgcagcttctgcatcttgccctgaagcatgttcatctgaatcatgctccgcttgcccttcagcgcaaacgggaacaggataagcttgacaacgaccgcgaataagatcaatgcgatgccgtaactgccgaaaaaattgtaaaagaaggtcagcagccacacaaagggggagaggataatctgtgcaaaatccatttgcgcgcctccaagttcagtttgagccccttacgggaccggatcgtactcaatggaaacctgcttgtggaagggctgacatttgaggatacggcgcagggcgagaaagccccccttccacgccccgtatttctccaccgcctccagggcataggccgagcaggtggggataaaccggcagcaggggggacgggagggagagatgtacgtgcggtagccccggatcagggccagaagcaggcgcttcaatcaggccccctccttccggagcaggccgagcttgtccgccagagacaggagcgagcgttccaactcccggtaacggctgtgggcggcccgcacccgggccaccaccacgatgtcgtagccggggagaaaggccccctcatggatgcggtaggcctccttgattcggcggcgggtgcggttgcgcaccacggccttgcccagcttgacccccaccgtcaggcccaggcggctggagcccaggttgttcttccggcagtagacggccaggcacggattcaccgcgctctttccccttccgtacaggcggcggaacacgtgattgagtttcagcgaaacggtgtgctccacgcctgccgcctcctcgatttctccgtatgctgcgcaggggcggtgggaaaactcccccgccccttctgaaagccctattccattcgcggacccattagtgggtcagccgggcgcggcccttcgcgcggcggcgagccaggaccttgcggccgttggcggtacgcatacgcttacggaacccgtgctccttggagcgctggcgcttcttgggctgataggtacggaccatgtcggtacacctcctgtactgtaatccggcggcagggccgcccaccacaacagccttccggctgcggtcgtcaaagtaaactgctttacaccatgcaggcctgcacgatgcagatgatattatagcctatctcaaaatagcctgtcaacaccatttttgcaatcttttttgcggtttgggcctgcttccgcgccgggtactacatcttgtgtccattgggcccgcctcggccaacactcacccgtaggggcggggcttgtccccgcccgcctctttcctccccgcccaaacctcccgccggccggccacaagggccgcccctacgcagaagctcggagggtaggcgcataggggaccatagaggtaaaaaacaggccgggcggagcccggcggcatttccggcggagcggggaacagggattgcggcaagtccggcgcaccgcagtccggggcggcgttgcacaggcaagtacagcgcacatgccgccaaattgggtgggtaatccgccgggggccgtcaggcaaagcatcgacacgcgccggccgatgcgggccacaaccgccttcaagtcttgccgccatcgtacaacgtaccgccgaccggctccatggggttccggggccgcagcccccagtcccaagcaggtaacggggaagcagcgctgatcccggcccggtggagaaatctttgaaaaaagagattctttttttagtagtatacgttgctttcaaggcaattttttggtataataaagtgctattgatattttccgaaagaggtggtctttccgtgaatttcccggccgatatctggcccaaggtgctctccctcatggagggggatatgaccgccaccacgatcaacacctggtttgacgacgccacccccgtggcgctggacgccaaccggtttgtgctccacaccccctccaacttcaagcgggacatcatcatggcccgctatctgcccgtgatccaaaaggcgctccacgagctcttctccgccgacttcgaggtggtagtcctgggagagggcgagctggaggacttcggcaagaaaaaaaccgacgatgtctttctgccgggcaccgaggagtacacctttgagcggttcgtggtgggcgcgtccaacaaattcgcccacgcggcggcccaggcggtggccgagcggcccgcccagacctacaaccccctgtttatctacggcgagtccggcctgggcaagacccacctgctgtacgccatcgcccacaagatccaccagaaccacccggactaccggatcgtctatattaagggcgactccttcaccaacgagctcatccaggccatccgtgaagggcgcaaccccgaatttcgggagaagtaccgctcggcggacgtattcctcatggacgacgtgcagttcatcgccggccgcgagtccacccaggaggagatgttccacaccttcaacaccctgtacgaagcaggccgacagatcgtgttcaccgccgaccggccgcccaaggagatgctgcggctggacgaccggctgcgcacccggttcgagtggggcctgcccgtggacatccagccccccgactacgagacccgggtggccatcatcaaaaacaaggccatccggcgcggcatgaacctgcccgacccggtgctccagtatatcgcggagaacatcacctccaacgtgcggcagattgagggaaccgtcaacaaaatcctcgccttccaggagctgatgggggagagcgtggacgtggacaccgtaacccgggcggtgcgggacatgttcaaggacaaggccgacttcctgccctcgccggacatcatcatcgacgaggtgagcaagttctacaacatcgacgccgacgccctccgggggcagggccgcaccaaggacaccgccctggcccggcagatcgccatgtaccagatccgccgcatgaccaacctctccctcaaggagatcggcaaggagttcgaaggccgcgaccacaccaccgtcatgcactccattgaccgaatcgagaagctgactaagaccaacccggagattgccgaggttatcaaggacatcaacgccaacatcaatgcccgctacgaataatcgaccgttctgtccacatttccacggtattttgtgaagatgtggacaaccctgtgtggaaaaatctatcccttcgtcctcatcggtggaaaggcgacaaaaacatccccatcccctgtggaaacgggatcccttcccccccagcggattccgccgtttttccacatcattttcccctacggcttactattacgatctcattctcccctttctccggggattcacgcacactcactacaaaatggaggtcaccaatcatgaaattttcctgcgaaaaagctctgctacaggccgccatctccaccacatccagagcagtatctcccaaaagctccattcccgctctggaagggattctgctggaggccggcagcgacctccgcctcaccggctacaacctggagactggcatccgcaccattgtccctgccgacatccgggaggagggcactctggtgctgggcgcacgcctgtttggtgaaattgtccgcaagctgcccgatgatatcgtcacctttcaatcagaaaactatatggtcaacatcaagtgtggtatgagcgaattcaacattctgggcaccgatccggaagaattccccgagctgcccaccgtagaataccaaaattccctgattctaccgcaatccaggctaaaagccatgatcagccaaacccttttcgccgtcagcgacaacgaaagccgccccatccacaccggctccctgtttgaggtggacagcgaggggctgaccatcgtgtcggtggacggctaccgcctggccctccgccacgagtccatcgacaagaaggagggagcggagaccttctccttcgtagtgcccggcgcggccctgtccgaagtggaaaaaatttgcagcgacgtggacgagccggcctccgtcacccagggcgcccgccacgtgatgttcaaggtgggggacaccatgctggtgtcccgccggctggagggcgaattcctggcctaccgccaggccatcccccgcaacaacaccattcatgtggagggtgacacccgcgccctgctctcctccatcgaccgcgtgtccctcatcatcagcgacaagctgaaaagtcccctgcgctgcgtatttgacagcaatctgctgaaaatctccaccaaaaccgccattggcgacgcctatgacgagtgccccctcagcggcgacggcggcgggctggagatcggcttcaacaacaagtacctgatggacgccctcaaggctgccccggcggacaaggtgcggctggagctgaccaccggcgtgtccccctgcgtcatcctgcccaccgagggggaggagaacttcctctacatggtgctgcccgtgcggctgaaggcgggcgagtgagcatggagatcaagccctaccttcgccggccccagttctacgagaccgacggcatgagcatcatctggcacggcaattacgtccgctggatggaggaggcccgcaccgattttatggatcagctcggcttcccctacgccagggcggtggaggcgggcatcgacttcgccctgacggacatttcctgcaaataccgggccatgacccgctttggcgaggagctggccatcacggtatccatccgccgcctgtccccggccaagctggagctgggctacgagatgcgggaggcgtccaccggggagctgaaggcggagggcacctccggccactttttctatgaccgggccaagggccggccggtggcgctgaaaaaggccctgccggaggtctaccggctgctggaggccctcaccacccctgactgagagaggaatgaactatggaacaacggcaggtcaaaatcaccacggaattcatcaagctggacgccctgctcaagtttgagggattggcgggcaccggcggggaggccaaggagcgcatacaggacggcgaggtgctggtcaacggcgagacctgcaccctgcggggccggaaaatccgccccggcgacaccgtttcgctggacggcgtgacactgaaagtggtatgattgtccgctccattgccctggatttttttcgcaactacgtccaccttgacgcccgtttttccccggaggtcaacgtcatctacggcgagaacgcccagggaaagaccaatctgctggaggcggtggcctatctatccaccgcctcctcccaccgggcccggtacgaccgggagctcatccagttcggcgtggaccatgcttttgtgaaggcggaggtatccgcccgtgggcgggacttcaccctggaggcccgtctgggccggggggtgcggcggcagctctactccaacggggtgcgcctcaagtccgccggggagctgtccggcgtgctcaacaccgtgctcttctgcccggaggacctctacctcatccgggagggagcggctacccggcggcgcttcctggacgggtgtatctgccagctccggcccaagtacgccgaggccctggcggagtatcgccgcctctacgagcataaggtccgcatactccgggactgggaggagcacccctccctgctggacaccctggacgagttcaacctgcgcatggcccagaccggggccctgctcatccactaccgggcccacttcgtcaagcgcctgcgggaggtgacgccccccatccatctggacttttccggcgggcgggaggagcttggcctggcctatgagacggtatccaccgtcaccgacccggaggacagcccccggagcatcctcccccagctcctggcccatcaggagagccaccggaaggcggagctggagtcccgccagtgcctctccggcccccacaaggacgatctcaccgtggagctgaacggcatgagcgccaagaccttcgcctcccaggggcagacccgcaccgcggcgctatccctcaagctggcctcccgggagatcttttatcaggagaccggcgagtggccggtgctgctgctggacgatgtgctcagcgagctggacgcccggcggcaggagttcgtgctccggcgcatcaacggcgggcaggtgttcatcacctgctgtgaggatgcccggctggaggggctggaggaggggaaggtcttccacattcacggcggggcgctgaagccataggggaaggtgtccgtaccccctgcccatatagggcgggataacggcggcccgtgcaatccttcattccacacatggatgcatccaaggagaagcatatgcccattattatcggtatcttttgtgcgctgccctttctggcggggctgattgcagaatatctggtgtgccggctgacccggcggcgttggtggaagctgcttcccccggcggcggccgtcgcgctcacggcagcggtggctgtggggcgggccggagtttgggagtccgaccagtccccgctgacccaactgctctttgtgccgggattgccggcgctgtttgccctgctgggcctgctggcgggctggcggctgtggaaacggctgtggggcccgcgggtggtgaaggataagggggctcgctgaatgtatctgcatctgggccagggcgttgtggtaccctaccgggacgtgctcgccctctttgatctggacaacaccagcgcctcccacctgacccgcaggttcctggagcgggccgagcaggccgggcaggtagtcaatgtggccgaggatctgcccaagtcgtttgtcctctgccgcccggcgggcggggaggccaccgtctatctctcccagctgtccaccgccacgttgctccggcgggcggagagcaacagcttcgaataaacaacccaaacgggccgccggaggcggctcctgcggcggggccgcaggggcggcccctggccgcccggatatcccaatggaggttttcaaatgtctgaagaattcgagaacagcactacccaggtggagcacgagtacggcggctctgagatccaggtgctggagggcctggaggccgtccgcaagcgccccggcatgtatatcggctccacgtcggagagcggcctgcaccacctggtgtacgagatcgtggacaactccatcgacgaggccctggccggctactgcgacgagattaccgtcaagatcggagaaggggacatcatcaccgtcatcgacaacggccggggcattcccgtggatatccagccccagaccggcctgcccgccctggaggtggtgttcacgatcctccacgccggcggcaaattcggcggcggcggctataaggtgtccggcggcctccacggcgtgggcgccagcgtggtcaacgccctgtccgagtggctggaagtgcgggttcacaaggagggcaaggtctacgagatgaagttctcccggggcaaggtgacccagcccatgcaggtggtgggggacacagaccgccacggcaccgaggtggtgttcaagcctgaccccgagatgtttgagatcaccgagtacagctacgacaccctccacacccgcatgcgggaggaggccttcctcaacgccggactgaaaattcataccattgatgagcgccccggtcgggagcaggaggacaccatgcactacgccggcggcatccgggagtttgtgtccttcctcaaccagtccaaggacccggtccaccccgatgtggtctacatggcgggacagaaggacgacgccatggcggaggtggccttccagtacaacgacgggtacagcgagaacatcgtctccttcgccaacaacgtccacaccccggagggcggcatgcacgaggagggcttcaagcgggccctgaccacggtgctcaataattacggcaagaagatgaagattctcaaggacgatgacaaggtatccggcgaagactgccgggagggcatcgcctgcgtcatttccgtcaagctgaccgaggcccagttcgagggccagaccaaggccaagctgggcaacagcgagatccgcaccctggtcaacaacattgtcaccgacaagctctccgagtatctggaggagaacccggcggtgggccgcgccattctggacaaggccctcatggccaaccgggcccgggaggccgcacgcaaggcccgcgagtccatccgccgcaagaccgccctgggcggggccgccatgccggacaagctgcgggactgcaacgaggtcaacccggagctcaccgagctctacatcgtcgagggcgactccgccggcggctcggccacccagggccgggactcccgcttccaggccatcctccccctgtggggcaagatgctcaacgtggagaaggcccgggccgacaaggtatacggcaacgacaagctcacccccgtcatcaccgccttgggcgcgggcattggggacgactttgatctggagaagctgcgctaccacaaggtcatcatcatggccgatgccgacgtggacggctcccacatccgcacgctcctgctcaccttctttttccgcttcatgcggcccctcattgagcacggctacgtctacgccgccgtgccccccctgttcaagctcagccgcggcaagaccacccgcctggccttctccgaggaggagcgggacgccatctccgccgagctgcggggggacaatcccaacgccaaggtggacatctcccggttcaagggcctgggtgagatgaacccccatgagctgtgggaaaccaccatggacccggagcggcgcaccctcaagcgcatcgagctggacgacgctgtccgggccgaccagaccttcaccgtcctcatgggggagaaggtggagccccgcaaggagttcatcgagcgcaacgccaagtacgccgtcaatctggactattaagggattggggaacggacaacgtgcccggaacgcgtatcgtaggggccgatgcccacatcggtccgacgttccggtgccgcccaggcaacaaaaacgggcggaggaaggcatccgcccctacaaaggaaaaaatcgccgggaacagcgaaacgcccacccgcaatttgtgggggcggcccttgcggccgcccgccgtgaaccaccctatcacgaagaatgtgaggcagatacatgagtaaaaagccacagtatgatccggaggaaatccggtttccagaccagaagatagagacctcctatctggtgcacgagatggagcagagctacatcgagtacgctatgagcgtcatcgtaggccgggcgctgcccgacgtgcgggacggcctgaagccggtccaccggcgcatcctctacgccatgtatgaggacaacctgaccgcggacaagcccttcaagaagtcggccacctgcgtgggcgacgtgctgggccgctaccacccccatggcgacgcttcggtgtacgacgccctggtgcgcctggctcaggatttctccatgcgctaccccctggtggacggccacggaaacttcggctccatcgacggcgatcccccggccgcctaccgttacaccgaggcccgcatggccaagatctccgacgagatgctgcgggagatcgagaaggacacggtggactgggacccgaacttcgacgagagccggaaggaaccacgggtactgccctcccggttccccaatctgctggtcaacggctcctccggcatcgccgtgggcatggccaccaatattccgccccacaacctgcgggaagtgatcaatgccacaatctgcgttctggacaacccggaggcggagctgtccgacctgatggagcacgtgaagggccccgacttccccaccagggggatcatcatgggccgctccggcatccgggcggcctacgccaccggccggggccgggtgtgcgtccgggcccgcaccgagtttgaggagttcggcaacaaccgcacccgcatcatcgtcaccgagatcccctaccaggtcaacaagcgcatgctcatcaaaaatatggccgaccaggtggaggacaagcggctggagggcatctccgacatccgggatgagtccgaccgcaacggcatgcgggtggtcatcgagctcaagcgggacgccaatccccaggtggtgctcaaccgcctgtttgcacagacccagctccagaccaccttcgccatcaatatgctggccctggtgcagtccggcggccagccccagcccaagattctctccctgcgccacatcctggacgagtacatcgccttccaggaggaggtcatcgtccgccgcacccgctacgatctgcgcaaggcccaggagcgggcccatctgctggagggcctgctcattgccgaggacaacatcgacgcggtgatccagaccatccgggagagctacgacgacgccaaggagaacctgatgaaccgcttcggcctcagcgacgtgcaggcccaggccatcctggacatgcagctcaagcggctccaggggctggagaaggagaagctgcaaaacgaatacaaggagctggaggcgcgcatcgcctacttcaatgagctgctctccagtgaggagaagatccgtggcgtgctcaaggacgagcttaccgccatccgggacaggtacggcgacgaccgggtgaccgagatccaggacgtggaggacgagatcgacatcgaggatctcatcgaggaggaggagtgcgtctttaccctcaccgccggcggctacatcaagcgcaccgccgcctccacctacaaggcccagcgccggggcggcaagggcattaccgccatgtccaccaaggaggaggactatgtggacaccgtgttcaccgcctccacccacgatttcatcctctttttcaccaacaagggcagggtccaccgcaaaaagggctatcagatccccgaggcgggccgcaccgcccggggcaccaacctggtcaatgtgctgcccatcgagcaggatgaaaaggtcaccgccatgatccacctgcgggaattccccgaggaccgctatctggtgatggtcacccgcagcggcaccgtcaagcgcatccagctctcctccatctacactgcacgcaaggcgggcatccgctgcatcaccctggacgagggggatgagctcatctgcgtgcgggagaccgacggcgaccaggccatcctgatcgtcacccacgacggcatggccatctgctttaaggagaccgacgtgcgctgcatgggccgtgacgccgccggcgtccggggcatcaacctgcaccccggcgactacgtggtgggggccgcccgggccaagcgggaccaccaggtgttgatgatcaccgaaaacggctacggcaagcgcaccgacatggacgagtatatccgcgccgacgggccccagaagcggggcggattcggcctgaagggctataacgtcaccgagaaaaccggtccagtggtgggggtcaaggtggtcagcgacggggacgacgtgctggtgatcaacgatgccggcgtgatcatccgcatggcggccgccggcatctccacctacggccgcaccgcccagggtgtcaagatcatgaatttggaggagggggtcaaggtgatctccttcgcccgtaccgaccacgaggaggaagaggaggccgctgagggggattcccctgccgttggtacagaggaggaataagcc

SEQ ID NO: 4286 - DNA, 19243 bp, Unknown
  gut microbiota DNA sequence
cccagaaggtgcgcacatagcgcttggtgttctgggtgaccggctcggagaagtcgccgccctggggggagacggcgccgattacagtgacgctcccctccttcccctccagggtcttcacatagcccgcccgctcgtagaactcggccaggcgggaggccaggtaggcggggaagccctcctcggcgggcatctcctccagccgtccggagatctcccgcagggcctccgcccagcgggaggtggagtcggccatgagggccacgtggtagcccatatcccggtagtactcggcgatggtcatgccggtgtagaccgacgcctcgcgggcggccaccggcatgttggaggtgttggcgatgaggatggtgcggttcatcaggggttgctggctcttgggatccagcagctcggagaactcctccagggcctgggtcatctcattgccgcgctcgccgcagcctaggtagacgatgatgtccgcgtccgaccacttggccaactggtgctgggtcatggtcttgcccgcgccgaaggggccggggatggcggcggcgcccccctttccgatggggaaaagggtgtcgatgatccgctgcccggtgaccagaggccggtcgatgggcagccgctgggcgatggggcggggggtgcggatgggccaccgctgggccagggccagggggtggatctgcccgtggtcgtcggtgagctccaccagagtgtcgctgacccggtaggccccggcgggcgccaccttggtgacccggccggacaccccggtgggcaccagacagcggtggacgatgaggggggtctccgggcaggaggcatagagtgcgccaggggcgagaacgtcgcctgcctttacatggagggtgacatcccacgtcttctcctggtccagggaggggatgttcagcccacggccgatgaaggggccgctctccgcctcaatgaccttgagggggcgagcaatgccgtcgaagatgttggtcagcatgccggggcccagggtgatggccatgggggccccctggctcaccaccggctggccgggcttgaggccggccgtgtcctcgtagacctggacggtggtggccgagcggtccacactgaccacctcgccgatcaggccctcctcgcccacgctgaccatatccatcatggccaggcccttgccgccggtcaccttgacgaccgggccgttgatgccgtggatggtatagtgcgtttgattcattggaagtaccatcctttcttattcgtcggagagcgacaggccgaagagctcggcaaagtggccagacaactcgccggctgcgctgtcaaaggaggagtccacccgcaggcccagatcgggggactcggcgatcaggccgcccaggcggaagtccccctcccggaaggtcaggcggatttggggcgcggaggcggccagggcctcccgaaagctcagatcgtcgccccgcagggtaaccagcacctcctccgcgccggagagctgctccagcgcctcggccagcagggcagtgagccgctggccataggcgggagtgcgggtgaaggcggcgattttggcccgcaccagggcgaagacctcctgggccatctcggtgcggcgcaggtagagggcccgcttgttctccagcatatggcgggacacgccccgcccggcctccgactggatgcgggccacctccccgtggatgtattcataggcctccttcagcgccgcgtcctctgcttcctgaaagcggagctcccggcggcgcttgacctccgcgagggcgcgcttgctctcgtcggcggcttccgccaggattttggcggtgaagcggtccagcttttgattcatatcaggcatagttaacctcctcacggagctggtcagagcttgactccaatggcctcccggatgtagcgggtgatggagtcgggggcgcggccggcgctgtgccggtcggggatctccaccaccaggggccgctgggcggtgagcttcagcggggcgatgagatcctggcacagggcggccagcttttcggtgatgagcagcacggcgatgtcgggatcggcggcggcggtctggatggcggcgcgcaccaggggctcctcccgcaccacgaccccttcgatgccagccaggcgcagccccacctgggtatccgtgctgtcggtgatgacgaagtatttcataagttgcctctcagcgtttcgcccgccccgcgggcgaaatcaaatcaaaatccgtgcggagcaggacacaccccagggtactttctcttgcccctcggagcaattcaacttgtgcgcctgcgcagcacaccgatacctctggacggattacacgaagagcagcagcagcgccacgatcaggccgtacagcgccacaccctcggccaggccaacgaagatgagggccttaccgaaggccttgtcgttctcggagatggcgcccagggcggcagacgcggaggaggccacggcgatgccgccgccgatgccgctcaggcccacggccagggcagcgcctacgtacttgaggccctcggcgataccgccagccgccgcggcggcctcaggcgtgccgacggcggaggcgctgccgccgatgcccaccacgctggccagtaccaggaaggcgaagaaggaggcgatgttggcgccaagggcccgcttggccctgcgtccggtgtacttgcggatgccgatgaggaacaggggggagaaaaccgcgaaggcggcaaagaacaggacaatgaatttcagcatggtgactacctcctcaggattacccgtttgtgcgggcagcatagtcgatttttttcgggacaaaggggatgccgccgtcgtcgtagaagcggccgaagagctcgtagaactccagacggagcacctggatgcccaccagaaggccctcgaagcccatgacgaaggcgttgcccagcaccaggatcaggatgcccgccgggccgcccaccccgccggccaggccggccagcatgtggaccaccagcatcaggcccacgtgggtgatggcataggcgcccacgcgcatgaaggacagggtgttggtcaggtagctgagcagggtctcgaacagctcgaagaagccggtgcccagcacctcgcccactgaaaattccctccagtgggggtccttggccagcagatgggacaggggctcccgcaggagcatgagcaccaggggcaggatgagcacgggcagcacataggccggggtgaacaggttcacgccgaaggccagggtggacacggccgcggtgagcagtccggcgtaaaacacgatgcccgccgcgccgttgggcccgaagaggattttttcatagtttttctggcggatgccgttgaggatgttgatgaccatcaccagcagcagcataaatacgcccagacagatggacagaaccagcagcagcaggacattgctcaccacgcccaggcccgcaaaggtagtctcctccatgattttaaaaccggggagaatgtcctcaaagccgaacaccgacccgtagacgcagccgaacagcgcgccggacaggccgcagcaggtgatgatgccgcccagccacatgcccttccacctggccagtacaaggccaatgagggccagacagagcccctgccccaggtcgccgaacatgatgccgaagaacaggcagtaggtcagggccatgaacagggaggggtccttctcgttgtaggcgggcaggccatacatctccaggaagggctggaacacccggcccaggaagcaggttttcagcttggtggggggcttggcgtggcgcacgtcatcggcggtatcggccacgcaggacaggttggggaaccgggcgagcgtttcctcgatttccggcaccgccgccgccggtacccagccggtgaggtaaaaggtgcccttgctacggcaggcgtactggcgcagcccgcagcactcgctgtggtagcgcaggtaggagtagctggatagaatgtgctcccgctcctgccggcgcagctcctccagctcctgccccacctgggccaccgccgcctgggcggcctccacttgggcgttgagctctgccgtggcgttgtccaccgtcccgccgggcgggtcctccagacgaatgcgtacaaagtgcagggaattgaacagggagtccaccttgtggtgggcctccttggtggtgaagtagaccccatatacccgccgggcgcccagggtggtggggacgaaaaagatgtcctcctcctcgttgagggcctcccggaagccgtcgtaggtctcccggggcaggtagccgtatcggaaccgggcgtgatccaggccccagagctcgtccaggctgacgttgagtccccggaggttctggagctggtccaccatgctgcgggcctcgtcggccttgtgctccagctcctccctccgccggtgcagggcggcgatgcgcccggagagggaatcgaaataggaagcgaaatcctccaagggggacgcggggtcgaagggggcataggccagggggatgcccgcctcatcggccacctccaccgagcggtggaggagtgcgctgtaggggttttccagctccaggggccgcaggcccttcacgctccgcatgagctgcagggcgttttccgggtggaactcctggtcgatgacgcaggcgcgcaccacatcgtcaaaccgctccagcggcccggcgatggtgagcagcttcatcgggacaacggacattgcggtagctccttccttgacatgggcttggggggcttattggcccaccagatctgcgagttctgcgcggtaagggacgccgtatttcaccgactcgatcacgttaatcagcacactcagctccagctccttgagctccaggtacgccacggcggtgtaaatggaggggggcacggcggcgagctgacgcttgttgaagcggcagatggcccgttggtagtactcctccaccgcgcccaccgccacgccgtcgaagcagtcccggtagggggagtcccgcagcagggcgaagacgtcgtccacgccgggggcggcgcagagggcgcgggtgaagtcggggttgaggcggtagtgaaaggggaagagaacgcgcagataggtctccggctccgtctgggggaagtaggttttgaggcggagcacatggatgatgttgagcaggtcgatctgttcccccagggcgcggagaagtaccttctgggtgcggccggtatactgccggtggacgatgcggtagaggtgggagaagtaggcggtgcgcagggcggcctccgccagggtgaagtcgggcagcgcgccgtcccggcttgggcgcaggtgccggagcacgggcgcgtagatggtgtcgcgggcagcgtccaggagctggtcgtagctggtgcaggaggccagggccccctcgtccagccgcaggcggaggggcaccgcagacgtggggggaggctccttggcgtagcggccggtcttgagccggcgcagggcggccaggagggcgctccgctccgcagcccggagctggaactgcatcaggggcttgtcctcccggggaacgtaataggacaggctccggtactccagccgcagctcgtcccgcagagcgccctccatctccacccggcccacgtaggaccaggcgccggggggaaccagggacagggcgcggctccagcccggatgctgccgcagggcctccagcagttcggcctcatttttcagcccggccagccgggcaaagtcgtccgcccgcaggcgcttgccgtagagggcgcggatcttggcggacagcgcgccgtaggtcatctccgcgtttttcacggctgtacgcccacgatcagggagaacagggtgtccacccagcgctccttgtttttctcataggacacctccaccgcgtgcatggtctgctccagctttcggtccagccggtccagcgcctcctcggcggcggcctcctcagtctgctgcacctgctccagccgctgccgggcccgcgccagatagctctcgcgcatagcggagatctcctgctccaggccggcctggagctgctgccgcctggcacgggactcctccgccagcaccttggcgccctgttcggcggccatgatctggctgaccatctcggcgtagtccatcgtaacacctccgtcgttgtttgaagtgaaaagggatttgtacgtcaccgtttatcataccatattgagagatggatttctacaagaaaatggcagggataaataaaatatttcatcataccgcacaaagcggcgaatgccgcgcgagggagcttgaatgcgctattgtaatcctgggagggggcgtatataataagagtttataaagctgtcccgcggcttgcgcgggctcaaatgcagatgggaggaagtattatggcaaagctgctccggcttctggaacaagactgcacgctgacccatgaacagcttgcatccatgacggatatgaccgtggcggacgtgaaggccgccattcagcgctatgaggcggacaagaccatcctgggctatcaggccatcgtggactgggaccgcaccgaccgggaggcggtcaccgccctcattgaggtgaaggtgacgccccagcggggcgacggctttgaccgggtggccgagcgcatctaccagtacgacgaggtggagagcgtctatctgatgagcggcgcctttgatctcaccgtcatcatctcgggccgcacgctgaaagaggtggcccagtttgtgggggagcgcctgtccaccctggaggacgtgacgggcaccgccacccattttatcctgcacaagtacaaggagaagcacctgatctttgaaaagcaggagcagcaggagaaggagtggatcttttcatgaattacgatgaaatactctgccggcgcatccaggaggtcaaaccctccggcatccggcgctttttcgatatcctggaggagatgaaggatgccatctctctgggcgtgggggagcccgatttcgtcaccccctggcacatccgggacgcgggcatctactctctggagaagggcttcaccaagtacacctccaacgccggcatggcggagctgcgccgggagatcgcggcctacctgaaccgccgcttcggcctgcaatacgacttcgcccatcagattgtggtcaccgtgggcggcagcgaggccatcgacctggccctgcggtgcatcctcaaccccggcgatgaggtgatcatccccgtgccctcctttgtgtgctacgggcccctgacgtccatggccgggggtacgccggtgtacgtggagctgaaggcggagaacgagttccgcctcaccgccgcgcagctccgcgccgccctcaccccccgcaccaaggccgtggtgcttcccttcccctccaaccccaccggcggtattctggagcgggccgatctggaggagctggccggggtgctgaaggacaccaacgccatggttctctccgacgagatctacgccgagctgacctatggccagaagcacgtgtcgcccgccaacctgccggagctgtacgaccgcaccatcgtggtcaacggcttctccaagagccacgccatgaccggctggcgcatgggctacgtctgcggccccgcgcctattctccagcagatgctcaagctccaccagttcggtatcatgtccgcccccaccaccagccagtatgccgccattgaggccatgcgcaacggtgacgtggacattgagaagatgcgggacgagtacgacggccgccgccgctatctggtggagggcctgcgccgtatcggcctgccctgcttcgagcccaagggcgccttttacgtgtttcccgacatccggggcaccggcctgacctccgacgaattctgcgagcggtttttgatggaggagaaggtggccgtcatttccggcgccgccttcggccccggcggcgagggcttcatccgctgctgctacgccaccagcatgaaggacatcgccgaggccctgacccgcatggacaacttcctgaccaacctgcgcaagaagcaggcccgggagggctgagcttccatccacccccattcataagaggaggcagcatatgtacatcacctgtctggacatggagggcgtgctggtccccgagatctggattgcctttgccgaggccagcggcatccccgccctcaagcgcaccacccgggacgagcccgattaccacaagctgatggagtaccgcctgggcatactgcgggagcacggcctggggctgcgggagattcaggctaccattgcccaaatcgaccccctgcccggcgcgcgggcatttctggacgagctgcgcagcttcacccaggtcctgatcctcagcgacacctttgagcagttcgcccagcccctgatgaaaaagctgaactggcccaccctgttttgcaacaccctggaggtggcgcccgacggggccatcaccggcttccgcatgcgctgcccccagtccaagctgaccacggtgaaggccctccagtccatcggctacgacaccatcgccgccggggacagctacaacgacctgggcatgatccaggccagccgcgccggcttcctcttcaagagcacggcgcagatcaaggccgaccacccggaggtgcccgcctacgagggctttgacgagctgctggccgccatccggcgggccatggactgaggagggcggacgtatgcgcgacccgtttgacggcctggccttccgcccggcggacatcctcctgccacagaactgtgattacaccaagtggtcggtggtggcctgcgaccagtacacctcccagccggagtactggcaggaggtggaggagctggtgggctccgccccctccaccctgcgcctgatgctgcccgagagctgcctggacggcccaagcgtggagaccgacatcatggaggtcaacaacaccatgacccgctacctgcgggaggagcggttctgcaccctgcccgccagcctgatctatgtggagcggcggctggacaacctgcgcctgcgccggggcctggtgggcatggtggatctggagcagtacgactacgagcccggcgcggaggcccaggtgcgggccaccgagggcaccgtcatggcccgcattccgccccgggtggcggtgcgcaagaacgcccccctggagctgccccacgtgatgctgctggccgacgacccggaaaagacggtgcttgagcccctctccgcccgcaaggaccagatggaaaaggtgtacgacttcgacctcatggagcggggcggccacatcgccggctggcggctggacggggagagcatggccctggtggccgccgccctccggaagctggccgatccggcggccttccgcgcccgctacggcgtggaggacaagccggtgctcctcttcgccgtaggagacggcaaccactccctggctaccgccaaggagtgctatgagcggcagaagaagctcacccccagggagcagtgggacagcctgcccgcccggtacgccctgtgcgagctggtcaacctccacgacgcctccctggagttcgagcccatccaccgggtggtcttcggcgtggagccggagcgggtggtggaggagctgctctccgccctcccaggcgcataccggggggagggggacggccatgtgctccgcttctcccatgccggggggaagggcgcggtcactgtgccccgcccggaggcccagttggaggtgggcaccctccagcccttcctggacgcctacgtgaaggagcacggggggagcatcgactacatccacggcgcggatgtggcccgggatctggccgcccgccccggcaatatcgccttcctgctgcccgccatgggcaaggagcagctctttcccaccgtcatccgggacggggtgctcccccgcaagaccttctccatgggggaggcccacgacaagcgcttttacctggaggcgcgcaagatccgataagggggtgacccggtgtccgttctggaaacaagggcctacgccaagctgaatctctctctcgacgtgctggaccggcggagcgacggctaccacgagatgcgcatggtcatgcagaccgtgaccctcagcgacgccctccgcctggagaccggcacgggaaggcctctgtccatgcgcagcagcctgggcttcctgcccgccgacgagcgcaacctggcggcggccgccgccctgcgcctgtgcgcggagacgggggcggactgcggcgggctgtccattgagctggacaagtccatcccggtgtgcgccgggctggcggggggcagcgccgacgccgctgccgtcctgcgggggctcaaccgcctgctggggctgggcctcccgccggagcggctggaggccatcggggcccgggtgggctccgacgtgccctactgcgtccggggcggcaccgccctggccgaggggcggggggaggtgctcaccactctgcccgccctgcccgactgccatgtggtgctgtgcaagcccgccttctcggtgcccacgccggagctcttcgccaggctggacggctgccgcatccgccgccgcccggacaccgccggtctgctggccgccctggcggcgggggatctggccggagtggcccggcgcatgtataacgtgtttgaggatgtgctccccgagcggcggggcgcggaggtgcagcgcatcaagaacgccctcgttcagcagggggccctgggggcctctatgagcggcaccggctccaccgtcttcggcctgttcgaccgggaggaggccgcccgccgggcctatgagctgctccaggagagctaccgggatacctttttggcccgcagcctggaaaaaatggtatagaaaccggcatcaccgtccacaatgtaggcactacatagtggacggtgatgttttatgacgcaatccaagaccctgcgccggtgggagctggcgctgctgctgggggtggccctggcggccctgctgggggtgtggctggacggagcccaggcggccctgtccgaccgggtgatccgcctgcacgtgctggccaactcggattccgaggccgaccaggccctcaagctccgggtacgggaccggattctggccgaggcggaggaactgtttgttcccggagccggccgggcggagacagaggagctcctccgcgcccacctgtacgacctggccgccgccggggcggaggtggtgggggaggcgggctattcctatccggtgaccgcctccctggtgcacgactactggttccccaccaagacctataccgacttcgccctcccggcaggggcgtacaccgccctgcgcatcgagatcggcgcggggggcgggcagaactggtggtgcgtggtgttcccgcccctctgcctgggctccgtcagcgagaccacgcaggagaccgccctggaggccgggctgacggagaaccaggtctccctgatgaccggggaggacgagggctacgtggtgaagttcaaggccgtggagctgctggagcagttcaagggttggctggaagggcgataaaaagcggcctgcgcaagagcaaagtttcataaagaagttaagggcaaggcagaccgcaatggtttgccttgccctgtttatagtgtgtaaactcactatgacactttcgaggaaggtgcctgtaggagagagataaactgaaggttacctcgcatattgaatccacccgataatcagaagatgcagcggataatagaggtaaaacagccatttcatgacacggttcaatttctcgttgttacctctttgaccattgtatagcctgataattggaattgcaaaaatgatgcccatctgcaatagcccatagactttgtcgattgcaaagaaatacaccgtcgcataaatcgccacatagaaaaccatccacaacatttgtgttttgaattttcccctatttgttccaaacgccaaaatacacagacttgcaacacaactccagtcgctggggaagctaatcaagcagatcagcacgataaggattacttttactgtatttttctgtacgcttcggcagttcaccacccgaagcataaccaccccccatgcaagcgaccacatgacgcttgtctggttcagtatacttccgtagtaaaagggaataaaggacttccaattgacaaaatccatcgacgcaaacacataggtaaagtgcgatatgaatgcaaacagaaacagccgcaccgtgtatttgttcaagtttttagtataatgatacccctccgcaataaagtaacacataatggggcaggtaagtctgcctatgatatggagcaaaatcggtacaaactcttttggataaccgggatagatcatccatgtaacatggtcaattgtcattgcaaaaacagcaattaacttgattgtatttgcatccgttttcttatatctttccatgtagtattcctcttatgaaaatcccgatttttgggttggttcattataaaacaacacccgccgaaaagcaattacctttcgggggtgttgacttccttacagtatgctccccaagcgcgcaggccgctttttgcgggggaattcagccgatgccgccgtaggcgatgcccaggatccacaccgccacggtgaggaatacatagaaccgggcggtgatgccgaaaaggcggccgggggcccgggcccggcccagggccagctcggccccgatgtccttcatacccagcacaaagtagatgcacaccgccaccagcagcgcgccgaagggagagacgtagatggtgatcaaatccatccagccccccatgcccgccagggactccaggaacaggccggggaggaaggcggccgcgcccaccaggagggtggaaacggtgcgggacaggcggaaggtggaggtgagggcctcgccgcaggcctccagcatgttcatcagggaggtgatgcccgcaaagaacacggagacgaagaagagcagggcgaagatgcgcccgccgggcatctgctggaagatctgggggagggtgacgaacatgagctgcggcccgctggtggggtcgatgccgaaggcaaacaccgcgggcaggatggcgaagcccgccagcagggcggccagggtgtccagtacggcggtcatgcccgcgtggcggaggatgttctcgccctttttcatatagctgccgtagatgagcatgcccgcgccgttgatggacagggagaagaaggcctgtcccatggccatcacccaggtctccgggttgagcagatagctccagtcgggccggagcaggtagaggtagccctccatggcgccgggcaggaaggccacccggacggcgatgatgaggaacaggatgaagaaggcgggcatcatgaccttgctgagcttttcaatgccggaggccacgccgaagatcaggatggcggccgtcaccgccaccgccgcgaagtgccaggggatggagccgaagtccaccgccagggcggagaagaagccctgggcgtccccggccaggacggagccggtgagggagcctgcggcgtaccgcagcacccagcccaccaccaccgagtagccgatggcgatgcccagcacccccagcagggggatggcgcccagcacccggccgccccggcggccccgctgccggagcacgtagtccagcgagcccatggcgccggtaccggtgaggcggcccagggcgaactcccccgacaggcccacatagctgaacagggcgacgaacaggaaataggggatcaggaaggcgccgccgccgtactgccccacccggtagggaaagagccagatgttggccatgcccaccgcggagcccaccgcggccagcacaaagccgatggagctggtaaacttgccgtcggaaccggatttatgcatgaaattcctcctcattgagcttgaccatgtggatgtgatcctcccacacgccgttgatgttgagatagcgccgggccagcccctccggccggtagcccgccttctccgccgcccgcagggaggcggcgttgcggggcatgacgttggcctccgcccggtggagccccagcacccggaaggcccagccggtgccgtaccggatggcctcggagccgtagccccgcccccagagggcggcgtcgattttgtaggacacgaagcaggactggaaggctccccggacgatctcgttgaagcccagcgccccgatgattttgcccgggtgccggggctgtaccagcaggaagcggaagctccgccccacctccgcccagcccagctcctctgccaggcgctcggcctgcccctcctcggtgaagaagtcctccggctgcaccgggtcaaagggggcgaaggccgcccggttgcggcggtaaaaggcggcggccggccgggccagggcggggcccaccgccagaaagcccagccggggggagcggaacacaaagcggcgcatgggatacctccttccaatctgcctggagaggtattataccataccggagacgcttttgcactataaagtcaaaaagattttgaccgggggcaatgcggttttcacatgcaaaagattccatttcggaaggttgacctgggggacagttttcgttacaatagaggtattgagacaagagccgtccacccaggggcggctccgccattgccaaggagaaaaccatgctgaacagagaagaggaactgcgcttctgcaaagcgcggagggcggctatcgccctggactaccagaacctgaacccggagcagaggagggccgcactggccaccgaggggccgctgctgctgctggcgggggcgggcagcggcaagaccaccgtgctcatccaccgcatcgccaacctgatgaagtacggccgcgggtcggactgcgacgaggcgcccgcctgggccgcccccgcagacctggcctttctggagggctacgtccagaaccccgatcccgcccaaaaggcggagcaggagcggctgtgtcgggtagacccggcggtcccctggtccatcatcgccatcaccttcactaacaaggccgccggcgagctgaaggagcggctggagcggatgctggggccgtcggccaacgacatctgggcctccaccttccactccgcctgcgtgcgcatcctgcggcgggacatcgatcggctgggcttcaccagttccttcaccatctacgacaccgccgactccgagcgggtgatcaaggacattgtgaaggacttcaacctggacgagaaggccttcgccccccgctccatcctgggctatatttcccgggccaaggacgccatgaagctggggaaggactacgtccaggagtgcgagaaggcgggggactaccggctggtgaaaatcgccaaagtctacgccgagtatgagcgccgcctccgggaggccaacgccctggatttcgacgacatcatcctggacaccgtccgcctgctccagaattttgatgacgttcgggagtattaccagaaaaaattccactatgtacttattgacgagtaccaggacaccaacaacctccagtatctgctggcctccaccctggcgggggggtacgagaacatctgcgtggtgggcgacgacgaccagtccatctaccgcttccggggggccaccatcgagaacatcctctccttcgagtcccagtacaagggggcgcgggtgatccggctggagcagaactaccgctccaccaagaacatcctggaggcgtccaacgcggtcatccgcaacaacgagggccgcaagggcaaggagctgtggacggagcacgaggcgggggacaaggtccactgctacaccgccatgaacgagcacgacgaggcccagttcgtggccgcccagatcctcgccggcttctccgcgggccggggctggcgggagcacgcggtgctctaccgcatgaacgcccagtccaaccagcttgagcaggccttcaagcgcaacggcatcccctaccgcatcatcgggggcatccgcttcttcgaccgggcggaggtcaaggacatgatggcctacctctgcgccgtcaacaaccccaacgacgatctgcgcctgtcccgcatcatcaacaacccgccccggggcatcggggccaccaccgtggagcgggcccaggccatcgcccaggcggagggccgctccctgtgggacgtggtgagccacgccaaggacttctcggagcttcagaaggccgccccccgcctgtcccagttcgccgagctgatggcggagctgcggaagctctccggcgagatggagctgcccgacttttacgaggagctggtgcagcgcaccggctacgccgtcatgctggagcagaagaacactgtggaggaccgtacccggctggagaacgtccacgaggtgctctcctccatccagaactacctggagaatgcggtggatgagccctccctggcgggcttcctggacgagatcgccctctataccgacctggacagccacgatcccagcgaggactgcgtggtgatgatgaccatgcactcggccaagggcctggagttcccggtggtctttgtggtgggcgtggaggagggcatcttccccggcatccgcgccatcggcgaggccgaggagatggaggaggagcgccgcctgtgctacgtggccatgacccgggccaaggagaagctctatatgacctgcgcctcccagcgcatgctcttcggccgcaccaactccaaccggccctcccgctttttgggggagatcccgccggagtatgtggagaagtcgggccgcctgccctacgccgagcgggccgagcgggaggccgagcgccctgcccgccgcgcgccggtgcgccgcaccttcgaccggggcttctccatgggctccgccgccgccccggcctctgccggcgcgcccgcccccgactggaagagccctgcggctgggcgggcccccgccggcgcggccctgcccggcttcaagatgggggacagcgtccagcacaaggccttcggccggggcctcatcaccaaggttacccccatggggggcgacgccctggtggagatcgccttcgacagcgtgggtaccaagaagctgatgctcaagtccgcctcacagtacatgaagaagctctgagccgcggcccctacagcagctcggtgaagctggtgatataccggtcacagaacccccgcatctccgcctcgtaggaggcgtagaaggggtcaaacacccccacggcccggatgcccacagcctgggccgcccggcaggcgccgggggagtcctcgaagagggtgcagtccccggcctcggcccccagcagggccagggagcgggtgaaggcctccgggttgcgcttctccaggcccagctcctgcacaaagatgatctgccgaaagtacccctccagcctgtggcgggccagggcggcccggcacagctcgggtacgcaggcggtgagaagggccatgggctccccggccgcggcgcaccgggccaggaacgcctccgcacccggcttcatgggcacctggcgggcgtaggcgtcccgggccatgtccagccactcggccatgatggcctccggcgtcatgtccaggcagtagtagtccttggtgaactgggcggcgatggggaagatggagtggcccacggtgtcgctgtattcgcgggtgggggtgagcccccggcgggccagaaagccgttgtcaatctccacccatacgccgttggagtccaccagcgtgccgtcaaagtcgaataagtacatgctcaaaccctcgtttcccggtgaatgtgtgtaaacctgattttatcatagtcaaaggagaggtacaaccatgaccgaacacaaagagagcagcgtcctggcccgcttcgccagcccgctgctgatcctggccaccatcatctggggcagctccttcgtggtgatgaagtccagcgtggacgtgctgcccaccttctggctgctggccatccgcttttcttttgcggccctggtgctggcggtggtgttcatccggcggtggaaggtgctggataagcagtacctgatcggcggcacggtgatgggcttctgcctgtttctggcctacaccttccagaccttcggcctggagcagaccacctccggcaagaacgccttctttaccgccgtctactgcgtcatcgtccccttcctgtactggttcatcgccaagcgccgccccgaccggttcaacctgattgccgccttcctgtgcatcggggggatcgccctggtgtccatcaccggggacaacgcctccgccttcaacatgggcgatgtgctcaccctcatcggcggcttcttctttgccgcccacatcgtggccgtgtccaggtactccgagggacgggacatcttcatcctcaccaccctccagtttgcctccttcgccctcttttcctggctgggggtgctcatcacccgcccggcgctgacgcccggcgtatttgacagtagcctgatcatgggcctggcgtacctggtcatctgcgcctcctgcggtgccctcctgttccagaacatcggacagaagtacaccgccccctccaccgccgccgtgctcctctccctggaggcccccttcggcgtgttcttctccatcctcttcgccaatgagcggcccacccccctcatgttcgtgggctttgcgctgatcttcatcgccgtggtgtgctccgagaccaaattctccttcctgcgcaaaaaaaagagttgacaaagccggaacaggtgcgtataatacggtacaacaaccacacatggtaaaccagtgaggaagagaagtacccggcgtttccgatgcaaagagagtcccggagggtggaatcgggatcagaggagaccggcgaatggccttccgagggcggcttgaacgggcaacctagtagatgccgacgggaccccacccgttatccatcgggcacgcatgatggtgcgtgaagcgagtggacgttattgacgtcaatttgggtggtatcgcagaagtgttgaaacgcttttgtcccagcaatggggcagaagcgtttttttacatcctgcaccatctgccgccccaatttttgattgggaggaaccaaacatgaaaaagctgaatcggatcctgtctctctccgccgcggccgcgctggccctgtccctctctgcctgcggtgcgcagggggagccg

SEQ ID NO: 4287 - DNA, 43439 bp, Unknown
  gut microbiota DNA sequence
atcacgcctccctggacgagatcgccaacgcgattaccgcccggctggacgccatcgcggaggaaaacggcatcacgatcgagtatgaggtgacctccggccagggcgatcagactgtcctgcgccaattgtccgaccaggccattgccgacggtgtggacgccattatccccatcgccaccaccgccgcccaggtggccgccgtctccgctgaggagagcaagaccccggtgatcttcgccgccatctcctatccggagaccgtggagctcaccggcatggactacgtcaccggcaccagcgatgccctggacaccaatcagattctggacatgatgtttacccagaatccagacattgggtctgtgggtctgctctactccctgtccgagcccaattccgaggtgcccatcgcggatgccaaggcttatctggacgccaagggcgtggcctacaccgaggccaccgctaacaccaacgacgaggtcatcgccgccgccagctccctgattgccgacggagtggacgccgtcttcacccccaccgacaacatcatcatggccgccgagctggccatctatgaggacttcatcgccgccggcatcccccactacaccggggccgactccttcgtgcgcaacggcgcctttgccacctgcggcgtcaactacaccgacctgggtgccgaaacggccgatctggcctaccaggccatgaccgggggcatggacggcctggaggactattaccaggtggcgggcggcctgatcaccgtcaactccgagaccgccgccgccctggccatcgaccccgccgtctttgaaagcctgggacaggtcaccaccgtcaccaccactgaggactgagatcaaaccaaagccagccccccggctcccgccgggggcgctggcctgtgaaaggagcgtttttccgtgctctacgtcgcccaaaccgccctggagctgggcttccagtacgctctggtggccatggccctgttcctaagctaccgggtgctggacatcgccgacctgaccaccgacggctgtttcgtcctgggctgcgccgtgtcggtgaccctcaccgccgcgggacaccccttcctggccatccccgccgccatgctggccggggcctgcgccgggtttgtcaccgccttcctccagaccaagctgggagtgccctccatcctagcgggcatcgtcaccaacacggggctgtataccgtaaacctcatggccatgggctggaaggccaaccagtccctgctcaagcaggataccatcttcaccctcttccgcgccaccggcatcggcggcgactggaaccccatcctcctctccggggggatcaccgtgctggcgggtgtgctgctggtggccttcctgggcacccggctgggcctcagcatccgcgccaccggcgacaaccgggacatggtgcgctcctcctccatcaaccccaatttcaccatcaccatcggcctgtgcgtggccaacgccctcaccggcctgtccggcgcagtggtgggccaggcccagaagactgctgacatcaacagcggcaccggaatcgtggtcatcggcctggcctgcctgatcatcggtgagaccatcgtgggccggggcgccatgttccggggggccattgcggtagtggcgggcagcatcctctaccgtctcgtttacgctctggtgctttacaccaaggtggtgccagtggactgcctcaagctggtgaccgccttggtggtggccctggccatcgcagccccctccatccggcagtggtgggccttccagaccagaaagcgccgcgccctggccgggcgaaagggggagaagtaaatgctggaactgaacaaggtctccaagaccttcaaccccggcacagtcaacgagaagaaggccctggacggcctgtccgtgacgctggccgatggagacttcgtcaccatcgtgggctccaatggcgcaggcaaatccaccttcttcaacgccgtggcgggggacttctttgtggacgagggctccatccgcctggacggggcggacatcacctatctgcccgcctaccgccgcagccgccagatcggccgtctgttccaggaccccatgcggggcaccgccccccacatgaccatcgaggagaacctggccctggcctatctccgcaccgccaagcaccagcgggccttcttcagccgggtctccaaggccgacaaggcgttcttccgtgagcagctcgcccggctggacatgggcctggaggaccggatgcgccagccggtgggcctcctctccggcggtcagcggcaggccctgacattgctcatggccaccatggtgccccccaagctgctcctgctggacgagcacaccgccgcactggaccctgccacggcggagaaggtgctccgcctcacccgggaaatcgtggagggggagcgcattacctgcctcatgatcacccacaacatgaaaaacgccctggagctgggcagccgaaccttcatgatggatgccggacgggtggtgctggacatcggcggagaggagcgtaagggcctcaccgtggacgatctgctggagcgcttccgtgccggcgcggggaagaacctggacaacgaccgcattctgctctccaacgactagaaaaatgccgcccaaaggcggcattttttccgtgtctgcggcagcggggccatgtatccccggctgcgacgggagtaggccgatggcggtggaaaaagtgcgagatctttcgaaaaaagcattgacaagaatgcggagatatgctattattttctggctgacatgccaaagagatcagcgcccatgcgggtgtagttcaatggtagaatcccagccttccaagctggtcgcgtgggttcgattcccatcacccgctccataagcgcctgtagctcaggtggatagagcaactgccttctaagcagtgggtcaggggttcgagtcccttcaggcgtgccatcgttttctaaagccattcgatatggtgggtgtagttcagttggtagagcatcggattgtggttccgagtgtcgcgggttcgagtcccgtcacccaccccataagcccttaaggcggaagggccggagcgtccgctccggtcctttgcttttagaaccagccagattggggtgtagccaagtggtaaggcacgggactttgactcccgcattcgctggttcgagcccagccatcccagccaaatgactcgttagctcagtcggcagagcaactgccttttaagcagtgggtccggggttcgaatccccgacgggtcaccaaaaaaaataaccacaccttttggtgtggttatttttttatggataccgtgaggacttcacatactcggcagaagtgaattccgcctgcgccaaggttttggctttcggccaaaacacttgtacggcgcaaaagcgccgccggccagaaggctgcttcagcgaaatgctgaatctttttcgtatgcatatgccaagttaaaagctacattttggtcttgtactgcagggctgaaatgtagcttatttttttataaaacctccataatattggcatttacccaatgtcatggaggttttgttatgttcaaataaaaagtagatgttcaactagctgctgggaaaaagtcgtcgtgcatagaacaacatacattaacaatacatttttctattgaagagtgcatgatatctgaaatagagaaaaaagagtgcttcgtatacctaactagtgtaaatcaagggtttcccaatcttttgtatcggcaatacaaaagactggaatttattgtgccagatctagagtctagaatagaacgcaacaaatctttaaaataatttattgtctgtaggaacatgcagttacgcaaaaatttgcagttatgcaaggacggtactggccggctatgtcttctagagtagtagagaagcgggattagacatgtgtttctgaacgtttgcgggtaccaaagcagtactaaattatttggcatgtgaattgcaatatgaaagagcaaaaggaaccagaaaacaatagaaatgataaggaggttaaaacattgaattttaaagagcttcaagagagagctaagggaagaaacttcgaccagatcactgtggtgagccgagacatattccaagagctggccaatctaagcttggtatttcccgttgcccctgggaaggtacgcaccgagacggaacagaaccatcctggattgacagtgggaaaacaggaaattacctatacacagatgtgcaccacaatatattaccagaatacctccttacaggtggtgcagccggtggagggagacaccatctaccagcggtatctggaccggtttggcgagggtatctgttgtgtgcgggagcgaattccaggccagatgtgggataccactttagccaagcttgagtccaagggaatcaacattgctcaacggatggaatcgcccgtctgcaaggcagcctgggtggacctcactgataccctgggcattctctttgaaatcattaccggggagagtgagacgcctgacccgaattatgtggtgcccatgcggattgcgcagatcaatattaccactccggatgtacgtaaaaccatcgaaaccattactgatttgctggagatcggcccctgggaggtggggtgccaaaataacaaaactgtagtggatcccggttttcgggtagatggaaggctgcagaatgtggacttctccttcctggtagccattctggtgtgcggcaacattgagtgggaagctatccagccggtaaaggggcccttggtttactttgattttctgaaggagcacggaattggctatcaccacatcctccgggagattccagaaaagcagtgggagagcacccttcaggactatgagagggcaggagtggaactgtcctgccagggaaaggtggggccggtaagctggtgttatatgaataccaaggataaactgggcttcttcatggaactgcgcacggattccgcaatgaccaaactgcctgatggctatctgcaatatttttacccggaacagacccgggactgagccaggatatattgtcactgcttcaaggaggaggccgaacatgtccaagtttgatatttacctgaataccgaaaagccagccgttgtggaaaagcttattgacgtttacccctttgccggtgtgtgctgcaatccccagatggtggcacggctgggacggacggactttgccaacattgtaaaggagctacgggcggctaccggtagccgcaagctcttcatccaaaccccctccaatgactatgacgggatcatgcgggatgcggaagcgattctgaagatcgcaggggaacccacaatcattaagatcccatccactacgggcggcatccgggcgatgcagaagctctctgcggatgtggatatctgtgctacacaggtcatgtctaccctccagggtatgtgtgcattgcagtccggtgtgaaatacatctccgtgttttactgcttcatgctcatgggcggagctgacgaccacggcctgtatggcggagtggatgccaaggcggtgtttgccgccctgaacaagtttatccaggtttccggcagcccggcccgtatcatggcctgtgcccccagaactccggacgaactgagctatctcatgagcacgggcgctacttccgttgcgctggatccggaggattttgagaattgctttaatgcccgcctgtttataaatttgaatcaggatgtgcggcgctcttgggaagcggtgttcggcaacgtgggcgccgacgagctgattgattaagaaaaggggagaaacaacatggaatttaagaaaaatgtactggatcgctttcgactggacggtaagacagctgtagttacgggtgcggcgggcaacatcggctatcacacggccttggcgtttgctcaggcgggcgccaatgtagccatcgtggatttgccccagtgcctggagcgctccaagcaggtcgcggaggaatttgccggcctctatgggggaaaggcggcggcctacggctgcgatttggtggatgccaaggcggtggcagagatgtttgacgccatcgagaaggaactgggcagcgtggatgtggttcacaacaatgcgggcgtgggcggggcgcttgtccccgatctggaggcctgggactccgagcataacatggatcatctggagcactggaaacaggtgctcaatatcaacctggtgagccagtacattgtggcgaccacggcggccagggtgatggtgcgggagggccatggaggcagcatcatcaacactgcctccctgacaggacacatagtgaatcaggctccccttggacatacccaagacgactcctcttacggtgtgtccaaggcgggggtgctctatttcaccaagcattttgcctcccaggtgatccagtatggcatccgggtcaattcggtttctccgggctattgctacagccccgggctccacgctggaatgtcccaggagatgctggagtgctaccagaatacccagcccattatgcgcatggcccaggtggaggagctccagggagcggtgctctacctggccagcgatgcgtctacttacaccgtcggacaggacatcctgatcgacgggggacatgccaactggtaattggaaggagaacattctatgggaatatttaatctgcatggccgtgtggcggtggtcaccggtggtacggcaggactgggcagaggaatggccatcgcactggcccggcagggcgcggatctggctattctggccagaagaccggataagctgactgagacagccagggaaatcgagagcctgggggggcggtgcctcccggttgtgtgcgatatctcggacgaggcctcggttcagaatgcggtagaaactgtggtaaactactacaaaaaagtggatattttggtaaacaatgctggtaatggaggcccttccatcccaaccgtcgatatgccgcaggagatttttgacaaagtggtaaatctggatttgtgctccctgttccgggtaatgaaggcatttggcaaggtgatggtggaggctggctatggacgtatcattaatattgcctccgctatgggaatggtaggaaacctgggagtgcctctggcgggctatcaggccgccaagggcggagtgatcaacttaaccagggccgccgccgccgagtgggccacccagggggtgacggtaaacaatatctgccctggcatgttcccctctgagtctaacggtgctgatttgatggaagagtcccagacatttatcaagcgtatgactcccatgcagcgggccggcacgccaacggatctgaacaccgtaggcgatatggatgccgcagtggtgttcctggccagcgaggagtcccggtatattaccggtatcaccctgccctgcgacggcgggtggacttgcgtgtagttgaagacaggcaatcaaaacaagagccagacatcttgttttgaaatgagctggaaaaggcatggaacgatcagcgccccctgttgcaggtagaactatctgcaacggggggcgctgatatgtaagtagagcaaaactgcaatgcagaaaaaaggggataacaaaagactgaggagtgcggatacagcatgctcgagcttgtatacaacaaaagacggcccttagcctgaaacatgtcccttgccggcgctcttggagcggtgatttcacttacggacgagataatacgcagtcagggcttacaacgacagtagaacagcaggctaagcacaccgctgaggatcacggccaggccggacaaggcaatggacacatggaaactacagaactggatagagatcccccacaggagagtgccgagcccaacccccaagtcgcctgccatcaacatggtactgttggcggtaccgcggtggttttgagggacattgtttaccgccaggagggtaagaatggggaaggaaaagccctgagccatgccgaagccgatgccgcccaggtagaaggtcgcctgacagggtaccagtgcgatcagagcgatgagggctccgctgagcaccatggcgatggacagcagagttcggtggcccaaggccctgagcagccggccggaggccaggttgctgacggtcatggacagggccgcgacgaccataaagaagctgggattggcatagccctggaggacggcgtaggtgaagataaaaatgttgcagcaggacacccccagcataacgaagaactcaataacggcagggcgcgccgcggcgggatacaaaaacttccgcaggccgtggagcggactgacctcctggggttcccggacaacaggcggcttgccttcctcataccggcacagaaaggccagtattgcgcccagcacgccgaaggcaaaggaaaagtaaaaaatacggtcataggtgccgccgctgcctaaaatttcgatgagccagccggccacagcaatcgccagagcggtagaaacccaaaagatgcctacccccaggctgcttttctcctgaggggttacgtctatagtggcagtggacgaacccgcctgcccaatggaaaaacccgccccatgaagtccacggaagaggagcaccaggggggcaaaggggaggagcaggaagagcagggaggcgatgcccatcagcagagggcccaggatcatgatgactctgcggccgaaccgatccatcagatagcctccggtagtacgggccagaataccaaatagggcgaagggcaagccgagcagaccggcgaaggaggtagagaagccacggctggcgaaaaaaagcgggatgccagaacacatcaggttctgaattagcatcagacacagcatgctgaaccagataagaataaaatatcggttaaacagtttctcttgcatcgaaaaggctctccctatgtggtaaatgtgtcagtatggaggaaacggggagcggcatagccgctccccgtttccattgctgccggaagaagcgattattccccgtagaccttgtcgggatcctgatagccggtgcgctcaccccaggccaccatgtcttcccgaatctcatcccagctccggatgggggactggagcagctcatcatgctcattggtggcatagcgatagtgatgagccatagacatgtccttttcgtcggtctgcttctcaccatagtctctggcagcgatgcgggtcatggtggagtactgctcgctgaccgtgtggagcttcagatcgttgaccagaaggcgctccagaggccgcttgcacagctgggactggatggtacgggtctcacgggggagagtcttcagcattctggcaatctcccaggcgcggtcaataaccttgcccttgggcaccagctcgttgacccagccccagtccagggcctgctgggcagtccactggcggcaggtatacatcagatagttggcgcgctttgtgcccaggaagtgctgcatcagcataaacatgccgtcaccggccaccaggccgaagaacaggtggtcgtcatcgaacttggcgtcctcggaggccagggtgatatcgcacagcagggcggaatcccagtggaaaccggggccgggaatggcgccgatggtgggaatgtcgatgtcgaaaatcatgttcttgatcaggttggtgtcgtcgatgtactgatggtcaaagcgctctttggcgtaggtgctccagccgtgaggatccttgtccatcatccagttgtcgcccttgtgagtccaaatcagaatttcgttcttgcgatccagggagataatgcggctgagctgactcatggcgcgatgattggcgccgctccagcacatggggtggtcattggtcttcatggtgacctgaagaatgccgtcctcccggtacagatcaaagtgatccttgaaccactccctgtattcttccagttcggggagcttgacgtaatcagccataatgtctttcattgtttgtttcctcctgttcgtttttgtttgtgttcaaagctttacgcatttgcggcgtttacggcgtggtgaatcttgctggcaacggaacggcgttcaaaatagatggttgcaaagagcacaagcatcagcaggatgccctggatagcactggacagagtggagtccaccccgcagagcgtcagaccgttttcaatcatgacaatggtaaaggagccgatgagcagcttataaatccgggcgctgaagccgccggtcacgctgacaccacccaggaaaatagccatctgaatgcgcatctccataaactggcagagagagttggtagagccgcctacgttgacaatctgcatgatgccgaaaagcgcagccatgaagcctgagatgataaaggccgtcatacggatgcgtttgacattgatgccagtggcaatcacggtgcgctcgttctcaccgatagccctacagtagtaaccaatcttggtgtactcaaatacataatagaagatgacgaccaacaccgccacaatggccagcttgacggggaaggtgttgaacgtaatgagcacggtaggggcgtagatcaggttggaggccaggaaatagttcagcaggccccgcaggccgatgagcatagccaaagtcatcataaaggagggcatcttgcaccgggagttccacaggccgttgagcgcgcccaccagcatgccggtgccgatagccacggggaaaatggcccaggtgccaaggtgggaggcagccatggcgcccagagtggcagagagggcggcattggcgccggcggatagatccgtgctgcccatggcggtgacaaagagcacgccggtaccgccgatgataacgggaaaagcctggctcacaatgttggaaatattctggggagtgaccagggtgccgcgggtggcgatgaggaatacgcagaacaggatgaggaaggacagaatgggaataagcgtattgatgctgaatttctttttcatgtcatcacctcaataatggtctcttcagacagctctgcactgcgtgggaggagcttgcagatttcgccgtccttcatgacggcgatggtgtcggccatgccaaggacttccgaaagttcatcggtgatcagcaggattgccattcccttttccttggcctcccgcagacactggtagatgtatgccttgacgccgatgtccacgccgcgggtggggcagtccacaatgagaacgtccagatccttgatgagccagcggcccaaattgaccttctgcttgttgccgccgctgagggctctcatcagctgatccacgccggtggatttaacggaaaattgctcccgcgccttggaggatgcctgatacagcttctttgggctgaggaaaccaaagcgccctttcagggtctcgaccgagggcagacagaaattgttttgaatggaggcgcccatcatcagcgcctcaccgtcgcgatccttgggcacataggccaccctgttttgaagggcctggtaagggttgccgatggaaacgttgtgagtggggagggatacctcgccgctgtccaccgggagcaggccgtatgccgcctgaccgacctcacggatgccggagtcgctcagaccacagagcccaaaaatctcacccttgtgcaggtcaaaggatacgtgtttgagatggtcggtacagacatcccgcagcgacagggccacctcgtcttcaaactggggagtggtgtcgctccggtaatagtcgccttcgattttccggcccaccatacggatcttcagctcctccagggggatgtcctggctgcgttcggtggcaagcagttcgccgtctcttaggatagagacgctgtcggtgatcttcagcatctcctccagatcgtgggagatcagaataatggaacggcccatctccttaaacttccggatgagttcatagagaacggtgcggttgtcgtgggagagggactgagtcaattcatccaaaatgaggatctggggatcggaggccagggcgcgggccagttccaccatcttgcgcgattccacgttcatatcgccggacagccgctggaagggaatggggggaagtccccactggctcagggcctgattggcagcctcataaaccttcctgttgttgataattccgaagcgggaaaaacgcttggtattgccgaggaagacgttgattccggctggaaggttggggacgagccccagctcctgcacgacaatggctacgccgctggaggtggcatccaatggagagcggggcttatagggcgttccgtttagaaacatttcgccggagtcgctgggctgaatgccggcaatctgggtgagcagggtggacttgccggagccattttctccggccagaccgcgtacttcgcccggccgaagctgaaagtcgatgttcttgttggcgtaggtggccccaaaccacttgttcaggcccttgacctccaggatcagattggaatcactcattttacgacccccttcacattgcgctgagctgtgatgccgaaaacgacgacgatcacacccaggaggaactcctggaaggttcccgatggaacgcccataagagtgagaatgttgaagatcatagcgataagaaatgtactgatcggaataccgatggcaatgttgatatgcttttgaagcgcctgggccagcaggacggcggccagcggctgaaatacggtgctcaggctgctcaaaccggtctgagccaccacataaccggcgtagctctccttcatgacgcctgcaaagccgaagaagaagccggccatcagtccacccagcataagcgcgcgccgggtattgatgcccatcatctgagctacatccgcattgccgcccaccgcccgggcattgagaccgatggaggtcttgttataggtcacgtaagcgatgataaagccgattacaagcatgatatagatggctgggctgcggccgagcacccgcatctcatcggccagtccctctacccgcaggccctgagatacccgtacctgtgagtaatagccggcgatggtctcgtagaccatggtcatgccaaggcctgcaatccagggaggaatctttgtgacctggaagagcgtcatattgacggccaggcagagcacgccgaccagtacagcggcaatgaacatggggacatagccgagcgcattgcccacaatggcggaggctgtggcagccagaacaatgatggcgcccgccgacaggtcggtgatgccgcaggcaaacagatagctgaagccccaggcgacaaaggccgggacggtggctgcggaaagtataatcgtgaagttctggaaggtcagaaacttcccgtccaccaccacgttcagtaccacaagaagcgcaagggccgcgataacgatgatgatgggcagcggcttgatccggctctcgttccgggctcgggttaaggtattattcatagacagtccctccatttggcctccggatgatacgtccatgtcgtccggaagtcacagtgttaatgctggttatctcagctgatccgctcggaaatcagttcgtcaacattgcccacaaaatcgtagaagctctggtagtccacatccggattattccgatagagcagcgtatcaaaatcggctttcgtcagaagaccgccttccgccattaaattgatgaagccctgggcgttatccttggtcagcattaccaggttcatattgtcaaacagaggggcttggccgttttcatcgaggatggcatgtccgtccagacgattgatcagtagggcggcagccagagagccggcgatccactgtccgccgtttagggcggttacatcgccgttcagaatactctgggcagtttcgggactcatgtcgctgccataaagcttgtagtcagcttcagggcgggaggacatggcgctgatggtggcggacagatagtctccgccagtgcagtagatcatgtctgcatcgggataggcggtcataaagtcattagccttttggacgccttcagaggggtcagcagagtgggccacgtaaacaacctcaccgcctccagcctcaaaagtatcggtaaatccggcgatacgttggtcatggacgtagtcgcccagcgcagcggcggaaatgatagccgtctggttgccgtcagccaaacccagttcgcccatggctgcaccggcggcatattcctgggatatcacagcaccggtataatacgcattctcctgtatggcaggccaatcggcatcggcggggatattggcatggaacacgaaaggaacttcaaagttctgacatagttgggcgacggttgggaagatcgtttggctcatgcccaaaaagagcacgccatctgcgcccgaggtgagttggttctgaagatcggtgacgaccttatccaccttaaactcgttgttggccaagtcgatggacaaatctccggcagaggtctccaggggagtcagagcctcaaaaatgatgtccaaaggataggcgcctacgccccatgtgttggcggcaatgacatggccccctttaccggtagaggaggactctgcaggtggggcggcggtctgctgacagccgctgagcaatgtcagggcgaaggcaggaaccaaggcgagagacaaagcgcttttccagtgattcatgttcattctccttttccttttttgacggctgcttgctgccggttgatggacacttgatggaataagtggcaggtgggaaacccggcacattcggaataccgaccgctgtgtgcttgcggtcatggatatttgcaagaagcataccaaattgagagagcaggggagaagaggtagggaaaacccgccaacttctaagaaaaatttaatgaagatcctgtacgaaatggacagtgataaagagcagtagagggccggagtgtttgcaacgccgcaagactttgcacaaatgcaaggggagagcagctgcgctccaggagggggacagtgcgaaacgcggagcttttcggcttgcattcccgcaaaaatttgcagccatgcaagcgtcgggcatcgcagctttcaggctggtttgagaggctaaactgactggaattgccgggattgcaggaggaaaaggaaacatatcagtttattttttgcttggcatgggatttgcttaacaagagagcagcaaaaaccgcaggagcgggaccgctccattccatgtcatacagtaccatggttggatataagaaaggaagactggaaatgaaagcattgagaaagttgggtaaaggagccgagtcagtacagctgtgcgaggtggaaaagcccattccgggcccgaacgacctgctggtgaaggtaatggctgccggtatctgcggtacggatctgcacattctggccgaggagtacagtcatagtgtgcctgttaccctgggccacgaatataccggcgtagtggagcaggtgggcagcggggtcaccgatttccaggtgggggatcaggtgatctcggtgtccattgcctattcctgcggaacgtgtcactattgccgcaagggcgatccggttcactgcacacagaaggcctctatcggtgtcaatgtggatggcgccatggcggaatatatggtaattccggcagactcggcgatgaaagtacctgaacagtataagggcagcgacatcctggcgctcagcgagcccattgcctgctgtatccgggcggtgctggagaagtcggagatccacgccggagatgtggcggtggtgtccgggccgggcattatcggtttgctgtgcgtccagctggccaggctccggggtgcgcgggtgattctgagcggcaccaaggccgaccgggaacggctggaactggccaagagcctgggagcggagtgggtgtgcgacaacgccgatgatctggcggcgctcctggcccgggagacagcctacggccccgatgtgtggattgaatgctccggcgccggcccggccctgagccaggggatcagcctggtgcgcaaacagggggcctttatccaggtgggcctctatggcaagccggtacccatggacatggatatggtggtgcgcaaggagctgaaggtcaccgccggctttgcccaggcgagatcctcctgggagatcctcctgaagctgctggagggtaacagcctgatgctggagcctctggtgagcacccggctgccgctggccgactggaaggagggctttgcccagttccgggacaaaaaggggatcaagattttcctggttccctgacagccgtgcgggcagccgcgataaacaaaaggaggatatttatgacaccctatccccatctgtttaccccaattaagatcggggggcagctgatcaaaaaccgcatcttctccgcccccaccggcctcatgagctataccgcccggggccatctcacgaccgagaatatggcctactatgagctgaaagccaagggcggatgcggtgtggtcaccttgggggagagcattgtccatgcggccaccggccagtcccacgaccggcagatctgtctggacgacccacatgtgctcccctctctgaccaacactgcccgggccatcacccggtatggagcggtagccaacattgagctgtcccatggcggtaaatacgccggcctggccagcatcggcggtcatgaaaaagagcgccgccccgcttatggccccagccacgatgtattgccttccggggaagaggttctggagatgccccagaagctgatctatgagatcctggatgcctatggcgccgcagccgatgtcgccaagcgggcggggtttggcatggtaatggtgcatgccggccacggctggctcttcaaccagttcctctcgccgttggaaaaccgccggaaggacgagttcggcggcagcctggagaaccgggcgcggttcctcctgatggccctggatcgggtgcgccaggcggtaggccccgggttccccatacaaatccgcatgaacggtgatgactttacggaaggggggctgcacctggaggactacaaggagttggcccggatggtggagagcagggtggatctgttcaatatctcctgcggcagccatgagcggcaggaactctttgtacgaacccatccctcggcgttcctggatcacggctgcaacgtatatttggcggcggccatcaaacaggtggtgtccaagccggtatcctgcgtgggtggcctgggcgacccggagcagtgtgaggagatcatcgcctccggtcaggccgatatcgtggagctgggacgggcgctgctggcggatcccttcctcccgaaaaaggcctacgcgggccagaaggaggacatcaccccctgtctgcgctgctttgtttgcttgggggagagcgtaatcaacggtacaaaccgctgttcggtgaatccggtgattggagccgagctggaggaaaaatattatgtggccccgcccctgagaaagaaaaaggttctggtggtgggcggcggccccgccggcatggaagcggcaatcacggcggcccggcgcggacatgaggtgctgctgtacgagaagacggatgcgcttgggggtgcgctgaaattcgccgaagccgtacccttcaagcaggatctgtatcgctttacccagtgccttatccgaagggtggaaagcagcggcgtgaaggttaccctgaatcaaagggtggacagggcgctggcagagaaggttcggccggatgtccttatcattgccgccggcgcccagccggtgattcccgccattccggggattgcgtcggataaggtggtgtcggtggcccaggccgaggcgaacccggacgctctgggagaacgggtggtgattctgggaggcggtttagtgggttgcgaaaccggtattcacctgggcatgaaggggaaacaggtcaccatcgtagagatgcgggatacgctggcagccgatgtgaatatgttccacggcatggcgctgggacaggagctgaacaagtatgtcaccgccgtcacgggaggaaccggcagagccgtgacggatgagggactgatttacactgaccgggaggggcaggagcacctgctgcccgctgacgcggtgctgtgcgccgtgggaatgagagcgcgtaccggtgtaatggaagagctgtggaacgtggtggatgagcaatacgttatcggagactgcgtcaagcccgctcaggtgacacaggcgatatccgatgcgtactacctggccaagagcctgtaagcgtgcaaatcggcaaaaaattgcggatgtgcaatgcgtgtggggaggaagtgcgaggctgatggcctgatctgagcgcaaaagcgggattattatgccggattccatgcgtttcctgcacaaaaaccgtaagtgcactacttggcgcgcggtttgcagtctatatgaagcgattcgggccagagacaagaagcgtcctcggaaccacaaataataaggagcgtaaattatggatcaggttattatcacagctgccctcactggcgcagtcaccccaaaggccaagaatgcgcacatccccattacgccggaagaaattgccgcggatgcctacgcctgctggaaagcgggcgcagccatggttcatctgcacatgcgggccgacgacggcctgggtgccatggacaaggagaaattccgggagaccatccggcttatccgcagccaccaggactgtgatgtcattatcaactgcacctcctccggcgcttctgccgagcatcccgccacggatgaagagcggatggcccatcaccaggagctggagggcatcgagatgggctcctatgacgccggtaccttcaactggatgcccggcggggtatttatgaatagcccgcagtttctcgagaagctgggcgacctgtatctagagcgcggcatcaagccggaggttgagatcttcgatgccggtatgctggggatcgccgattactttgcaaaacagggccacctgtctaccccctgccactatcagctttgcctgggcgtgctgggcggtatgcctgccacggtggaaaatctggtatatctggtgcgccatctgccggagaacgccacctggtcggcctttggcgtggggaagagccacctgcccatcctgtatgcggccctggccctgggcggacatatccgggtggggctcgaggacaatgtatacctcagcaagggagtgcccgccaccaatgtccaactggtggaacgggccgttcaagcggtgcgcaccttcggaaagcagcccgctacccccgctcaggccagagaaatcctgggcctgaagccgttgaaataacagaaggagaagatcacatgaaagttgttcgattggcagacgcctttgagtatccggttactggccattttgatatgcgggccctccggctgcacaacaaggaaaccagcaatacggtggactataccctgggcctgtcccacttcctgcccggcggcgggacggagtacgtggagaccggggtggagctgatctatttcatcctggagggtgagatgacggtgcgcacaaaggacgagaccatcgtacttaaaaaatacgattccatccacttcaatgtgggagatggaaaagagatccgcaatgagaccaacctccccgcctccatgctggtgattgccggtatgcccggccggggctgagccggatgattccggcatgacacttaggaagaagggaattctgtgaacaaagagcttgccaagcgattctactcggacatgtataagatccggcggttcgagcaggaggtatttgagttttataagaccggacagatggccggcctggcccacctgtatatcggcgaggaggctgtggccgccggcgcctgcgccgccattgaggcgcgggactacatcgcctctacccaccgtgggcacggccatctggtggcccggggagccgacatgggccgcatgatggcagagatcctgggaaaggaaacgggctattccaagggcaagggcggttccatgcacatcatggccatggatttgggcattctgggcgccaacggcattgtgggcggcgggattccaatggccaccggcgccggttattcgtccaagtaccgcggtaccgaccaggtaaccctgtgcttctttggtgacggcgccgccaacgagggcaccttccatgagtccatcaatatggctgccgcgtgggatctgccggtggtgtacgtcattgagaacaacctttacggcatcacggtggacagccgccgggtcaccaaagagcacgacttggccaagcgggcaatcggctatggcatccccggctataccatcgacggcaacgatgtagaaacggtctacaagacgatgcagaaggccgtcaagcacgcccgggagggtaaggggccctcgattgtggagtgcaagacctatcgccaccacggccacaacggcagcgatcccggtacctaccgtccgccggaggaggtggaggcctggaaagccagggatcctctgatcctgttccgggataagggctaccttacagagaaggagcgcaaggagatcgaggataaggtggaacaggaggttcaggcggcctgcaagtttgccgctgaaagcccctatcctgaggcgtccgagctgatggacgatatcttctgcgactgagagggaagaaaagatgagaaagatttattatcgtgacgccgtgcgggaggccctggacgaggaaatggcccgggatcccatggtgatgatgatcggcgaggacatcggcgtgggtgacggcacttggcgctgctccaagggactgtatgagaagtacggtgatctgcggatgaaggattcccccatcagcgagtccggcattgttggcatgggcatcggcatggcccttacgggcatgaggcccatcgtggagattatgttctcggactttatgctggtggctatggatcagattgtcaatcagatggccaaggtgtgctacatgtccggcggacagaaaaatgttccgatggtcatccgaaccaccatcggcgccggccgggccgccgccgcccagcattcccagaatctgaacgcggtcatcgcccacttccctggctccaagatcgtcatcccgtccgatgcctataccgccaagggcctgctgaaatccgccatccgggacaataatcccgtgattgtggtggaacaccgcaagcactacagcgtggagtttgatatgcccgacgacggggatgaaaatctcctgcttcccatcggcaaatccgttgtggtgcatgagggcagcgatgtcaccgtggtggccaactccttccaggtgggacagtgtgtcaaggtggccaagcacctggaaaagaagaagggggtcagcgtagaggtcgttgacctgcgtactttggttccgctggacaaagagacaatcattaaatcggtaaagaagaccgggcgtctgctcattgtggacgagggctacaccagcttcggcgtggccgccgagatctgtgccgcgattcaggatgaggtgttctacgatctggatgcgcccatccagcgcctgtgtgcgcctgacgtgtccatccccttcagccccgccctggaaaaactcgtggtgcccaatgaaaacaccatcctggcggctgtagagaagctgctgtaagaaggggggaggcaaaatggcaaaagtagtggtcatgcccaagctgggctacacccaggatgagggcactatcgcggagtggcacaagcaggtgggggatcctgtcgccatcggcgaccccttctttgacgtgcacaccgacaagtcggtgatcaccgtggaagcaagctgcgccggtactctgctgaagatcgccctggaacccggcaataccgtgccggtgcttactccggtggccgtggtgggcgagcccggcgaggacgccgacgccatcctggccagccatgtgaccgccgtggtggcggacgcccaggtggaggccgactttgatgacgatgaggatgatgagcctgccgagaaggccgccgcccccgcagagatgggagagctgaagctcaccccccgggccaaaaagtacatgaaggacaatggcatcgccgctgccgatgtgtcctccattcagggaaccggattccagggggggattaccgagcgggatatcaaagccagccccctggcccgcaagctggccgagaaaaccggcgtcgatctgagtaccgtacagggtaccggcgccggagagaagattatgaagaaggacgtggagcgggccgccgcagcggcagcttcttccggctccgatgaactgcagatcgcctccgtggttccctacaagggggtgcgcaagatcatcggcgacaagctggcccattccaagtttaccgcgccgcacctctacttcaccgacgcggtggacaccaccaatcttaccgccttccgcaagcagctcaatgagaacagcgaggtgcgcatcgccgtttccgatttgctgatcatggcggcctgcaaggcgctgaagaagttccccggaatcaacgtgacgctgaaagaggatcagatcgtcacctacaagtccatcaatataggtaccgccgtggccggagacaacggccttgtggtacctgtggtaaagaatgtacagaataagagcctcaccgatgtggccgccgaatccaaggatctggtggcgcgggccaaggaggggcgcctgaagcctgaggagtacagcaacggcaccttctccatctccaatctgggcatgttcggcatcggaaactttacggccattattaacgcgccggaagccgccatcctctctgtcagctcggtgcgcaaaacgccggtggtgattaccgacgaaaacggggaggataccatcgccatccggcccatgatgaatattcagctctctgtggatcaccggctcatcgacggccttctggcctcccagtttgtggagtacatgaagcagcttctggaaaacccggtacagattctgatgtaagtcctgccgccatggggcgggtggagaaactccgtcggtgatcagaaaatcccaataagcgtcagccgcctttgcggcggctccatatttaaaacgctcgccacaacaatgttaggaggttattaattatgaaagacctgtttcgtttggatggtaaggtagcagtcgtgattggcggtgccggcggtatcggccagggaattgctgaggcgatggcgttctacggcgctgaagtcgtgattgccagccgcaagatggaatcccttgtgcgggcgaaaagtgagatcaaggaaaaagtggggaaggatgtggccatctacacggtggatgccaccaatgaggacagcatcattgccctggtcaacaccgtggtaagcaatcacaagaaggcggatattctggtcaacgcccagggctataacaagaagttcagcctgttcgacttccccatggatgtaatggccgatatgatgaacgtcaacgtaatcggcgtcgccatggcctgtaagcacttcggtaaggtcatgaaggaaaacggctacggccgcatcatcaacctctcctccgtccggggcgtccgggccttcagcggcggcggcggcaacatgggctactgtacctccaagggcgccgtggatatgctgacccgcaccctggccgccgagctgggccccgaggtcaccgtcaacgccatcggccccaccctcacggttacgcccatgatggcggaggtcatcaaggagcacccggaaaccctgaatctgggtaacggtaagcctctggagagaatcggcaaggtggaagactgcatgggccctgcggtgttcctggcctccgaggccggcgcctttgtcacgggacagatcctctatcccgacggcggcctcaccgcgatcggctgacggaggggaagcggatatggtctccattttattcaaaccgacgctgcatcagtttgcaacctgccgggaattcgtggaggacttcaaactcagctcccaggatctgatcctgaccaatcagtacatttaccagccctattttgggcagatgggactgggctgccagatcctctttcaagaacagtacggtgccggggagcctagcgacgtgatggtggacgccattttggccgccgcggccaaaaccgactgcaagcggattgtggccatcggcggcggaaccgtgattgatatcgccaaggtgttggcggtcgccggcagtgagggagtggatgccctgtatgacaaggcccctgacctggaaaagaagcgcgagctggttattgtgccgactacctgcggtacgggcagcgaggtgaccaacatttcgattatggcccgtacccgcatgggaaccaagctgggactggtgagtcctgccatgtatgccgaccaggcggtgctcattcccgaactgctggagggcctgccctttggagtgtttgccaccagctccattgatgccctggtgcatgccgtggagtcttccctgtcccccaaagccaccccttacaccaagctgttcgggtacaaagccattgagatgctcatccggggctatcagcggattgccatggatgggcaggagagccgaatcggcctgctggaggacttcctgcttgcctccaactatgccggactggccttcggaaccgccggctgcgccgcggttcacgccaccagttatccgttgggcggcaaatatcacgtgccgcatggcgagagcaactatgcgatgtttaccggggtgctgaaaaactacatggagctcaggcaggatggggagatcgcggtgctgaaccgctatctggctgatttgctgggctgcggggtgcccgtggtctacgacaggctggaagaactgctgaatcagattctgcccaagaagcctctgcacgcgtacggcatgacccgggaagatatcgatgagtttgcccacagcgtgatcaccagccagggccgcctgatggcaaacaatttcgtccccctggacgaggagcgggtacggaaaatctatagggagctctactgagcgtgctgggcccgtacaccgataccgggatgagagaaggatcaaactatggactatcaatatgacatcgcagttatcggcgccggcccgggagggtatgagactgccatcaaagcggcgcagatggggaaaaagacctgcatcatcgagtccacctatcttggaggcacctgcctgaacgtgggctgcatccccaccaagactctgatcaaaacggccaatgtgctggataccgtaaagcatgccgccgacttcgccgtggaaggcgtggatctctccgcactgaaggtggatatggcaaagttgcagaagcgcaggcagaaggtggtttctaccctggtgggcggcgtcagaggcctgctccgcggaaacaaggtggacattctggagggaacggccagctttgcggacacgcatactctgacagtgggagataaacaggtgtccgctgagtatatcatcgtcgccaccggctccagcgtatttatgcccccctttatcgccgtggagggggagaaccgactgctcaccagcacggaggcgctggagctggatgaagtgcccgactccgttgccgtcatcggcgggggggttatcggagtggagtttgctttcctgctgagtcggttgggcagcaaggtcaccgtgctggagctgatggatcatatcctgcccatggtggatccggaggtctccgccctggcgcagaagcgtctggagaagggaggggtaaccttccgcctgggggccaaggtcagcagagtggaaaacaaccgggtgtactatgagtacaacggtgcccaggaacagctcggggccggcgcggtgcttatggcggtgggccgcacccccaataccgagggactgaacgcacaaggcattggcttggaatttgaccggaatgccatcaagaccgacctctgcctgcgtaccaacatgcccaatatctacgccatcggcgatgtcaacggcaaggccatgctggcccacacagcctctcacgagggcctggtggcagcggcaaatatctgcggccgccatgaggagatgcattatgaccgcatcccatcctgtatctatctggaacccgagattgcctgcatcggcctcacggagccccaggcccgggagaactatggcgacaacctgaaaattggacgcttcagcatgatggcgaacgggaaaagcctggtggaaggggacaccgacggcctgtttaaggtcatcgtggccggcgataccggagagattctgggggttcatctgtacggccagcacgttaccgatatgatcggggaggtctccgccgccatgaccgccgaggccaccgccgaggaactcataggttcgatccatccccatcccaccgtcaacgaggctctgggagaggcgtttatggccgcttggaacggtaaggccattaattccctgtaggcgatgaagatcttatgtatgggcgacagcttcaccttcggctacggggtatccgctgcccggcggtggacggccctgtgcggacagatgctcgggatggagctggtgaactgtgccgtcagcggcaatacgactggcggaatgctggccagactggaataccagatggatcgggtgaaaccgggaatggtactgctgatggggggattcaatgatctcctgctcagcggcagtgacgccgccgcccgaagcaatctgggggccatgggccatattacggcaggacggggggccattcctgtgttcggaacaccgcccctgccctgcccgcccattcgggtgaagtggaacggtctggccgatctggagcaggtcggtgagcaggccgcggtttaccaggactggatccgccggatgtgcggggtatttggctacccgctgctggatctccaccagaagctgatccgggtggccgcccgggagggacggcctctgagcgactactttttggacggcctgcacatgaatgaggagggcaaccgggccattgcggaagcggcggctccggctctgcgcagaatcatggagcggtgaggcggccaatcaacaggcgcccgtatttcccacctgacggggcgggaaatatgggcgttttgttattacatggaggatacaatgaacttgaaacgaagtcgtgggctgaccctgctgatgagctgcctgatcaatctgtgcattggatcagcttattcgtggagcgtatttgccgggccgctggccgagcggcttaccgctctcggcggagctgcctacagcgccagcgacctgggcatcgtctttacggtgtataacatccccggccccctctgcatgaccgccggaggctggcttaaccgccgcattgaggtgcgccggctgatccagatgggaagcgtgctgtttgtggcggggctgctgttgtgcagcagggcaaccactctgggcggcctggtcgtgggctttggactgctggtgggggttggcgtggggacggtgtacggctgtacggtgaataattctgtcaagctgttccctgacaagcgggggctggccggagggctgaccaccggcgtatacggcctgagctccgtgctggtgccgccagtggccaacgtcatgattcggaactggggggtcagtgccgcattccaaattattgccgtctgctttgcagtggtgctgctgctggcgtctgcatttgtggagcaggggccggaggaggcgggacaaatgctccctggaggcggccgggacatgagctggcgggagatgctttgtcagaaaaaattttatggtatgtgcgccatgctcctgtgcggcggactcagcggcatgatggtaatctcctctgcctccgacatggctcaggtggaggccggcttttcccccgcggctgcggccctgatggtttcggtgctttccctgttcaatgccggaggccgcgcttcggcgggtattctctccgacaagctggggcgcatcggcacgctctccctggtattcccaatctcggttgccgcgctgtgcgccctgtttttctttggacaggactcaatggcggtatttgcggtgtccatcgccctggtgggggcctgctttggggccctgatggggattttccccggctttacggccgatgagttcggacagagaaacaacacggtaaactatggcatcctcctcttcgggtttgcgctgtccggcatgctcggcccacaggtggcctcttgggtgatgagcggaaccggctcctaccgcagcgcgttcctcattgcggcggtggtggccctggccggttttgcatttacctttctccaccggcggctggccgcccgctcttaaatggcccctcgcagccacatcggctgcgaggataccagtgccgttgtatggacgcgcacggttgtccggctgtgccaagaaaaacgtcctgccgcagagttggagcactgcggcaggacgttttattttccctgtagagtaagtccgtgctggcgcaatttgcgggacacggtggagggatcgatattcaaaatctggctggcctccttcagattgcgggcgtaccgcagagcattctccagatactttttctcataagcagtaatggcgtcgttgaggctctgatcggggtcatattccacataggcattctggttgctcagatcgaaggtgccatagatgtagctgttgtccacatggccgttgggggcgcagcatacgaccagatattccatgacgttgcgcagctcccggatattgcccggccaggagtagttttccaataactcgatgttctccggggagagcaccacatttttgtgatattgcttattgaactccgaaacaaaatgctggctgagccgggcaacgtccccttcccgctcccgcaggggtggtacctgaatggggatcacatggaggcggtagtacagatcgctgcggaaggtgccctcccgcacctttttcttcagatcgcagttggtggaggcgatataacggatatccagcttgatggggcggattcccccgacccgggtgatttcgttgttctggatggcccgaaggagcttggcctgcatgtccatgggcatctcgccgatctcgtccagaagcagggtgccgttgttggcggcctcaaagaggccctgcttgccggaagcattggccccggagaaggaaccgcgttcatagccaaagagttccgactcaaacaggctggccggaatggaggcacagttgactttgataaagggcttttccgcccgggaactggtgcggtagatggcatcggcaatcagttccttgcccacgccggactctccggtgatgaggacggtggcggtggtctgtcgtacattctcaatgagatcatatacccgctggatagcggggctttcccctaccatctgaggggtgacgatgccgctgctgttcggcaccatttgcacatggcctgcggccccctgaagattgttgaccgcctccacaaagtggacaaagttgtcccgcagctccttaaaggtggatacgccccggttgcaggccaccacgtactggatctcgcctgcatcgtcaaagatgggcacgccggtgacgaatcccagactatccggccggccgaacatgctggagagcttcattacctttttcctgctccggattacctcggggacggtgggatcggtaaaataagtgccggtctccaacagttcggtgatccgcttgccaaggatctgctcaggggcgatacccgtgtggcggatataggcgtcatttacatagagaaccacctcgtccttgtcggctaccagaatattatcgtccagctcgtccataacgtgctgataatccaccacgctgtgggctacctcgtggacagaggcttcaatttcggtcagctcatccaacaaagcctgccgctcggggggagcggcggattcacgcagcctggtgatcaatacgtgaatcctgtcttccgcatggagcatgattgatctgtgcagcatgatattacctccgaattgtcgcgcatgacggttctgtttcatgatagcaagttccatttgatttttcaagtgcgcaggggaatcttgcgactttgcaaaatcatgcatatctgcaaggcgccggcgggagaaattggggagggagcacaataaatcaaggcttccaacggcgcagagatttggcacgtcacttgcactctgccctgatgaataccaggtgaaaggaacggtagggactatgcagctgcgttcattggattattttgcaaccatatgtgcgggaattggaaagaagcggatggccgtagtcatggcggagaatgagcattctcttctggccgctatgcgggcccatcagcagggcctgattcaggcggtgctgatcggtgatgagaagaagatccgggcgttgatggaggagcatcaactgagcacggagggcgtgcgctttcaccaggccgatgaaccggagaaggccgtgacgctggccacccggctggtactggagggagaagtggactacctgatgaagggaggactggagacgcgcaccatgatgaaggcgttcatcgcccgggaaaatggaatgcgtaccgggcggctcatgtctcaggtggcctttgtggaaaaccccttctaccacaagctgctcgccctcaccgattccgctcttaacccaaagcccgatctggcccagaaaaagcagattctggagaatgccgtggaggtattccacagcatgggggtggagtgccccaaggtggccgtgctggcggcggcggagacccttaatcccaaacttcaggagagcacagacgcccaggccctgaaggagatgtatcagcggggagagatcaccggctgtatcgtggagggcccgatttccattgacttgtccattgagcctgagtcggccaaaatcaagggctacgacagcccggtggcgggggatgccgacctgcttatctgccccgatctggtgtcgggcaacatgatgggcaagatgatgcttttcatgggcgcgcgcagcgccaatgtggtagtaggggccagagcgccggtgattctgtgctcccgctctgctaccgaggaggataaatttcagtccattctgctgggggcgattgccagccagaagctgtgacacggaaaggagagcttacatatggaacaggagatcaagctgctcatcatcaatccaggttccacctcgaccaagatttcgatttttgagaacggcgtagagcggtataaaaagagcctgtcccacccggcctctgaggtggcgcggtacgccagagccgccgaccaggcccccttccgccagaaggcggtggaggaatttttggccgagattgactatgatctgtccggcctgaccgcgattgtggcccggggcggctccctgccgcccattcacacgggggcctatgtggtcaacgatgagatgatcgatgtgctgcgaaaccggcccatcggacaacatgcctccaccaccgctgcgattatcgcactggatatggccaaacggctccatattccggcctacatctatgacggcaataccgctgacgagatggagccggtttcccggatttccggctgccccctggtgccgcggctgagcatgggccatatcctcaacaccaaggcggtgggccgcatgtacgcacagcggctgggccggaagtatggggaactgaaccttatcatggttcatttgggcgggggcattagcatcggcctccacaagaggggggttattgccgacatcatgaccgatgaggagggcaccttctcgcctgagcgcgccggcggactgcccagcatcggatgggccagggtatgctgctccggggagtacacctttgaggagctcagcgccatggttcggggcaaaggcggcctcaccgcatacctgggaaccaatgacgtgcgggaggtggaggcgaaggtgagggccggcgacaagaaggccgcactcatctacgaggccatgatttatcagacggccaaatgcatcggcggcctggcggcggcggcggacggagagatcgacggagttgtcctcaccggaggcattgccaattcggagctgctggtggaaaagctgcgccggaaggtgcgcttcattgctccggtggcggtgatccccggggaatttgagatggaggctctggccgcaggaattacccgcgtgctcaagggcgaggagaaggcccgggtgtaccgggaacacgaggaggaaggagcatgaagcgggaagcggtaattgtctctgcggtgcgcacccccgtagggcggtgccggggagccctggcagcggtaggcgcccccgagctgggcgcgctggttatcgccgaggcggttcgccgggcggggcttcagggagaagaggtggaggaggttatcttcggcaacctgggcaacaacgacagcgccaacctggcgcgggtggttacactccaggccggcctgccctttacggtgcccgccatcaccattgaccggcagtgctcctccggcctcaacgccattgccatcggtgcgctgatgattgaagccggggaggccgacattgtggtggcagggggaacggaaagtgactccaaccgtccccacctgatggagaaggcccgggtggcctatcaggtggcgcctccgcagtggctggttcgcagaactgcccctggggcgctcaatgtcagtatgggtactaccgccgaaaatctgggcagaaagtaccacatcacccgggaggagtgcgatgccttcgccctggagagccaccgaaaggcggccgccgcgcaggcggcaggccggtttgacgcgcagatgattccggtgacggtacccggaaagcgcggtaagaccaccgtggtggacagggatgaatgcgtccggccggagagcaccatggagactctgggcagactgcccaccgcctttgagcctgatggggtatgcaccgccggcaacagctctccgatgagcgacggcgccggcgcagtggtgcttatggatcgggagacggcggagaaaaagggcctggagcccctggcggtgttccgggggtttgcggttaccggctgtgaccccagcatcatggggatcggcccggtggaggccatccggaaggtgctgcgcaagaccggactcaccctggaggagatggatctcatcgagctgaacgaggcgtttgccacacaatccatcgcttgcatccgggagcttggactggatatggacaaggtgaatgtcaacggcggcgcgctggcgctgggacatccgctggcaggtaccggcgccattctgacggcaaagctgctgtatgagctgaaacggcgccgggcgcgctacggactggtggccttctgcatggcaggggggcaaggcggcgccgcggtatttgagcggatctgatggaaaggatgaatgatatggaaaacaaggcgaagatctccgtgttcggcgccggcaaaatgggaaccggcattgcgcttcagtttgcggtgaccggtttccccgtgaagctgctggcctttgatgtcagggagcagcagacctccgccggggtcattgaggataacctgaagctgttggcggaaaacggcctggtggatgccgaccggtgtgacgaaatccggaagcgcattgatattgtgctggactttgacgaggctgcccgtgaggcggacttcgccatcgagtgcgtgctggagaacatggagctcaagcagaactattttgcgcgcctggatcaggcgtgcaagcctggggcggtgctgtgcaccaacacatctgccatgagcgtcacggagatcgcctccaagtccgtccacagagagcggattttgggcactcacttctggaacccgcccttcctcatcccattggtagaggtggtgcgtaccgccgatgtgtccgaccatgcggtggatgcggtgtgtgacgtgcttcgcgaggcgggcaaaaagcccatcgtagtaaaaaaagacgtgcccggcttcattgccaaccggatgcagaacgccctggggcgtgaggctgtgagcatcattgccaacggcattgcagaccccaaggacgtggacgatgccgtcaaatacagcttcggaatgcgcctgggtaccatcggccccattgagcagattgacgccatcggcgccgatctgtgtctgagtatttcctcttatctgtatagctacctggaggactcccacgaaccatcgccccttctgaaggagaaggtggagcggggcgagctgggattcaagaccggcggcgtgggcatgcagacgtggacggcggaggaaatgaaggcctataacgatgggcttatcacaaatctcatcaaagtgggtaaagcgctggagcgcttttaagcagaggagaaagtgaggtaacgtacgatgacacaacataaggacctggagctgtttgcaaaaaacatccgcatccaggtgctgaaggccctgggcgaactgggcttcggccatctgggcggcgccatgtctgccgcagatgtgctgggtgtactctatggcggcgtaatgaacgtggatccgaagaaccctcagtgggaggatcgggactactttgtcatgtccaaggggcacgccggccccgccctgtacgccgcgctggcgctgaaaggctacttcccggtcgagcagctgctgaccatcaataccaacggaaccaggcttcccagccatcccgaccgcaacagcacgactggcgtggatatgagcaccggctccctgggccagggtatgtccaccgccatcggcatcgcccatggaaataaaatgctgggaaaggacaactatacctacctgctgctgggcgacggcgagagccaggagggacaggtgtgggagggagccctgtacgccccgcagcacaagctgtcccacctgattgcgttcctggactacaatcatcagcagctggacggctataccaaggatatctgcgatttgggggatatgcgccagaaattccaggacttcggctggtacgccctggaggtggacgggcatgacgtcgacgccatctatgatgccatcgccctggccaagcatcagcaggagaagcccactatgatcgtcctccagacccaaaagggcaagggctgcttcttcgcggaggggatcaagtataaccaccacatgagattcagcaaggagcagtgtgaggaggccattgcacggctggagaaggaggggtgctgaaatgtcgtacaggatctgtgagacgcttgaaacagagaagcaggccatgcgggatgtgtactgccaaacgatgattgatctggcaaaccagaacgacaggattgtagtcatggacgccgatctaatgaattctgtgggtacggtaccatttggggaggcccatcccgagcggacggtgaactgcggcattcaggaggccaacatgatcggcgtggctgcgggcatgtccgccgtgggcatggtgccctattgccacacattcggctgcttcgccacccgccgttgcttagaccagatttttgtgtctgccgcctttgccaaagccaacatccgcatcatcggcagcgatcccggtatcactgcggccatgaatggcgccacccacatgccctttgaggacatgggctccctgagggatatccctggagtgaccattatcgagcccactgactccatcatgctggacaatgtgattcgccaactggagagggccaacggcgtatattatgtccgcctgtcccggaagaacgcggtgcaaatttaccagcctggctccacctttgaaattgggaaggcggctgagctgcgccccggtaccgatgtgaccctcatggccaccggcgtgtgcgtggccgaggcgctgaaggcggccgatcagctggcccgggagggaatcagcgcggctgtggtcaatgtgttcaccctcaagccgattgaccgggaggcggtggagcgctacgcccgctctaccggcgccattgtcacggccgaaaaccacagcatttacaacggcctgggcagcgcggtggccgaagttgtggcggagacctgccctgtgccgctggagcgggtaggagttttggaccggtttggccaggtgggcacggtggactacctgcgggaaatctaccagctggacgccaagaccatttacgagaaggcgcggaaagcgatcgcgcgaaaaaatcagtaatcaaaatttgtaggaggtaattgatatgaaactcaccaattccggattccagaggggatataatcccatcgttgtggagggcgacgcctccgacatgaacatggacttcggcgagttgctgatggaaaagggcgatactgtcagctacaacgagccgaaagagtgcatttacgtcctggtgacgggcaaggttaccttccgctgggcggacaaggaggagaccgtggagcgcaaatcctgcttccatgaggatcccatcctgctccatgtgccccagaataccgctgtggagctgatgtgccagtctgacaaggccgaagtctccatccagcgcaccacaaatcccaagcattttgaacccaagctgatgaagggcgaggatctgctgtgcggctctgaactccggggcgccggcctgatgaacgaggcatccacccgtatcgtgcgcaccttcctggatcgctccaactgcccggagacaaacttcttcatcggcgaggtggtgagctaccccggcaagtggtccagcttccccccccatacccacgtggagcctgagatctacttctataagttcctgcccgaaaatggctacggctatgccgaggtgggagacaccgtctataaagttcaccacaacgacgccacctgcatggcccacggcgtgactcacagccaggctaccgcccccgggtatgcggagtactatatctgggccatccgtctgcgcgacaacgatcccatggttaccacggttgtacctgaacacgcttgggtggccgaaaaggacgccaagtatttcccggagatctgagcgcggaggaaattccggcaatgttattggggccctgtttgcacaggcgcaaaaaattgcacgaatgcaagcttccttctgcccaaaagccgcccgcgggcaggacgcaggcagagggagactgcctgggacgtaacgggacacaaggcctttggtgtgccggcccctgaacgccggaggctggcatgccggttgcaattgacatgaggcacatgcggcatgtaccataaaattgaggataagagacgtcttatccaccccaagccatgcgcatataaaaacgaatgaaaagagggaaacacatgaaacgacttcttgcattggttctcagcgcagcaatgttcttttcactggccgccggctgcacgcccgcagatcagaccgacgacggccagaccagtcccacggctgacgcgggcggcgaaggtggttataccattgccaccaacaacttcggcgtgggcgcctatcctctggatatgatggtggccaacgagcagtccgcggcggacgccactggcatgaccctgaccgttaccaacaacgagtttaccgccgacaaggttataacccagctgcaaaatcagctggccgccagccccgacggggtggccttcctgggtatctccgagacgctcttccctgtggcggcgcagtattgcaagaacgccaaaacgccctatgttttctatgcctgctctcccaccgatgaggatatggaaaagattgagcaggatgagtactatgtgggcatggtcatttacagccccaagaacgagggttcgcggctggccgagctggcgctggctgacggctgcaagaccgcggtgatctccgccggcgcttccggcgactatgcccatgaccgccgcatcatcggatttactgagacctttgaggccggcggcggtgagatcctgtttgtctcccactccgccgatccctccgaggccgtacagaagaccaatgactacatgaccgcctatggcgacacggactgtatctatgccaccggtgaggattacatcacccctgccgccgacgtcatcaagtcccgcggcattaccgattgcaagatctacggctccaacatcagcccctctgtgtgccagctcattatggatggccaggtggaagcctgcacgggcggtgagtttgtctgtggcagtctggcggtgacactgctgatcaattatctggacggcaacccgatcaaggacgccgacggcaccgcgccctactttgataacctaacccagttcatggtgaccgccgagaacgctgaggacttttatgagttcctcagcgatgagaacctggccacccacaccatctccgacgaggagtatcagaacctgctggttcgcaacaatcccgacgtggactatgactacttctacgacttcctgaccaactatgaggagaacgtttacgcaaaagtggaggcaaatgccgcacagtaagagcgctgtctcctgagcgggctggccgggcccttccagctctggccagccttatcccagaggcggcttgccgcaaacatggtggtgcagagcggccttctggagtgatggcatgtggagcgcggttaacatgatgtgtgactgccgcaagctatatgagtataaaaccggatgaaaagagggaaacacatgaaacgaatccttgctttggttctcggcctggcaatgctttccgcgctggcctccggctgcgcccccacaggggagtctggcggtggacagagcagccccgctgtcagtaccggcagcaatacctcttataccatcgccaccaacaacttcggcgcgggtgtctatccgcttgatacaaatgcggcctatgagcagaacgcggcggatgccctcggtgtgactttgaatgtaaccaacaatgagtttaccgctaacaagtcgatcacccagctccagaaccaactggcctctgctcctgacggggtggcatttctgggcatctccgagacgcttttcccggtagctgcccagtattgcaaaaatgcggagacaccgtatgtgttctttgcgtgtgcgcccaaggatgaggatgtggctgcctttgagcaggacgagtactatgtgggaacggtggtctacagtccccagggcgaaggggccggcattgcggagctggcgctggccgacggctgtaagactgcggtgatctccgccggcgcttccggcgactacgcccacgaccgccgtatcatcggctttaccgaggcgtttgaggctggcggcggagaggtgctgtttgtctctcactccgcggatccctctgaaggagtgcagaagacaaatgatctcttgaccgcctatcccgatgtggactgcgtatatgcgtgcggcaatgactacgtggcgccggccgcggatgttgtcaagtcccgcggccttgaggggtgtaagatttacggcgctgatatcagtccaaatatctgccagcttattatggatggtgaggtagaggcatgcagcggaggcgtgtttgcaagctgcggagtggcgattaccctcttggtcaattacctggatggaaacgtaatcaaggattctgagggcaaggccccctactttgacagcctggagctgttcacagtgacttctgacaatgcggaggacttctacaagttcctgagtgacgaggcgctttccacccacaccatctccgacgaggaatatcagaacctgctggttcgcaataatgccgaggtaaattacgactactatgtggactttatggcaaattacgctgaaaacgtgtatgccaaggtagaggccaacgcgaacagagcgtaaatacagcagactggccggggggagaaggaccaacccggacagccctgcatgttcaaaatggagcgtgagatatgagcttgtcaatgaaatttccgggagcctattttcaaggaaaagacgcgctggaggagttcgcggagcatacgatgtgctacggacgatccttcctgtttgttggcagcaaatccgccctgagggtatcaaaggaaaagctggcgcacagcttctcggggactgatgcccagatacagtttgagctcacctccggggtgccctgcgcctcggaggtacagcgggtgacaaagctggcggcggacagcggagcccaggtgctgtgcgccatcggcggcggtggagtgatggacattgtgcgttccgccgcgatggacttgggacgggctatggtcatgattcccacggcagcggcctccgacgcgccctgtacctttgtcagcgtgctctactccgagaacggccaggagattgtgggggatcgtatcttccacaagtgcccggatctggtctatgtcgataccaccattgtggcccaggctccggtgcgtctgctggtgtccggcatgggagacgccctggcgacctggtacgagatggagagctgcgcgggcagcgggcatgaaatgtccaacacggcagtggccctgtgccggatctgccgggagctgatcctggaaaatgggataatggcccggctggcggccgaaaaccatattgtgatccctgcgctggagcgggtgatcgaggccaactgcttcctctccggcatcggcggagtcaatacgggctgctccggagcgcatgggtttggcgactatctgtcctctctgccgggcgggcacgactatatgcacggcgagcgggtgatggtgggcctggtgattcagctgatcctggaggggtatcaggagcaggagatccggcgtgtgatccgtttcgggagaaaggtgggtctgccggtttctgtggctgagttgttcgaggagccgatagaagagctggcgcaccggatcggtcaggatacatataacgaccattttgtgtgccacatgaattgtgaccacagcgcccaggccattgagggcgcggtgcgcatggcggtcgctctggcaaaagaaatggaacaggaggagctgcatcttgagcgctgaaatcaaaaatattacccagatcggcatcgtgacaggagatctgtatgctatggtagatcgctaccagaaactttatgggatcggcccctgggagatccgggacggaaaaaaaggtttcaaggacgaggctgaggatctgatggtatatggaaagcgccaggacttcaaggtgtctcttgcgctgtgcatggcgggaaacgtgcagctggagctgattcaaccgctggatgagtacagcgactacgccagacacctgaaggagcacggcgagggacatattcaccatatctccatccttacagacaaccaggcgttccgcgagactatggcagagcggggaattgccagtgtgatgaagggacatgtggccggagtggagacgtttgagtactttgacaccggacgagagctgggcgtcaaggtcgagattcacgatctggagagctgacggaggttcggaaggtcatgtattacctggaaagcgccagcatggatcccgcctggaacctggccctggagcaatttgtctttgaccagctgggccccagagaggactgcttcatgctgtggcagaacgaccggacgattgtggtgggcaaataccagaatgttctggaggagatcaacagtacctatgtaaaggagcacggtattaccgtggttcggcggctgtcgggaggcggtgcggtatatcatgaccggggcaatctgaactttacttttgtggccagagattgtcagggcggaatgatcgacttctcgtccttttgccggccggtggtcgacgccctgcgggagatgggggtgccggctcagatcaatggccgaaacgacatgactatcggggacaaaaagttttccggaaacgcccaatatctgcggcagggccgggtcatgcatcacggtaccctgatgttcgactccgatctggaggcggtgggccaggcactggctgttcggcccgacaaaattcagtccaagggactgaaatcggtgcgcagccgggtcaccaatatcaagccctatgtaaatgatcccccaatgacggtggaggatttctgggcggccctgcgggaacgaatgttccggtgcttttccatgcgaaagtatcagctctcaccgcaggagctggaacaggtggaggaactgcgggagcggatttatagccagtgggagtggaactacggccattcaccggcttgcagcattcggaaggagcggcgggtggaggggtgtggaacccttcagattcatatggatgtggagaaggggaacattacccggcttgccttcaggggggattacttcgcccggaaggacagcgacgcactggcggagtaccttcagggaactccgctggaggaaggcgctcttcggcaggcattgaaagactggccggtggaggattattttgtgcgtatggacctggatacctttgtgtctgctatgctgcaataaagcattgcggaagcggaagcctgagtttgcagagactggatagagatggtgaaagcacccatgagagcatatgacctgaccaaggaacagtggaaacgggtaaagccacttctgcctccccccagggctgatggacgggggcgtccccgtaagaatgaccgcactatgctgaacggcatgctctgggtggtgcgaaacggtgctcattggcggatgctgccccgaaaatatgggccgtggcaatctgtatacgccagatttgccaagtggcgcagggatggcaccctggtagcggtgttgcttgcactgtcaggtgagaaaacgataaaggaagctggtacatcccgcagctaggataagctctggctgcacatcacgtttctggcaatattgttttctactacaatattaagaggtaagagggaaccctgtcgctgcggcggggttccctcctgttattggtagggaggaggagagaggggcattttgtaatcataggccggggtaccgcgcacctacagtctcccaatcaaagcgcctgacccaggcgaaaaagtaatacgccgggcaatatctcgtccaccgggggctgagggagaaaccacataccggtagccctaagtatcggactgtaggcgttggcgtgacaaagctctggattagcttcacatcgatgttgcatcgtgaagtctgaggaaaacgggcacatttacctgacccttgggtcccttgaagctctgttataaaattggtagaacagctttacatccttatccttcccaccgaagtcattatcttctttgcatatgcggctcccggttcctcacggcgttaaacctaatgagcctgaactcctacttcatcatctccatctatggtggctac

SEQ ID NO: 4288 - DNA, 827 bp, Unknown
  gut microbiota DNA sequence
aaatcagaaacctattttgatttccctgatatatttaagcggaccggccagagaaagttcggccccggcccatctgcgcgcttcttatggtcgcggccctcatcataagctgtttccagagggacaagacctatttcggacggtacaactactcaattggcggcaatgaggggttactcgtctagctggagtcaataccaggaaggtacgtatgctcagttccgtcactgctgaactgtttgtggcggtggttgccaatgcctatgataactaccagaggcaacccgtcttgaatagaaataaccttccttatgggccgttacgccccttcatactttggggctcagcttttgcgtttttgcaaatatttgcaggggcgcaaggctccaacggctgccgtctgagaaacgggctggcctgttgcttctgagagagcgccgtttacgtggcaaacccgctgaaagatcccaaattcaataaatctttatgtaataggtaatttttagccaaaaggagatgcagtaaattccaatggctatatgggcatggtttcggaggctcaatgaaatatttggcacagcgcttgcacgggttattcgggcaggacagactggctaccagtttgcggcggaacggttggcattggaacctggagaatccggggcgcttgtgtaaccatttattgcgggcgcttggagagctgctgatatccgaaaccataaactttgaaacttgttgctatgagggggaagaattcatgagtgaattgagaggagcctgcatcatcgggcagtcgggaggccccactgcggtcatcaatgccagcg

SEQ ID NO: 4289 - DNA, 1430 bp, Unknown
  gut microbiota DNA sequence
ggcggagttcacggtgatggccatgcgctttgcccgcctgcccgagggcggggagaatcccttctccgatgtgacctcctccgactggttctacgaccaggtggtgggggcggtgcagtacgggtggatcaccggctacaccgacggcaccttccggccggaggccaccatcacccgggcggaggtgacggccatcaccaaccgcctgctggaccgggcggcggacgaggactacgtggacgaccacgccggcgagctgcgccagttccccgatgtgagcgcctcctactgggcctaccacgacattgtggaggccaccaacgcccacagctaccgtgtctatgacggcgaggagcactggatgtaagcgggaaatggcaaggcccccggaaccaatcggttccgggggccttattcagccggcctggattgcctcataggcctgcatgccccactcgcccagggcgcgcagataggggtcaatggaccgccccagcgccgtcagagagtactctacccggggcggaatttcgggatactgctcccggtggaccagcctggctcgctccaactcctccagggacttggagagcatgacgctggagatgccctccagccgccgttggagttcgttaaagcggattacctcctgctggttgagctcccacaggatgcgcagcttccacttgccgcttaccagccccagggcaaatttgaccggacagccctccatggtgttgcctccccactaagtattttcttaccggctaaagaaaaattgcgtacttgtacttttttcgccgctgtctataatgataccaacaaggaccagaaaaggaaaggggtattttaaaatggaaatacagcaggcgattgagatccggcggagcatccgtgcctacggggaccggccggtggagcgggagaagctggaggccgtgctccgggcgggcaaccaggcccccatcttcggccggctccacatgagcgtctttgcggggccggagcagctccaagcggtggacgcggcggcggtggcgggcatggcccgctccggcgtgcccttcctggagaacctggccgcccaggagggctatcaccctctctacggcgcggcggccctggtggtgctctctgcccccggcggcctggatgagaagggcttcaacatggccaatgtatcctgcgcggcggagaacatgctgctggccgccgccgggctgggactgggctcctgctttctgatggggcccatggccgccttctccgacccggcgctgcgggcccggctggagctgcccgagggctacgagcccctggtaggggtggccctgggctacgccgctctggagcgccccgccgccccagagcggacggatgccggtatcacctggtgcagataagcaaagcggaggccgcccgagagggcg

SEQ ID NO: 4290 - DNA, 13253 bp, Unknown
  gut microbiota DNA sequence
gggcttgttgggctccaccgagtcgaacacggccttggcggaagcgcacaggcccgccaggccctggatctcggaggggatgatgatcttggtggccttgccgtcagcggcggcctggaaagcctccagggccttgatgcgcagcaccgcctccctgggatcggcctcgttgagcagcttgatggcctcggcggtggcctgctggaccttgaggatggcctcggcctcgccctcggccttcttgatggcggcctgcttggcggcgtcggcccggagaatcatggactccttctcgccctcggccaccaggatctgactctggcgctggccctcggcccggagcaccgcctcgcgcttctcccgctcggccttcatctgcttctccatggcgctctgtatgtccggagggggctgaatgttcttgacctctacccggttgaccttgatgccccaggggtcggtggcctcgtccagcagggcgcgcatctgggagttgatggtgtcgcggctggtgagggtctgctccagatccatgtcgccgatgatgttgcgcatggtggtgacgctcaggttctcaatggcggacatgggccgctccaccccgtaggcgtagagcttagggtcggtgatctgaaagtagagcaccgtgtcgatctgcatggtgacgttgtccttggtgatgacgggctggggcgggaagtccaccacctgctccttgagggaaaccacctttgccacccgctccaggaacggaaccttgaagtggatgcccacgccccagacggagtggaaggcgcccagccgctcgatgacgtaggccttggactgctgcaccaccttcaggtttgtggccagcaccagaatgagcacgacgaccaggataatgatgataatggggataaacggcatgcgggattcctcctttttctcttcctcggtttggaattaccgtcccggcgtagggacgggcaggggggacacgatgaccttgacgccctcgatgcggagtaccctgacccgggagccggcggggatggcggggcagccctcctcggtgcgggcggtccagggggcgccgttcacggtgatctggccctgggccttcaggttgtcgatggcctgggtgaccacaccttcggcgccgacgacccggtcggcgttggtactctcccggcggggatcggcgtacttcctggccagggggcggatgatgaccagacacaggaaggacaccgccaggaatacggcgaactgcacccagatgttgctcacaaagaaggatgtgagcagggcgcacagggagcctaccgcgaaccacagggaaaccagccccaccgtggcggcctccagcgccaggagggcgacgagggcggcgagccagcagatgcttggtatgggcatgggcactcctcctttcgaaatactactgctatcctagcacaactcggagaaaaagggaagcaaattcgctttccagatttgccaagcagagaaaaataaggtatactgctgtctgagaacgagaacggagcgaggcgatggacatgagagagctggaattgctggtccccaccctgttcgggctggaggggctgtgcgccgaggagctgcggcggctgaagctgccggaggtggcggcggagaacgggcgggtgcggtgcaaggccgccccggcggatatcccacgggtgaacctgaacctgcgcaccggcgagcgggtgctgctggtggtgggccgctaccgggccgccgacttcgaggcgctgtttgagggctgccgcgccttgccctgggaggaatttatcccccgggagggggccttcccggtgaaggggcactccctcaactcccagctccacgcggtgcccgcctgccaggccgtgctgaaaaaggcggccgctgcccggctgggggagaagtacgggctggaaaccctgccggagagcggggcgctgtatcagatccagttctccatcatgcgggacgaggtcaccctgatgctggacaccaccggggccgggctccacaagcggggctaccgggcggtgggggtggccgcccccctgcgggagacgctggccgccgccatggtgctcctctcccgctaccgggggagggaccccttctgcgaccccttctgcggctcgggcaccatcgccatcgaggcggccctcatcgccaaaaaccgggcgccgggcctcaaccgggccttttccgcccagaagtggcgttggctggacagcgggctgtggctccaggccgccggcgaggccatggacggcgagtatgacggggcatacgacatctggggtggggacatcgaccccaaggcggtggccatcgcccgggccaacgcggagaaggcggatgtggaggacgtggtgcgcttcgaggtggcggacgccgccgccttccgccgggacgcgccctatggccgggtggtcaccaacccgccctatggggagcgcatcctggagaagcgggaggcggaggagctttaccgggctttcggccgggcggtgcgcacgctgccggaggggtggcgggtgagcgtgctctcctcccacacggagttcgagcgcacctttggccgtaccgcagacaagaagcgcaagctgtataacggaatgctcaagtgcgacctattccagtacggaagataggaggaggggattgatatgaggcgaggaaagggaaagcgcgccctggcggggctgctggccgcggccctgtgcgcgggattgtttttcctcccggcctccgccgcgccggagggggccacggtatggggctacagcgaggggctggcccagtgcgagctggccggaaagtggggctatgtggacgctggccggaatgtggtcatccctctccagtacgacagcatcgtgtccttccagctcggcatcgcggcggtcaacctcaacggcaagctcggggtgatccggcaggatgggcggtatctcatccagccggagtacgacacccttctccccattgactgcgggctctatatcgcccaaaaggggggcggctggggcgtggtcagcatactccccttcccggacggggcggggagcaccaccaatgtgctctatgagctgagctatgaccaggtgcaggtggccgagcagggcggaactcaggtgctcaccctcaccaaagggagcaccgtcaccaaaatcccggtctatgacctgcccggcatcctggcggccaagggggtgccctccgccaagttccccctcacccggggcaagttgccctccttctccgatgtgtccccccgggactggttcgccctctgggtggacatcgcctacaatgtggggctcacctccggcgtggggaagaaccgttatgcgcccaatcagaccttgaccgtggcggaggccctcaagctggcggccacgattgagagccgctaccagggggacgactttcatctgagcaccgaaggcggaccgtactggtatgtgccggcggtagattactgcctggccagcggcatgattcaaaagggggactttaccgagcgggattacggacgggctgtcacccggcgggaggcagcggagctctttgccgccaccagtctggccaaggccatgccggaactcaactctctggcccgggtgaaggcgtcggtgcccgacatccgcagcggcgatgagggggcggaggccatctacagcctctacgccaagggaatcctgtccggggtggacagccggctgaccttccagccggagggcaccttcacccgggcggaggcggcagccattgtctcccgcatggcccgcaccgagcagcgcctgctcctgtggagctgaccaacggataaggaggatgggccctgtgaggcacctgttcttaatcaacccccacgcgggaaaatacgaccgcacccaggagatgcgggagaagctccgcactgccttggccgggcgagacgagccatgggaggcggcggtcacccaataccccggccacggggccgagctggcccgggcggcggcggagaggggggagccggtgcgcatctatgcctgcggcggcgacggcacccttaacgaggctgttgccggagccgcaggcttcggcaacgccgctgtgacccactaccccatgggttcgggcaacgattttctgcggatgttcggcccggatgcctgccgtttttacgatctccgggctctgctggacgcgccccaggcgccggtggatctcattgagtgcaacgggcggctggccctcaatgtctgctcggtggggttcgacgcccgcatcggttttggtgcggcagacttcaagaagctgcccctggtgagcgggccgctggcctaccagctctccgccgtgcgcaccattgtccaggggattcaccggccttaccgggtgaccatcgacggggagcgcctgccgggggaggcgtttaccctcatttgcgcctgcaacggccgctactatggcgggggctttaacccctgccccgacgccgtgcccgacgacggcctgctggactttgtagtggtgccggctgtctccaggctgaccattctgacgctgatcggcaagtacgccaaggggggcgccggggatatcccgcggatccttctgcgccgcggccgggagatgcacgtcgcctgtgagcgggccgaccggatcaatttggacggtgaagagctggtggattctgagctctctgtccgtgtgtctgctaaaaaagtaaactttttctttcccgaaggaacccattggattccggagaaacgggtgcgaaattagaaaacagaagagagcgggagaaaaaagaagatctgaacaggttttgaatgttaaattgaaataggaaccgcgcggaatggaaatttaacagattatttaaaaattaagacttgcggaatccgtcaagtgaggttattattataagcaggttagcactccggtaaaatgagtgctaacccgctgaattggtttacaagaaaaatgaatgatacatgaaggaggaaccccttatgaaactcaagccccttgcagaccgtgtggttatcaagctggtcgaagcggaggagaagaccaagagcggcatcatcctgaccggtgccgccaaggagaagcccgaggtggccgaggtcatcgaggtcggccccggcggcgtggtggacggcaaggagatcaccatgaccgtcaagaagggcgacaaggtcatcaccagcaagtactccggcaccgaggtcaaggtggacggtgaggagtatactattgtccgtcagggcgacatcctcgccattgtggagtaattttccgtgtaggggcgcacagtgtgcgcccgctctctggaacaagaaatcttccgggtgagttccacccgactcaaattggaggtaatacgttatggctaagattatctgctacggcgaggaagcccgtcacgcgctggagcgcggcgtcaaccagctcgccgataccgtgaagatcaccatgggtcccaagggccgcaatgtggtgctggacaagaagttcggtgcccccctgatcaccaacgacggcgtgaccatcgccaaggagattgagctggacgacccgtttgagaacatgggcgctcagctggtgaaggaagtctccaccaagaccaacgatgtggccggtgacggcaccaccaccgcaaccctgctggcccaggccatcatccgcgagggcctgaagaacctggccgccggcgccaaccccatggtcatgaagaagggcatcgccaaggccaccaccgccgcggtggaggccattaaggccaactccaagaaggtcaacggctccgccgacattgcccgcgtgggtaccgtgtcctccagcgacgagaccgtgggcaagctgatcgccgaggccatggagaaggtctcccacgacggcgtcatcaccgtggaggagtccaagaccgccgagacctattccgaggtggttgagggcatgcagtttgaccggggctatatcacgccctatatggtcaccgacactgagaagatggaggccgttctggacgacgccctgattctcattaccgacaagaagatctccaacattcaggagctgctgcccatcctggagcaggtggtgcagtccggcaagaagctgctggtcatcgctgaggacgtggagggcgaggccctgtccaccctgattgtcaacaagctgcgcggcaccctgaatgtggtgtgcgtcaaggcccccggcttcggcgaccgccgcaaggagatgctggaggatatcgccgtgctgaccggcggcaccgtcatcacctccgacatgggctatgagctcaaggaggccaccatggacatgctgggccgcgcccgccaggtgaaggtctccaaggagaacaccatcatcgtggacggcgccggctccgccgacgccatcaaggcccgcgtcaaccagatcaagagccagatcgagactaccacctccgactacgaccgcgagaagctccaggagcgcctggccaagatggccggcggcgtggcgatcatccgcgtgggcgccgccaccgaggtggagatgaaggagaagaagctccgcatcgaggacgccctgaacgccacccgcgccgctgtggaagagggcatcgtggccggcggcggcaccgcctatgtcaacgccatcgcctccgtggagaagctgctggccgagaccgagggcgacgagaagaccggtgtgtccatcattgccaaggccctgaccgagcccatgcgccagattgccaccaacgccggcatcgacggctccgtggtgctggagaatgtgaagaaggccgacaaggtgggctacggcttcgatgcctataatgagacctatgtggacatgatctccgccggtatcgtcgatcccaccaaggtgacccgctccgctctggagaatgcggcctccatcgccgccaccctgctgaccaccgagtccctggtggccgacaagccccagccccccgctccggctgctccggctgcccccgatatgggcggcatgtactgagccagagagaaaaaaggcccggaaccgatttggttccgggcctttttgcagggctgtggcctgtcgacggggctaaaaagagcctgctgctcccggcatacggaaaagcataggaatacgaaggcacccccggagccgttggactccgggggtgcctggtgtgtagggggagatcaatcaggccgcggcctgggcggcagcggggatcaactgcgcctggaagaaagcggcggtggcgtccaccgtctgatagagggcagtgaaatcgccagagaacacgttgtaggtgtggtcgcagttatccaccagcagcaactggctgtcggcgttagcggcggccttcacaatcttctcggcgttatcgggggtgacggtagtatcgtccttgccgttgatggccagaatgggggccttgatgtcagcagttaccttcagaatgttggtttcggccacctcctggaaccagcgctcacccagctctaagggctcccgccagtcaaaggtcatcgtataaaagccctcttttttggcctgggcataggcatcctcaaagctggtacccgcaaacagggaggcgccgttcagctccagggcgccggaccaggtgacaacagcctggaaggtgtcggggtgggcctctgcggccagcagggcgtcggttccgccctggctccagcccatgacgcccagattcccgccgtccacagtctccaggccggccaggtagtccgcggcggccttggcgtcaatgacggcggaggtgtagttgtaatcccggtagctggcggtggagtcgccgtttcccatgaagtcgatgcgcagggtggcgatgccgtcggcggccatacggggggcggccagggcgtaacccatgccggcttcgtcccggttggagccggtgccgtggagcatcaccacgccggggaccttcgcgtccttggaggcggagacgggcagggtcagggtggcgggaatctcatgggcagggatcccgtcctgggcggctacagggatggaaaccacggtctccacataggtgggcttgaggacgctgaagttcttgagcacctgggcaaactcagcgcgggtgagctggccgttggggttcagattgcccttctggtcaccggtcatcaccttgccataatagcagaaggtcatgccctccagatcggcggcggggatggagtcgtagtcgggagcctccttcatagccatgccggaggtgtccacggtaatacccttgtaggaggcgtaatcggcgataatagtggcgataccggaacgggtgattacggtgtcggtgccgtactcagtgccctcaaacaggccggcggaggcggcccagttaatggcgttggcgtaccactcgccctcggtgccggtcacagtggtcttttcaaccgcgggcttaccctccatgttatagagggtctggtacacggtggcgcgggtgacggtgccggtgggctcaaagcccttgttggtgccgttcatgatgccattgtccaaggcatacacggcggcgttgtagtaccaggagccggtctccagatcggcgggatagttggcgggctcgtccacaatggtgatgcggccggcgggctcgccgtactgctcggcggtgatggtgccgtccagctcctcagtggtgtagttgatcagggcgtcctccagggacacgcccacatccttccagccgccggcggtcttgaacacgccgtaggtgtcgccgcccttggcggtgaagtcgttggtggcgatggtgtaggtggcggcgggatcaaaggcctcgccgttcaccgtggagatggtgacgcggctgccgggattggcaggagcgtagtaggtagagttggcgtattgagtgccgttcacatagggaacgccggtgttgagggtgaactcaatgccggacacctgggggaaggcgccgatggcctcgggggtggtgcaggtagcggcctccagggcctccagaagctgggcgccggtcacgtcgatggtggccacggtgttgccgaaggggaagacggccagcaggctcttcttggaaatgtcgcccttggccagagcctcgcggatgccgccgccgttggtcagcgcggcgtccacgttctcctcgcccagagtctggcgggcctgccacaggatggcgtcggcggcaaagtcgcccaggttggtctcagtggtgcggacgccctcgccctcggggaaggtcatctcggccttggtgacgggatcggtggccgcgccgccggagcgggagccgttcagatccacctcggtggtggcgatcttctcgccgtagactttatcaacggcggtgttgcggtcgtccaccagcttggccacatcggcgtcggtcttggtgtaggaggcggcgggaaccagctcgtcggtcagggtgccggtctcctgatcgtagattaccacgcccacgttggccagagcggtgccggtggagacgatcttggcgccgttgaccacgttggtatcgcctaccttggcaatgatatcggcagtggtggagtggctgtggccgtcgatgaacaggtcaatgccatccacgtgctcgcacacgtcgatggagcggttgccgatgctctcgtcatcgatgcccaggtggcccaggcagacaatcagatcggcgccggccttgttcagctcatcgacctgagcctgggcgacggcgtacagcttgtcggtctgggggaaggtgatgccgggcatcttggaggcgtcggccttggtcagggtctcgggggtggccaggccgaacacgcccaccttcacgccgccgaggtcaaagatcttgttggaatcgaagacagtcttgccgtcggcctcagtggtcatgtcggcgcacaggatggggaagtcggcatccttggccagggccttgaggttgtcgatgccgaagtccagctcatggttgcccacggtcatggcatcataaccggcggcgttcatgaactcgatggcgctcttgccctggtcggcgctcaccaggggcttgcccatgatggagtcgccggcagagaccagcagcacatcggcgccggcggcctcgaagtccttcttcagctgggccacaccggccatgccgaaggaagcgccctcctcgtccagatcagcgccgtgggtgtcgttggtatggagaataacaaccttaccatcgacatcgggaatgacatagggggttgcggtttcttcctctgcggcaaaggcggccccgaacagggagcacaccatagccagcacgaggaacagggacaggaatttgcttgcgggttttctcatagaaaacattccacctttcctcattgcctttccctatgaaaggcgttttttggggcatcctaatggtaacaaactggaaacaaaaatacaaggtggcggagaaaaaaagtgtgcaaaaagcacacgaatcttatgagcccgctgctcaaaagattcgtgtaggaaataatttatttttcagcccagttgccggtggcctccgccttcagataggcgttgatgaagccgtccagctcgccgtccatcacggcgttgatgttgctggtctcatagccggtacggttgtcctttaccaactggtagggcataaacacgtaagaacggatctggctgccccactcgatcttgagctgtacacccttgatgtcggagatcttctcggcatgggcctgcatctgaagctccaccagcttggagcgcagcatccgcatacaggtgtcccggttctgaaactggctgcgctcggtctgacaggaaaccacaatgccggtgggcttgtggatcaggcggacagcggaagaggtcttgttgatgtgctggccgccggcaccagaggagcggaacacctgcatctcgacatcctccgggcggatgtccacctctacatcgtcgggaatctccggcatgacctccagcgcggcgaaggaggtctgacgccgggcgttggcgtcaaagggggagacccggaccagccggtgcacgccgtgctcactcttgaggtggccgtaggcattctcaccctcgatggaaatggtggcgctcttgaggccggcctcgtcgccgtccaggtagtccagcgtcttgcacacatagccgtggcgctccgcccagcgggtgtacatgcggaagagcatctgggcccagtcctgggcctcggtgccgcccgcgccggcgtgaaaggtgaggatggcattggagccgtcatactcgccggtgagcagagtggacagcttggcctcctctatctcggcctccagcttggcgaagccctcctccacttcgggaaccagagtctcgtcctcggcctcgttgcccaactcacacagggtcatcaggtcgtcccactgggtcttgcgcttttgctggccctcaatcttgtcccgtagttgcttgacccgctgctgcaccttttgggccttctccaggttgtcccaaaagccgtcggaagcgctctccgactccagcatctccacctcccggatggccgtctccaggcccaaggcctggtccagctcgtccagctctgggcgcagattgttgagctttaccttgtattcatcaaactgaagcatgtaaaaccacactcatttccataaaatagccctcatattatatccaaaagagtggaaattgtaaagagagcggcaggaaaaaaccgcccgagggcgggcggttttatcgctcactgaccatccagccgggatcggcgcggaaaatcaggtcatctatgtcttcctttggctcagtgcgcagaatggtttcgtcctgctgcgtgtgttgcatggggatacctccttcgtaagtcgtgtacatatcagtatatgccggagggagggaaagatgtgtacgattcctgtcgggcggctttttaaaaataagggttgacaagaggctttgactgtggtattctaattgagcactcaaaagcaagagactggagccctccacgccggagtggcggaattggcagacgcccgggacttaaaatcccgtgggaggaatcccgtgccggttcgaccccggtctccggcaccatatcgcggggtagagcagcttggtagctcgtcgggctcataacccggaggtcggtggttcaaatccatcccccgcaaccataaacccgtcagaatccatggattctgacgggttttctcttattttcatcacttttttggcccgattatttttgctgttttcgtctgacctaagccgtgacctatacgggatttcggagcggtcaggtctggagccttccagagaggatactgcccatcgttcgggccgcctgacgctgggaggctgtggtcacatggacgtaggtgtccagggtgaaacccgccgagaagtgccccagcatcccggacaccgttttcacgtccactccgttctggagggccagggtggcataggtgtggcgcaaatcgtggaaccttaccctaggcaatcccgcccgtttcagcacccggtggagcatgtgcagcacgctgcccggggagatcggcccgccggtggggctggggaacacccaagggctgcctcctgctttctttctctgtgctttcaggacgtctatcgtatcctctgccagcggcagggtacggtaggtgttctttgttttcaagggcacctccaccacctcgccgttgatccgggcgatctgccgccgaacccggaggtcaccgcgttccaaatcaatgtccacccatttcaggccgaggagttctccccggcgaagcccggtagccaattccagatagtaaagctcaaacgcgccgctgtccttggcctctctcaggaaggactggagctgctccaccagcagggttttcatctccttgtgctccagccgaggtagggcacagccctccgcaggatttgcggtgatcagtttctgctccctggctaagttcatcgtagaggagatgatctggtggatgttccgcacggtcttggggctcagccccttggcctggtgcctggactccagccggtctacccttccctgctccagcagcttcttgtagaacttctgcaattccagagaagtgagtttttccagggggaccttgccgatgttgggcttgatgtggttgtcgatgtagccccggtaggtctggtgggaggagggccgtaccttcaccttggcgtagtgctcaaaccacacctccatctattggcccacggtgtactggcctgctttggtc

SEQ ID NO: 4291 - DNA, 18901 bp, Unknown
  gut microbiota DNA sequence
cggggcgcgcccggcggtgtaccggccctcccagcgaccgtccttctgtttgcggaggttgccctccccgtttgctctgcgttttgccatggttttgatccctccttcgcagcaacacaacataccgcagaaggaggaaaatagccaggccaacggcgcagagttaacaggatattatcatttgccctttctttgttttaagcatatcatttcccgttcagcgcgaaaggccttatctttgttttatgcggcgcaggatttgcgtacccaggcagggaagggtgtcccaagcccaaacgcctccacagcggcggccaaaaaggccggaaccgcctgggagcactgactttttcaagagcaccgaccccctaaaattcaaattttccgaacagcgaccacctaagtttttctgaggcgaaatcccgcaaccccttgacacgccccgcactgcggggcattgtgaccgggccggcggcggtttaccgccgcggtcctttatcctagtacgaaaatcgaacgcctccggagaacccagaatcgggcccccggaggccttttctctctggaattcatgctactctgggagggtagattttccgtgaccctcccgcccaggaactacttgcccacacgcggcccaacgccgccaaaatcccgtttcagggggccctgccccgaaaccggcacataggggtgacacggccgtgacggcggtcgctctctggcttgtccctctctgcactttgccgcacgctgtgcgcttctcccgagaagtgggtgcgggtttccgcccgcaaaaggcgtttggcaggcacttacggcagttcgcctccccctcagaatgggcaaaatctctccgaaaggaaattaacgattgacaacgaataaaatggggaatacaatcaagttgctacaaataaaatagcgaacgcacaggtgcgtctcccctccgggtggagacggaaaagggaagccgggtgaaactcccgcacagggccgctgctgtaattgcggagtcccgccaaaaatgccactggcaggtaatgccgggaaggctggcgtggacggagacgcatgagtcagaaaacctgcctgctgcgtgcacaggacatgctcttcggatctcaggagccagtgtgcagcagaggaatatcccccgtaggcgggggatgaactgtttgcaggaaaaccgggatcggagcacgctccgaccccggttttttgcgttcatcttcccgatacagaaaggcggtcatgcgcaaatggaacgatacgaataccccttctcagccctggtggggcaggaaaagctgaaaaccgcgctgctgctcaacctggtggagcctcgcctgggcggcgtgctgatccagggggagaagggaacggccaagtccacggcggtgcgcggtttggcagagctgatggacgaggtggaggtggcggaggggtgccccttccactgccggatggatggtgaggcgctgtgcgacgagtgccggtccagcccggcccgccgcgccgttccctaccgccgccgggtagtggagctccccgtaagcgccaccgaggaccgggtggtgggcaccctggatctggagcgggcgctgaaggagggcgtccgcgcctttgagcccggcctgctggcccaggccaatggaaatatcctctacgtggacgagatcaacctgctggaggatcacattgtggacgtgctgctggactccgccgccatgggggtcaacaccgtggagcgggaggggatctcctacagccatccggcccgcttcatcctggtgggcaccatgaacccggaggagggggatctgcggccccagctgctggatcgcttcggcctgatggtggaggtgcacggcgaacaggaggcggaggcccgcaaggaggtggtgcgccgccgcctggcctttgaggaaaaccccgccgccttctgcgcccgctgggcgccggagcaggaggccctccggcgtcggatcgggtcggcccaggccctgctgccccaggtgtccctgcccgagcctctgttcgataccgtggcccgggtgtgcaccgccctccaggtggacggccaccgggcggacatcaccatgctcaagacggcacgggctctggcggctctggagggccggacggaggccggaatggaggagctgcggcgggcggcggaactggccctgccccaccgcctgcgccgggccccgtttgagcaggctggagatgccggcatcgactgggaggcgctgttctatggataggcccttgtatcctttcaccgccgtggtggggcaggagcgggcaaagcaggccctcctctgcctggcggtggagccccgcatcggcggggtgctgctgtgcggggaaaaggggacggccaagtccactctggtgcgggccctgggcggcctggacggagtgcgcctgctggagctgccggtaagcgccacggaggacatgctgctgggcggtgtggagctggaggcggcggtgcgcaccggccgcagaaccttccagcccggtttgctggcccgggccgacggggcggtgctctatgccgacgaggtaaatttgctcccctccgccctgaccgccgccctgctggacacgctggagaccggagtgtgccggatggagcgggacggcatctcccacacctgccccgcccgcttcgccctggtgggcaccatgaatccggaggaggggacgctccgcccccagttgctggaccgctttggcctctatgtggcggtaacgggggagcgggagccggaggcccggaaagaggtggtgcgccgccgcttggcctttgaggaaaaccccgccgcctttcgcgcccagtgggcccggcgggaggagcggctggccgggcagctggccgccgcccgcgccctgctgccccaggtggacgtgggggaggcggaggagcaggccgcctgcctgctggcccggcaggccaacgccgccgggcaccgggcggagctggccatcctgcacaccgcccgcgccctggccgccttggccgggcgcacttacatcaacttggaggatctccacacggcggcggagctggccctgccccaccgcaggcgggagggaagcgaaggcccgcccccgcgacaggagagaggggaggagccccctcggggatctggagcggacggacaggccgggggcggggatggaccggcggacgagtcccaccccgccgacgggccgccgcaggagggggttcaggcccccgcgccacccacggagcaggggccgtcccgagagcggttggagcagggggagaacctctacgaggtgagagccctgctcaccacccgggccgaccgcctggcccgccggggcagcgggtggcgcagcaagacccgctccgccacccggcgggggcgggccgtgggcgaccgcatcccccgggggaaggcggaagatctggcggtgggcgccacgctgcgggccgccgccccctatcagtggagccggggcggcgggcagtccggcctggtcatcctgccccccgacctgcgggtgaaggtgcgggaaagccgcgtgggtgcggacatcgtgttcgccgtggacgccagcggctccatgggtgcggccaggcggatgaaggaggtcaaggaggcggtgctctccatgctgatggactcctaccagaagcgggatcaggtggggctggtggccttccggggcggggaggccgccgctgtgctggagctcacccgcagcgtggagctggcccagcgggagctccaggccctccccaccggcgggcggaccccgctggccgctgggctggaggaggcccgccgcatgctggagcggcagcgccgccgggtgcgggattccctgcccctgctggtgctcatcacagacggccgggccaatttcagccggggcggcgacccggtggaggaggccctgcgggccgcccggcgggtggcggaggcccacatcccagcggtggtgatcgacaccgagcggcagtttgtctctctggggctggcggcccaggtggcccaggtgatgggggcgccctgctaccgggtggaggagctgcgggccaggccgctggcccagctggtgcgcggccacagcccggcggcgggttaaggaggcgtctatggtaaagctgcttttcgtgctcatgaatgaataccggctctgggccctgcctcaggccctggccgccctggagcgccggtaccccggcgcggtggagggcaggggctactccgtgcgggagataaatgccgacgccgggctggagcgggcccttctggccgacggcgcggcggcggacatggcctttctggcctcccatggctcgattcagaacctgtactgcttttcccggctgtgggaggcgctggaggggcggccggtctattttacctccaccatgggggacgagctggccgagctgctccccaggttggggctggagccggccctctacgccgcgctggacagctattaccaggcggggagcccggcggatctggaggggctggtgctctgcgccctcaacggccgcttcggcggggattatcccctcagccctccgagcccgccccgggggcagggggtgtacaccctggagggcttcctgccgccggagagggaggcggggtaccggacacggatggccgccgagacccggccggtcatcggtgtgctgatccatgaccactacgccagaaccggcaatctggagcatgtggacgccctgctgcgggccattcaggcccgggggggcgtcccatacgccctgtccgactccttcgccgccgaccacgggacggagcagggcatcctctaccggatggagcggttctaccgcagggcggacggcacccccattccgggggcgctggtggtgtcctacggcttcagcctgaccaccctggccgggcgggaggcccgggcgggccaggtgcccgccagcgtgtttgagaactggggcctgccggtgatccagggactcaccacctacttcagtgctgacgagtaccggcgggatatccggggcctggatctggtctccctgcccgtgtgcgtctaccagccggagtttgacgggcagctcatttccgtgccctacgcggtgacggagcggacggcggacgggcggaaggtgtgccgccccctgcccgaccgggtgacgagggtggcggagctggcctgccgctgggcggaactggcccgcaagcccatgccggagaaaaaggtggccgtcatctttcacaacatgccgccccgcagcgacaccatcggcagcgcccacggcctggacacgccggagacggtattccgggtggtgcgggccctggagagccagggcctgcgcacagcctactccttttccagcggggcggagatcattgcccgcatccgggcggcggtgaccaacgacaaccgctggctctccccggaggccgcgctggagcgggcggaggccacggtgccggcggagcagtatcaggggtggttcgaccgtcttaaccccgagacccgggcccagatggaggagagctggggccccgccccgggcaccgtgatggtgtccgggggccagatcgtcatccccggcatccgaaacggcagcctctttgtaggggtgcagcccatgcgctcggcgccggagcgggcggaggagctctaccacagcaccgacagcaccccgccccactcctacctggccttttaccgctgggtggacgaggtgttcggggcggacgtggtgctccacgtgggcacccacggcaccctggagtggctaccgggcaaggagatcggcctgtcctccggctgcttcggagacatctgcatcggcggggtgccccacctctacatttacaacatcagcatcctgggggaggggatgcaggccaagcgccgctcctacgcctgcatactcgaccacctgatcccctccatggacgacgcggacacctacggcggcctcaccgatctggacgaggccatcgacggctactatcacgcccgccaggcccggcctgcccaggtgcccgcactgctggagcggatcttcaccctggcggaggagctggaggtgactaccgatctccagctggagcgggcggatctggaggccgagccggaggatggggtggcccgcctccaccgctggatgagccgcatcaagacctccctggtgcgggacggcctgcacatctacggccagcccccggaaggggagcgcttcgaccacctggcccgagccctggtgcgggtgccaaacggcaccgtgcccgccctggaggacagcatactgctggcccaggggtgggcgcccgaggagctgcgggccgcgccggagcggctctaccccgacgggcgcaccgccctgcgcattgtggacggggcgattgcgacggcccggcggctctttgcccgcctgtcggcggagggctaccggccggaggctgcggcggagctcctggcggaggagggctttccgggggacaccaccccgctggcgcgggtgctggactttgtctgcacccaggcggcgccccggctgcgccaaaccacggacgagctggatctgctgctggcgggggtggaggggcgctttgtcccgcccttgcccggaggcagtccctcccgggggaatgcccacatcctgcccacgggccggaacttttacgccatcgaccccgcggccgtacccagccgggcggcatggacggtgggacaggcgctggcggagcaggcggtcgacgcctaccgggcccagaagggggaaccctggccggagagtgtagcgatcgtggtctactccgacgagtgcatgaaaaccaacggagaggacatcgcagaggtgttcgccctgatgggggtgcgcccccgctatctgggccagacggacaaggtggtgggggtggagcccatccccctggcggagctgggccgcccccgcatcgacgcggtgctgcgcatcagcggcctgttccgggacaccttccccaacgtggtggagctggtggagcgggcggtgctggccgtggccggcctggatgagcccccggagcagaactttgtcaaaaagcacaccgaccaggagcggaagcggctggtggccgagggcctgagcgaaaatgaggcgttggagcaagcatccctgcgggtgttcggctgcccacccggcacctacggcgcaggggtgagcaaggccatccacagccagaactgggagagctggagggatctgagccaggtctacaccctctggagcgcccacgggtacagcagccgcttccacggccaggccatgccggagctgttccgcagccagctgtcctccgtggggatgaccatcaagaacgagtcgtcggtggagatcgacatgctggacagcgacgatttttacagctatcatggcggcctgatcgcctgcgtccgggactgcagcgggcagaggcccgtctccgtggcgggcctcaccgccgaccccgcccgaccggagaccgcccgtgtagagaccgagctggcccgggtcatgcgcagccgcatcctcaatcccaagtggctggagggcctgaagcgccacggctacaagggcgcccaggagctgtccaccacctttgacaccttttttggctgggacgcggcggcggaggtggcctccaactggatgtacgacgccatggcgcggcagttcctcctggacgaggagacccgccggtggatggagcaggtcaacgacgcggcggtgctccagatgagcgaacgcttcctggaggcccaccagcggggtatgtggcaggcgggtgaggaggagctgcgggccatccggcgcatctacatggacatggagggcgtgatggaggacggctttcaatgaagggcgggctggacaccctggtgctgcgcctcaccaaccgctgtaatctggcctgcggctactgctacgccgggagcgggccggcgggtgaggatctctcccccgagcgggcggcagaggccgtggctctggcctgcccgccggggggagtcctgcgcatccagttcactggcggggagcccctgctgcgctgggacacagcggcgaaggtgctggacttcggccgggcctccggacggaggttccacgccgccatccagaccaacggcacgctgctcacaccggcgctctgccgggaactgagggcccggcgggtggccgtgggggtgagcctggacggggtgggcccggacaacgccgcccgccgcaccccggagggggagccctccttccaggcgacggcccgcgggctccagaccctggcggcggccggcatggcggccaacctgaccgcggtggtgtcggcgggcagtgtgcgcggcctggaccgtctgctggacttcgccctgtggtgcggcaacgtccacggtgtgggcctggatctggtgcggccccagggccggggcgcgggggcggggctgtccccctccccccaggcgctggccgagggtttgaaccgcctgctggcccgtcacgatcagctggcccggctgggccgcccggtgcggctcaaggagctggagcgcctgcgcctgctgctgcgcacgggctgcagacgggactgctactgcaacgcccagaccgggcgctccctggcggtgacgccggacggccgtctgtggccctgctccgccctggccggggcggaggggtgcctcctgggtacgctgggcgcggggacggccctgccgcagagtccctgccccgggctggaaccgccggaggaatgcgcccgctgtcccgccttcggcctgtgcggcgggggctgtcctgccgcccggcgggccgggccctcccccctggactgccagatgcaccggaggatgctggagcacgcctgccggctggaggggaaattggagtggtggaatacgtggaaaaccgcgtttccggatagagaagaaccagatgacaaggaggaatcgcaatgatacaccatctgaatcgggcggccgggctgtgcctgaccgccgccctgctgctcacagcggcgggctgcggccagcagactgtgccggagagtcccagcccgtcccccgtggtggagaccgctgcggcagacaagaacgacctgaccgtggtgcgcagcatggagctccagtatgccaacaacttcgcggtggactactgtgccaacggctgtaagatcatcaccgacggcgcgggacagaagttcctgtgggtgcccgaggggggagaggcgccggacgacacgggggacatgaccgttctccaggccccgctgaccaagctgggctgcttctccaccacccacgccaccctgtttcacgccatcggggcgctggacaaggtgagtctggtgaccaccgacaaggataaatggcatatcgagcaggttgcccagcagattgaggacggcaccaccacctatgtgggcaagaactccgcccccgactatgagctcatcagcgccgccgcgccccagatcatcctgatctccgccaacaccatgcacggcagcgacgaggtgctggccaagctggacgagctgggcatcccctacatcgccgacagccagcacctggagaaccaccccctgggccgcgtggagtgggtcaagctggtgggcgccctgctggacatggaggaggaggccgacgcctacttcgacgaagaggtgcagcgggtgaatgccgtggccgagagcgtggccggggagagtgagcaccccaccatcctccagacctatatcttcaagggtaccgtctacgtgcgcaatggcggcgactatgtcaacaagatgctggagctggccggcggcacctatccctttgcggagctggagcccggccagggcggcaacaccaagatgaccgtggagaagttctatcaggggacggtggacgccgagatcttgatctatgacaacaccagcgacgtcagcgtgtccaccgtggcagacattctggccaacggggactatctggcggatatgaaggccatccaggagggcaacgtctggggcatccagaagaactactggcagtctgccgacgacgtggccaccatgatcgaggacattgccaccattatctaccaccccgaggacgcggatcagctccactacttctataagctgcccgccgaataagccgcggagcccggcaggggaacgcgcggaaaaggagagaggcctatgagacaacacacaagaaacgccgtgggatttgttgtgctggcaatactgatggccgccctgttttactggaacatcaataccggctcggtgcatctgagcctggagcgcatgctcaccctcctccgctggggcaacgacggcaccacggagggcaatatcctctggaaaatccgcctgtcccgcctgctgggggctgccctgctgggcggggcgctgtccatcgcgggcttcctgctccagacctttttcaaaaaccccatcgccggcccctttgtgctgggcatctcctccggctcccgcctgtttgtgggcttcttcctcctggcggccacccccattgtgacggagggcttctccccctacgtcatcttcctggcggccttcgccggggcactggcggccatggctctggtgctggccgtgtccagccgggtgcagaacctagccatgctgctggtcatcggcatgatgatcggctacatctgcgacgcgggcaccgacttcatgatcaccttcgccgagagtagccagctccagaatttcaccatctggacgatgggcagcttctccggcatgacctgggccaccctgggggcctccgccctgatcaccatccccacggtggtgctggtgtttctcctgtccaagcccctgggggcctatctgctgggtgagaactacgccaagagcatgggggtcaacgtcaagggcttccgtgtggccctgatcctcctgtccagcatcctgtcggcctgcgtcaccgcctttgccggccccatctcctttgtgggcatcgccgtgccccacatcacccgcctgatcttccgcacctcccggcccatggtgctcataccggccaccttcctcacgggaagcgtgttctgcctggcctgcgacctcatcgcccgcacggccttttcccccacggagctcaccatcagcaccgtcacctcggtgctgggcgcccccgtggtgatctggctgatgatcaagcgcaggaggaatggctgatgtattttgagacccagaagctgtcggtgggctaccatcgccggcccctcatcgaggacatcgatatcggcatctggcaggggggcattctctgcctgatcggccccaatggctccggcaaatccaccatcctgcgcagcatcacccgccatctgacaaagctgggcggcgtggtggccatcggcggccgggatttggacggcatgagcgacaaggagctggcccgccacgtgtcggtggtgctcaccgaccgcatcgagccggagctcatgacctgctgggaggtggtggccgccgggcgctacccctacaccaaccacttcggaaagctctccagggaggatcagcgcatcgtggaggactccatggcccgggtcaacgctctggagctgcgggagcagcggtttaccgaactcagcgacggccagaagcagcgggtgctgctggcccgggccctgtgccagcagccggaggtgatcgtcctggacgagcccaccagctatctggacatccgccacaagatcgagctgctggacatcctccgggagatgaccgccagccgggggctgtccgtggtgctctccctccacgaggtggatctggccaccaagctggccgacgtggtggtgctggtaaaggataacgccatcttccgctgcggcgcgccggaggacgtactggatgacgacaccatccgccagctctacgatatccacgacggcagcttcaacctgctgctgggcagcgtggagctgtgcggcgcggcaggggagccgcgggtattcgtggtgcccggagaaggcagaggggccccctgcttccgggccctgcaaaagagggggctcccctttgccgccgggatcctccagcggtgtgacgtggactgggcggtggcggagaccctggccgcccgccggtatgaggcggagagcttttcccctcccgcgccggacaccctgcgcgccgcggtggcggcggcctgttcgtccgcctgtgtggtggacagcggggccgccatcggcccctacaaccgggagaatctggagctgctgcgggcggcggccggggcgggggtgccggtgctcaccctgcggagggagcggctggagagcctggaggccgcccggccatttgacaccgtccgggccctgatggacgaggccgcccgcctggcggccggaaaggggggaggggtgtgtccctcgtctggcgctgcctcaggcgctatcgctggtactgtctgacggccctcctgtttgtcctgctggaggccaactgtgaactgctgctgcctaccctgatggcgcggatgatcgacgagggggtgcgcacgggggaactgggccgcgtcctggagctggggggctggatggcggtggcggccctggcgggcatcctgtgcgtgctggtgcgcaacttctgctccggcacggcctcccagcggtttggggccgagctccgccggacgctgtttgccaaatgcctccgcctgaccgaggggggcgtggatcagctcgggagcggcgccctggtcacgcggatgtccagcgactgtgaccagctctccagatcggtgaactccgccctgcgcattggtgtcaaggcccccgccctgtgcgtgggcagcgtggtctatgccatggggctggacatggggctgagctggattgtgctggcggtggtgctgggggtgacggccctcatcacggcctatctggcggagagcggccggcgcttccgccgggtgcgggaggccatggaccgggtcaacaccaccgtggaggaatttctgcgcggcatccgcctgatccgggccctggggcgggaggagtgggaaaaccgccgctttcaggcgtccaacggagagctggaggagtccggcatccggcttcagctcctgtcggcctggttcgcccccctggtcaccctcactgtcaacctgggcatcgcggcggtgctgtgggcggcggggtgcggcggggcagaggcgggcacggtgtccgccctcgtcacctatatgacccagatgctcacctccctgatgactctcattgacgtgttcaagctgctcatccgggccagaacctccgtccggcgggtggaggaggtgctggctctcccggaggagggaaccctggaggggccggaggagacaggcgtggaggagccggtgctggagctgcgccatgtgaccttcgcctaccccgggggaagcggcgtgcccgccctgcaggacatctccttcacactgcggcggggggagcggctggcggtggtgggtcccaccggcgcgggcaagaccaccctggcctggctgtgcgcccggctctatgagccccagaagggagagctgtacctgggcgggcggcccatgagccgccttcccctggggcgggtgcggcggcaggtggtggtggccgcccagcggagcgccctcttttccggcaccatccgggaaaatctgtccatgggtgaccggggcgcgggggaggcacagctctgtgccgccctggagactgctcaggccgccgacttcgtggcggaggccggcggcctggacgccgtgctagttcaggggggcgtcaacctctccgggggacagcggcagcggctctctctggcccgggctctagtgcggggaggcgcggtgctggtgctggatgactgtaccagcgccctggacccggccactgagcggagggtgctggatggattggagcggcggccggggcaggcggtgctccacatcactcagaaggtgcgcgcggcccgcacggcagatcggatcctggtgctggaggaggggcggcaggtgggtctgggcactcaccggagcctgctggacacctgccccacctaccgggaaatctgggcctctcaggccccggaagaggagggagaagatggcacacggtgaagcgtccggcggccctgtgctgcctccccagcggcagagcctccagcagcgcttcggcccccacgccagggccagggacgggcggggcaccgtgcggcggctcctggccctctacgcccgctggggcagggagctgctgctggtggtgtgccttaccctgctctccaccggggcggccctggcggtaccctatctgctgggacgggcggtggactgctttctgccttggggcggcgtggagcgtgccgctctgtcagtgctgctgcccactctggcaggggccgcggcggcacagtggctcggcaactggggccgacgccgctggatggagatcctctcccagcggatggtggcccgcatccggagggagtgctttgccaagctggggcggctgcccctgtcctactttgaccgccacccccatggggataccatgaaccgcctggtcagcgatgccgacaacgtcagcaccgtggcggctgagacggtgactcagctcctgtccagcctgctgatggtggcgggggcgttggccatcatggcggccctcagcccgctgctcactctgacggccctggcaactgtgccggtgatcgccctgtgcacccgcctgatctcccggcggagcaggacgctctaccgccggcaggccgatgagctgggccgcctgagcggcctggtgcaggagtccctctccaacagccgcacggtgaagctctaccaccagcaggaagagctgttggcgcggtttgaccagatgaacggggcgctgtgcgccacatcggtgaaggcgcagatctgcgccggcctgctcagcccgctggtgaacatggtcaacaacctgggctttgccctgatcgcctgcgccgggggcgtgctggccctccgcggcgcggtgagcgttgggctggtggtcagcttcctgggctactcccggcagttggggcggcccctgaacagcattgccgccctcttttccagcattcagcaggccgtcgctggggccgagcggctctttgagattttggacgagccggagctgccccccgatgtcccgggtgcagtctcaccccggacggtgcggggagaggtgtcctttgcggatgtgtccttctcctatgagccggacaggccggtgctggagcatgtgagcttccgcgtcagggcaggggaggtggccgcatttgtgggggagaccggcgcgggcaagaccaccctggtcaacctgctgatccgggcctatgagccgacggcgggggagatccggctggacggcgtgcccctcggtcggtacagccgggaaggactgagccggtgcttctccgtggtgctccaggagaccgtctttttccgcggcacggtgctggacaatctgcgctatgcccgcccggaggccacggaggcggaggttgtccatgcggcaaaactggcccatgcccacggtttcatccagcgcctgccccaggggtaccaaaccctcatgtcgggggcggccggggaattcagccaggggcagtaccagcttttggccatggcccgggccctggtgagccgggcgcctatcctcatcctggacgaggccaccagcagtgtggatactaccacggagcagcggctccagcaggccaccctccgcctgctggagggccgcacctgcttcctgatcgcccaccgtccctccaccatccgccgggccgaccgcatctttgtggtgggggagcgggggatcgtggagtccggcacatatgatgaactgatgaaaaagcgaggagtttattggagtgtgcttcaatgaatcagtcgttttgaatgtaatttatgaccagcaggccattgttcttttgaccttgcgcctccgttggggtgttttgtcttatagtgacgaatttctgataacgtgttgctactttgacccatgacttgacccagaacgggaaaaatcccagcggagcaggcagcatacgacctccgggatttggcagttttctggaacgaaaagggtcggaaagcacttgaaatcaaaggattgaactgccggtagcagctcataacccggaggtcggtggttcaaatccatcccccgcaaccatatggacaagggtaggagtattgaacagttttcttagactgtccaatactcctacccttattccatgggagaaagccttggtatttcaggtgttttcttttctcttgcacagctcggtaattcatatcgcaaagataaaagacgcaagcttggtggttgaaaaatgaaaaatacccagttttgaaccctttgtccagatcagcctgtccgttctttcctttgcgcatggagcaattcaaacctatccggcgtcctgtagttgagcgtgctgtgggggcgcttggtgttgtaaaattctatgtaagtatcaacgctttgcatgaactggcgctcagagcaatattgtgtccgataaatctcctcccgcttcatggaggcaaagaaggactcggctacagcattgtcatgaggacggctggacttcgagaaagattggacaaccttgtttatgcgaagtagtttccggaatgtgttggatgtatattgcgggccttggtcgctgtgaaacatcagctgctggggctcgtttctgttccgatatacctgacgaaaggtagaggtaaccaagtaggtactattctttggtgatactctgtgggctactactttacgtgagaaaaggtcgaggattacgcagatatagagatacttgccattgaccttaaagcaagtgatgtcgctgacccaaacacggttcggttcatccactttgaattgctgctgtagcatgttctgcttttttgccagccgctcacttttctgataatcgcgtttggagtagatggatacactttgtaatcccatttctctcatcagttcagccacatacttgggcgaagtccgaacgcctcgatctgctaacacagcagcgattttatttgcgccaaacctttgttggctctcatcgaaagctgcttggatatgctctttcatctcggctcttcgtttatcataggctgttacctcttttcgccggaagatatggttgtagaaggtaccgcgggatacacaaagcgcctcgcataaggcatggacactatactgaccatgcaatttggcaagctcttgcagcttttcttgaagcgacgctgaaaccgtgcagttgaccttttgtaaaatctcgatcttcttctccaacttttgaagtttctgtttcattttgataaacgcctgctggctgacagcatgaccggagtctgtcatggtcacagtgtacggcttgatccatgtgtagaacgtactcttgggcacgccggagtcggcgcagatatcggagacggattctccggcctggtaacgagcaaccagggagtgcttttcttctatgctgatgcgcatgatttgattcctcctgtaaaatggtgtagaataccattgtacagaaaccagtattcatttccaaagatgcaatttttccaaagtaagatactgtaaaatgcattaagcatcaaggattagtccattccgaaaacccgattagaaaacttagtttatttaatactggtgaggagaaaggcatatgtacatacagaagatacacattgaaaattttagactattaaagaatgtagatatcgttttagacaaatctttaacgctgatagttggtaaaaataatactggtaagacatcagttgcccatctgcttcaatcaatcattaacgaaaagaagaatttatcgtttaacgactatcctcttgaatgtcggaaacagctttatgaggcacttgaaaaatactgggcaggtcaacttaaaaatactgagataaaaaatcaaatagaggaaacgaaggtatgagattctcggaacaacgcgtcagccaatagagactaagaggcagaagaagcagtggcgagagcttacaggtgatttatgtgtcgcaagacaaggaactatctatgacattttaaggacagctgctgatagtaggttgattcctattcctccagatattgaaaattatatggaaaaatataattctggtgatgattctgcctatgagcagacgaccctaaaacagttttatgaaattaaatatggtgaagtcatcaatgctattaatttcttcaagccggatgccgtgtactccacagaccatggagtaaaaggtgaggagtacgaaaatgttctttttgtgatgggcagaggatggaatctctgcaagtttgaagattcattatataaagacgaaaaatccctgcaaggcaaagaacttgcaacatacattaggaattgaaacttgttttacgtgtgttgttccaggccgaggaagagactcgctattttagttactgtagagattaacgcacaattcgaaacgtatttgcgcaatgtatttggtgctgataatgtggtaccatatagtgagtttataatgtgaaactccaatatgcataggtgcttttatctttttagtatattagtgtagcctttcctcaaaacaaaaacgttgcggctactttccaaccgcgacccatttacactgggagcgcggtcggtgtaccacactataggggcttttccctgaaacgagaaaatatcgattttaaccgtcccttccaaaaaatagccacaccgaaaggtgtggctattttttggttaccgggaagattttacatgctcgggcggagtgaatccgccctgcgccaaggttttcgcttgcggcgaaaacgctt

SEQ ID NO: 4292 - DNA, 20315 bp, Unknown
  gut microbiota DNA sequence
cgggtgtcgggggccccgcgcagcggggcgcgcctccggcgcgcacaagggttttgccggaggcaaaaccttggcgcaaggcggaattcagttccgccttgcaaatgaaatcaaagggttcccgcgcaaagtgtgctttgcgtgggactcacccgcaccggcgagtacctggagcgctgcaaggcgtaagcgcccgaacgccctggaacaggcgcacagcgaaccgcgcagacgaaaaagcagttgtgccgtaggcgcaagatgttttttgcggagcggtaagcagtgtgccgtcgcggagggtgtgaggcgtgatagctgacgctgtaaaggcgcatcgttttgtgaaggccctttgggccgcctgtgaaaaggagattattatgactatttctgagaaggtcgcgtatctgaagggtctggccgagggcctggatctggacactgccaagtccaaggagggcaagctcatctccgtaatgatcggcatcctggaggagatcggcatgtccatcgaggatctggaggagaacaccgtcgccctgggcgaggagatcgacgccatctccgacgacctctccgacgtggagaaggccgtgtttgacgaggatgacgacgacgatgactgctgctgcggcgacgaggaggacgatttttttgaggtggactgccccaactgcggcgacaccctgatgatcgacgagtctgtcctggaagagggcgtgattcagtgccccggctgcaggcagaagtttgcgctggatctgtccgacgactgctgctgcggggacggagacgaggatggctgtggctgcggctgtgaggagcacgaccacgactaatagaaccccctgagcgggcgcccccagtgggcgtccgctcttttttgcggaactacgcaggaccgcgccccatagcgcctgctttttgtagaaaacagcaccggtccctctcttgcgcggccctggataccatagtataatgaaggagttaacttaggtaaactaaattttttgagtggagcggctatgagaactcagacggaacagaacgagagaaccctggaggaggtggcgccgggcgagcgcggtgttattctccaggttggcaatgaaaacggcccggtgaagcggcggctggtggatatggggctgactccgggcaccgaggtcacggtgcgcaaggtagcccctttcggcgatccggtggagctcaacctgcgggggtacgagctgtccctgcgcaaagcggacgcggcccagatccgggtggcaaccggcgcggagggggagcggcgcgcccagacacggcggcggcgcatcggcatggtgcagcacattccggacgaggaaaccctccgccggatggatgccgaccacgcccatgaggcggcggagcacggcggcgtgcccgactacgccagccacgacacacgggagatgaagctggccctggtgggcaaccccaactgcggaaagaccaccctgttcaacgccctcaccggctccaaccagtacgtgggcaactggccgggggtgacagtggagaagaaggagggccgggcccaggtggaaggcaagtccgtcacggtggtggatctgcccggcatctactccctctccccctactccatggaggagattgtcgcccgggacttcatcgtgggggagcggcccgacgccatcatcgacatcatcgacgccaccaacattgagcgcaacctctacctgaccgcccagcttctggagctggagcggcctatggtcatagcgctcaactttatggacgaggtggagaagcacggcgaccacatcgacgtggcggggctgtccaaggccctgggggtgccggtgattcccatcactgcccggtcaggggagaacattcagactctgctggaggcggcccaccggcagatgcacgtgggcgtcaccattgaaccggatgatctgtacgacggctttacccaccagatccatcacaaggtgggcgagctgatccacgacaaggcctacgccgcccatatccccgcccactgggcgtctatcaagctcatcgagggggacgccctggtggagaaagccctgggcctgtctcagagggagcgggacgagctggaggccgtctgccgggaatatgagggggcctatgatctgggcgaccgggagaccttgatcgccgacgcccgctaccagttcatccagaccgtggtggcccagtgcgtcaggcggggccgccctctgggggcgcccaccctgtccgaccgcattgacgccatcgtgacccacaaggttctggccatcccggtgttcctgctgatgatgctgtgtatgtttgccctcaccttcgggccggggcagatgctggccgacggggtggacgcccttatcggcggctggtttgccgggggtgtccgctccctcctggccgccgcgggtactgcaccgtgggtggaggccctgctggtggacggcgtgatcgccggtgtgggcggcgtgctcaccttcctgccccagatcgccattctatttctgttcctgtccttcctggaggattcaggctacatggcccgggcggccttcattatggaccggttgctgcggcgcttcggactgtccggcaaggcgtttatccccatgctcatgggcttcggctgcaccgtcccggcagtcatgggagcccgcaccatggagaacgagaaggaccgccgcatgaccatcatgctggttccctttatgtcctgctccgcccggctgccggtgtacggcctgctcaccgccgccttcttcccccaatacggagggctggtggtattttccctctatctgctgggcctgctcttcgccatcggctcgggcatcctcctcaagaagctggttttccagggagagcccgccgccttcgtgctggagctgcccccctaccgcctgcccaccctcaaaaatatcgccctccacgtgtgggagaaggtaaagggcttcctggtgaaggcgggtaccctgattctggccatgagtgtgctgctctggttcctccagtctttcggctttgagggcgggaccttcggcatggtgtccagcgaggagtcctccatcctgggcttcgtgggcggcctcctggctcccctgttcgcccccttgggcttcggcacctggcaggcggcggtggccctgctcaccggactggtggccaaggagatggtggtctcctccatgagcatgttctacggcttttctgtcactgccagcggtgcggcgattgccgccgccctgggcggcaccttccaaagccccctggccgcctattccttcctggtgtttgtcctgctctatgtgccctgcgtggcggcggtgtccaccatccgcaaggagatgaactccaccaaatggaccctggcctccatcggctggcagttgggggccgcctggctgggctccttcctggtctatcagctcggctctcttgtgctgcgggtgataggatgttaaaatatatcgtatataccggtgtggcggcgctgatcgtatgggcggcggcctacctgatctaccgtttccaccagagtctgaagggcaagcgggggtgcggctgcggcggatgcccgtcctgcccccacacccgctgccgccaccgcaggacataggagccgatgcccacatcggcccgcatcaaggaggcgctcttatggaccatcaactcaaacagcttcaggactggatcagcgagagccggcatatcgtctttttcggcggcgcgggggtgtccactgagagtggtatccccgacttccgcagcgtggacggcctgtaccaccagcaatacgcatttccgccggagacgattttaagccacagtttttttgagcggaatccggaggagttctaccgattttaccgcagcaaaatgctctttccgcaggccaggcccaatgcagctcattggaaactggcggagctggaggcggcggaaaagctgaccgccgttgtgactcagaacatcgacgggctccaccaggcggcggggagcaaaacggtgtacgagctccacggctccgtccaccggaaccactgcatgaagtgccgccggttctacggcctggacttcctgctggagaccggcggcgtgccccgctgtccagcgtgtggcggggtggtgaagccagacgtggtgctctacgaggagtgcctggacgagacaaccatggtgggcgcggtggaggccatcgccggggcggacatgctgatcatcggcggtacctccctggcggtgtacccggcggcggggctgatccgctattaccgcgggaataggctggccctgatcaacaagagcgccaccccctacgacagagaggccggcctggtcatcaatgcctctctcggcgaagtactgggagccattcgggtataacagaagggcgtccacgtggacgccctttcacttttttgttgaaaatcgataaaacccatggtatactctccctaaagggggagataccgtggaaaagaccgctgtgcagaagctggctggagctctgaaagtgttggtgaccatcacgcttgtgtgtaatctggtggccctgctgctggtgcccggaatgagcctgatgaaagggccggaagagctcctggccctgacaccctacgaaaacccgctggaggttccccttcgggtggggatcgcgtttgtcctgagctggggctgggtgtggacggccggggtgtacgaggtagtcctcgccctgttcctgctgttctgcggcatctgcaccgccgtaatcttgtggcagggccgccgggtgctgggcaccatcctgacgggcgcccctttccgggcggagaacggcgtcagcctccggcgggcggcagtgtgttgctttttgatcgccgccgccgcgctggcacgggtggtgtgggggctgttctactacggttccgtcgcgcccctgctgacctataacgccctgttcgtccccatctttatcctgggcggcctgctctgcctggtcatgtccgcgctgttccgccaggcggcggagctgaaggcggagaatgatctgactatttgaggaggggaagccatgcccattgtcgtcaatctggacgtgatgatggccaagcggaagatgagtctcaacgagctctccgcccgggtggatatcaccctggccaacctgtccatcctgaaaaataaccacgccaaggcggtgcgctttaccacactggaggctatctgcaaggcgttggactgtcagccgggcgacctgctggaatacgtgccggagtcagcagaacacccgtaggggtggcctttgactgtccgttttttgttatattcaaaaaaatattattgaaattcgataataataaattgacaaacaatccctcctgtgctatcctcagagacagacaggagggattgctttatgatacggatatggattgcgatgatgttggcactcctgctgctggcgggctgcggtggggagaaggacgccggttacgtggcccggaaattggatattgtgctgccgcagccggcggcagtcacctccggggacagccacgggggcttccacggggacggcctgctccacatggagctgaccttttcccaagaggacgccctggcggtggaggaggccgtatccagcgcgggatggagtctgtttcccatggagccggaactggaggagcgcctctacccggacggcgccggcgcgtcggactggccggactggcccgtgccagcccggggatggtggtatctggaggaccgtcaggaggacgagacggaggatatgtggcagcggtactcttacaactatacctttgcggtctatgacccagataccggcatcctgtactaccaggagctggacacttgagacaggaggaatgtcggaatggacgatctgagcaccctcggcccgctggcgctgggcctgttggcatgggtgttgggcctggcagccctgatgacccgccggacgggactgtgcgcccccagtctggggtgctgcgccgtcgctctgtccctggtgcctctccatgtctacctggaggtggaggcgggcgacttgtccgccattcaggatacagcgcacgccttcgccctcagcgccgccgctctggtccttggaaccctggcgctcaacgctgcggcatggctccgtaccagatataaggagtgagacaaatggaggagaaaaagactatcccggtaacgccgcccgtgacggcggcccggcgggtgtttccagtggacgggagggatcgggcactgctggttctggcatggggcgtgggcgtcctgtgcgcggaggtgctgctctggggcctgtccggcctggggatgaccctcctggcggcggcatggtatggcgtcctgttctggtacggcggcgccgccccgctggccaggcgggaaaaccgccttcttctgtacgccgtgggcctgttggctctgacctttgccctgtttgccaatccgtggctccggctgtggaacacactggccctcgtcctactgatgggaattcaaatggggggctggccggggatggaggtgtattccgttgagacatccgccatgttgggggagcgtttcctgcgggtgatgggcggcctgttcggctatctgggtgcgccggttcaggcgctgggctccattcggggcctctcccgcaaaaagatgccctatgtcctgggggcactgctggtgtgcgttccactgctgatggtggtctttcccctgctcacatcggcggatgcgctgttcgcccaggtgacccgccgggcggcggactggtttgatgagcatctggcgctgtgggccctgcggttgattttcggactgcttgtcgccccattcctgttcgggctgctctactccctgcggcggccggagccgctgaagcggcttacccggcccgtggagggactttcaatggaggccgcagggccggtcaccgtcctggcagtactggatgtcctgtatgccttctttctggcggtgcagtgcgcagcgctgttcggcggcgctgactacctggcccaggtgggaatcagctatgcgagctatgcccgcagcggttttttccagcttgtggccgtagccgcggtcaatttggcctgcctgctggcctgccttgctctctgcaagggtaaggggcgggggctcaggatggtgcaggtgctgggtacactcttggtggcggccagcggcgtgctgctggtatccgccctgtggcgcatgaacctctatgtgggggcctatgggttgtcctttaagcgggtgctgacctattgggggatggccgtgctggcggtgctcctggcagccgccctgtggaaggtgtggcaccggcacttccgctggttccgggtgctgctgagcgtgggggtggcgggctggctgctccttaactacgccaatgtggacgacttggtggcccgctacaacattggccgcggcctggacaccggggcggtactctccgcctcggacggacggctgggggccctgcctgcgctggaggagctgctggaggcccagccggaggagacagagctgcgccaggcggtggagacgcttcgggacagcgccaggtggcaggccgcccattggcagacctggtcggtggccgcttggcgggggcagtagcaggaacaaaaaccgcccggacagcgtttgccgtccgggcggtcgcccctctgctcagagggtgccggtgcagaaaaaggtgaagcggccgctggcatataccgtacccgctccgtcgtccacggtgatggataccaggcaggtggtgcggccacggtgctccacccgggcccgggcggtcacctgacccgctctggcggagcggatgaaatcaaggctgccgtggagcgtcacatacttccggccgtcggtccggcaggcgcttccggcggcacagtcggccagcgtgtagtaggcccctccgtggagcagaccataggggtttagactatccggcccgatctccaggatggcctccgccgtgccgtccccagtttgatgggtcgtgataccgttatagacggcaaaggcgtttgcccttgcaattgcgtcaagctgtgcttcgtctgccatgtttcccgattcctcaatctttcagaatgatgcggtcgccctcgatgcgctccaccgtggcgagggcctccacccggatgcccatccgccgcagaacacggccgccgtcccgcatggccttttcgatggccacgcccacgccggccacctcgccgcccgccttggagacgagttccagcaggctcagaatggcctgcccattggagaggatatcgtctaccaggagaaccacgtcgtccccgtccaggtactttttagagacccgcagggtataggacttctccagagagaaggagtgggtttcggccgagtagacctccggatcgatgtacccggtctggaacttcttcgcatagaccgccgggacatccagagctcgtgctacaaaacaggccaaggcgataccggagctttccgcagtcagtaccttggtgatcctcacaccccggaaacgctttgccagcgcgtttcccatgtgctccatcagatttatatccatacagtgattgaggaacatgtccacgtggatgatgtccccctcgccgaccaccgcatcgcttaaaatccgtcgttttaattcttccatggtactcccttccgtccaatgcacggtttcaatgcttctgaataagattataaactattttacacgcccctgcaatattgacaagcgcacaaaaatagggtattctaatcaatacggtgattgtggctttgtgacgctacccgcccacagccagttgcagcggtatcgaagtggtcataacggagctgactcaaaatcatgtgacaggattgaataaatcgaatattctatacggaagcgtatcgaagtggtcgtaacgagcttgactcgaaatcaagttgtccgcaagggcacgtgggttcgaatcccaccgcttccgccatgggtgagtccttataggactcacccattttttaataatttgtaaattcattttgaaagttgtacagaaatgtacaacttttttctttttccagcctatatgtagaagcctgattttacatgataggatgaaatatgatatactacaaacgatatacgggaaagctgctgccgcagaaaacggcagagcagccaagctgggtccaatggacgcaccattcagagggcaaaacccactgtgaggaatgcttaatgttggatggttgttggtttcaggaagaaaatgctccgtcttgtccacatcatccatactgccactgcacattagacccgattccctatgctgtggttttgatgaatacaacatcatatagcgattacagcaaatttgatccctatctatttgacccagaaaatacatatagacatggaaaaaatcgagcatttgaaagttggggctattctgcttcagattctacgtggcttaagaatccaagtgagaaacaggcacttgaaaaatatctatccggtgactatatgttaggaaagttggatagacgaggctagcgaattgatatcagagttacgattcccagaaaaggcaaatcaggcagcgtgtcatttattactggatggatgcttatgctgaacggaaaactcaaattgaatacgccgtatgggggaaaataaaatgaagatgatggattgcgtagaagtgatggtagaaaaagatagctatgcaaaagaaggcgttcacaagggaatgcaaggggttgtctgggagaaggagccaaaagacggctgttgggtcgtcctctttcctcaatgtggagataaggaagatattgcagacctctacatgaaagaagaggatctgaaattgattcctgttatgtctccagatgtaaatgagcaaatcaaggcgcaatttgaaaaagaagccgatcagacaaaatcatttgccgaaaagctggatgatctttctaattatcgtatctaatgggataaaagcctcttgcttgctgcgctaaaaccattgatatgactggatttttccaagtcctataattacactccgaccacgtcggagcaagctttgtatcgcttgctccgacttttttacaaaagtcagagcgcactcacgccgctgctcatcctttccaaatcacaaccgctgcgctgggttgtgatttggtatcgccgcttcgcggcgttttttgattttatagaaatatcggttttgaccgtcctttgcagaaatcccttgaaacgaaatggtttcaagggatttcttttttagctttacaatttatgctacgggatagaaacataaaacagtgccggacctctaagaattttgctgccagctttactttggaatccagggtaacagtgaatacaaacagtgcagtgctggtattgcctccggagacacttctcgtacaggctccagaattcccaaacacttttcttcaaccataagctgcccactttccaggccatggtcaccgggccgctgaaagaagctggcgctactcgctttatcctcattcataccatcagcagtgcacagaactttacgggaaccattctcgttgacgttatagtaaccaaaatggccatattttcgtagccgataccccagttttgagacaggtgggaacagccgccctgcaaagagcagttctgccacacctcgatgtggacgaaagtatgatagacacggcctattggttcgaatccagaccgtgtcagtggcggcggagccgctcacgttacctctggatctgggcccaacggtgtgactcaggcattcactcggaaaatagatagacggaataccacacacagaagcgcaaaaagtccagcctatttggaaataaattatagcaaatgccggaatggcaaagtaattacccgcaggacagcatacatggcctcttttccccaacttagctttctaggaacataacttgggccatcttctatagagccatcaggactcatgtgtcggctgctttccttcagtacatcgagttgagcacggatctgagcatttagccccgggcttttgatcgcaagcattagctcggtgtccagataaacactcctcatatcaaagttgcaggaacctgcgagcgtcagatcttcgcctatgagcacggccttagtatgctgtgcctgctcgcccagatattcatagatatgggtgccggtgctgcggagatgcgttttctgatttaagtagtcggtgcagccaaaaggatttgtcccactttctacggcattgatcagaatatctgttctggtacccgcagcacagacagtccgaaggtcctcgtacatatccttactgcatataatgtagggcgtctgaaccagaacgttactgtcctgcgccatagcgtctaccatgcgggcccacaggattggtgtcttattttccggctcgattggattggaccatagctccacgctatatgccgccagtgtggcggactcccattctgctgtagtcaaactgtctgtaaagacttccgggtaacgttgggcggtctgctcataacagccagccagatcgctttcacaccttgaatctttaaaaaccttacagcatggaagcgcccacaccgcctcaaaataattcatcagctgttgataggactggcctgccccaggctcggtttcatatactaaaatatcccggtccacattgtagtgttcttggtaattgcccaggaagcggttatctgtatttctaccacccaggatataggcaaagtcatcagcgatcagatacttatcgtgcatccgatagttgattttccacggggttagaaggttgatcgggttgtagagccggatctccacgttctcatggcttgacaactggcaaaggttcctactcatgggaaggaaatgtccgccattgatgccgtccagaagcacctgaaccctgacaccgcgctcggctgccgcccaaagtgcgccaatcacatcctggccgctttcctcatcccaaaaatcaaacgtggtgagtataatccgctcctttgcttcctcaataagccggagccgccacagcagggcatcagagttgtcgtcgatgctccgcacccgctctggtgcggtatgttcatagcggatatcgttcagccaatcttcgggagtggcccttttgtgaaacgccggtggaatgactagacagagaatgatgaataaaagccacacaaggagcaccagagcgacattcttcacaaaccgtttcatttatctgacctgctttcatattgacgccccagggattcccgcctgctcggggcacccattgctctagtccggcgcatgccggggacaagatagggagtatcatatcgccgtggatgatgtgaaaaattgcggctgctgaaaatagaaaaaatgcgggcaggaaagggaaaagaaagttgagcactggccgttccgcgataacattgttgcaaataatatcatacaatttgatgaaattcaaggtgtgtggggttactatctgtccccaacggagcggaggcgaagaacagcggtccacagttccttgctggccggtttggtacccacacaatatttttatcgctaaaaccgctgctgcaaaaagaatattttcgggcagacgatggttccatttctgataaagtatgctatactataatttataattgcttttatacatagcgtttatgggattcacgctctgtatgtatgtttcagtattcaatcggataaggagagatgcagacgctgtaagatgcctttgaaacaggcggtatctacatctcctaagaaagccagggctatagagcagccgatggatcgggaagggtgaagttatgaaacttgcagaggctttacaggaacgcgcagatctgaaccggaatattgaacagctcaaaaaccgtttgagcagcaatgcgctggtgcaggagggcgagcaaccggtggaatgcccggagaatctaaaacaggagctggatgcttccatttctcgcctgtcctatttgattgcgagaatcaatcggaccaactgccagactgtggttgaggggcagactctgacagaactgattgcccaaaaggatgccctgtccctcaaactccatgtataccgggatgttgtgtacgcgggaagtcagatatcctaccgcgccagaaatacggagatcaagatccggtctgcgttctctgtggcggactggcaaaaggagatcgaccggatgtccaaagaactgcgccggctggataaccggctgcaagagagcaactggaagaccgacttagtggaataggccaaagtgcctggtagcagaagcagggcgaatgccgcgcggcgacagcgtaagtcgcatcatggatacacggaagggcacgtgcgaggttcgagtcctcaagaattgttatgccccgactgcgtacagatgtattgtaacggatgattgtaatgaccgggtattgactgcgtctgcgagggtgggaatggggatgctgttccaatgacagcatggattggcagattggcctttgaacaaaaagatccggctgtggataacccaaagcatccacagccggatcggttatttcagcgtgtcgctgttgttcagaaccagggagctgtagagaaacagtacatcgcagttttcaaaatcaatgaactgcccgaggtagtccggctggatgtagcgaatatccaccagagtgatcctggagtatccgctgagcagcaaaggcgcaatgctggagccaaaagagtcgcggaacaacaccaactcccggccgctttgggcgtaaggattttccatggtaatcagagacagagaaccggagaggaacatttcataggggtcctttcccatggcacgctccatgtcgtacaccgttccggttcggttgttctggtaatcatacaccgtgcagtcccggatggcatcgttgatgagatagtggatggactcgggggccaaggggagggccgattgtccgcagtaaacgccgtagaagtcccgctccaacacggactcttcgtaattttgagtcaaggtgacccccatggcctgggccagccgctccgccacatcggtgatccgctcctgccgccaatgggtgtcggtcctgtaatagtcgtcccgctccaacaggtctgagatggagatataatcggcaaagccaaccttctgtgccatcagggactccaattgcgcataatccatggagaggtgcccgctctcccgggccagaaagcagttcttgtccgggattacggagaggaacacccgattgctgccgttcaggtatttgtcatagaggtactggaagcggcctgccgcccggtccagggaggactcgttcagggggtattccaccgcggcggcgaagccgtcggaaacatagatcccattgttgtcctgccggtggaacaggccggtggcggacagggctttcagtgtacggaactggtcccggaagggaaaatgatcctgggtgtaggtttcaaagccggacatgaaccgcccgctcagtacggtatccaaggtgaacgccggcatggcggccagtttcctccgctcactgtccgaagtggcttccttggggagaaacaaacaggccagaaaggccacggccagaagcagcccaaacaggatacagaccgtcaggtttttctttttgctatccatggtatcctcctatcaaaaccggaagtataggaatgggttaaaggagccgtccaccagatagccggtcatgaccagcagcagtataaacagtgtaaagggttccagtgcgttgaggaccttaccggcggtggggtactgggagaggcggacaagcccattccggagaaggggggtggctcccaaaacggccagaatcagcaccagagcgaagctgcgcagacagtagaccgcctctgcagaaaccagcgggataccgccggcaccgaacagaccgccaatgtcggagagggcctgccccatattctccgcgttgaagatcacaaagctgatcacgacgaagaatactacatagagatgggcgagggggcggcatttcgagagcggtttcagcagccacagcttctccatgatcagaagaacggcgaacatcagtccccagacaacgaagttccaggctgccccgtgccagaagccggtcagcatccacaccaccagaatattcagcagttggcgggcccttccgacgcggttgccgcccagcgggatatacacataatcccggaaccaggtacccagcgacatgtgccagcggcgccagaactctgtgatgctggcggaaatatagggatagttaaagttttcaaggaagtggaagccaaatactttgcctaggccgatggccatatcgctgtatccggagaagtcgaaataaatgtgcagggcgaatgcgacggcgtagagccagtaaaagagcacggacttctcatcggacgcccggaacacgctgcacagctctcccagttggttggcgatcaggatctttttccccaatccaatgagaaagcgccgcaccccctcggcagccagagcggtggagtgggaacggtgttccaactgctgtgcaatgtcggaatagcggacgataggccctgcaatgagttggggaaacatagccacataggctgccaggtggatcagatttttctgagctggctcgccccggtatacatccaccgtatagctgatgatctggaaggtgtagaagctgatgccaatgggcagggcgatgcgcagcaggggaacccccagtccggtggccgcgttgaagttttccaggaagaagtctgcgtatttgaagtacaggagaaaggacaggctgaccgccacggagagcccgcagaccagtttggcccctttttggccccggtaccgctcctgcaagaggccgaagccatagccggacaggatggaggccagcataagaaggacgtatttaggctcgccccaggcatagaagatcaggctggccagcaggagcactgcatttcggaagcgggccggagtgagaaagtatacggccagaaccagcgggagaaagtagtatagaaatgggatgctggaaaaaagcatagaaaaccttccttaacagcaacgtacggggcggctccctggcgaagaggccgccccgcaacactatataatgttatattgaactggcggttctcagccctctaccaccggggtgtcaatgattgcctcggctccgtccagggcagagagcgcgttatccttgaaggtttccaccaaatcatccgcgccatacgcggcaatgacatactggccgtccacgttgattacgactaaggtatccggcataccgcagatccactgcttcgccaggattccctccttgagggcgtcggcgaactcgtcggcactcacatcgccggtcaggtgataggccgcgccggtaaaggtgttggcattcatcatgtggatcatagatgccgcgtcatcaatgtgggtggtctcgctctccggaaggctcagggtggaggtcagctcctcggtcttggatacgtcaaaggcgcctggggcatctgtggtcatgtgctccgaatcgccgccgccgatggggaacttttgatcctctgaatacaccccatagaccgtctccagaacctccaccgcactggagtaggaagaggtggagccgtctccgcttccgccgtgattgctgctgccattgttgccgctgcatcccaccagggagatcgccattgccgcaccgagaataaaagtgatcatctttttcataatacatggtctcctgttctgcatttatttgggtgactgattttgctgaaggtcataccctccatcgtcacgcatggagagtacataggtaagctgtttgccattggttttcaaggtcagggaaaacatggtgtcctctgtgccggagaggtcccagtagagcagaacgtcttcggagatctctgcttcggtgccgtctccgaggagttcgccctccggatcaaacaggctgaattcaccgccggaaacagatacccgggtcgtttcgccggtttccagcgccagaggaattccgccggagacttcccgaagtccagatgtcatttgaggatggtccgccggaatggagaccggttccgccccaatgggtacgccctgatacaagagggcggtttccccccgcacagcaaagggagggagagcggcaataaacaggacggctgcgcaggcggcagcggccagagatccaaacgaaatccatttcgttctggtgcgtgtcggctccggcttttgttccaggcgcatgacctgctcccggagctcctccggcgctttgatcctgcggtatgcctctacatctttttgatcaaacatattcattcctccgttccaaggagtgctttgattgcctgccggccgcgggtcagacgcattttgactgcggaaaccgagatgcgcaggcagcgtgcggtttcttccactgaaaacccttccagatagtggagcaccaccacctcatgcagcttgtccggcaggctccgaacggcggccagaagttcggatgtttctgaatcctccggcgaggcgatgtgttccgcatcttctaaaggggtatacctgcgtaccgcgttgcggcgctggagatcccggcatttattgattgtaacgcgcagcatccatgcccgttggtgggacgtatcctggaacgtaggccgcttcgccagatagaccgcaaacacatcgtggacgacatcctgagcgtcttctgaatggctcacataggtcagtgctgtccggaacagcagatcggaatatgtttcgtatagcgccgttaaatcaaccgtttctccatgacgcaatgttcttacctcctgttctatacacgcatggcctggccgccaggtcacatttccctccacattttttgagaaagttattaaatattataccacgttccttgtgggcgcgatagagcgtgaatattagaaacaaagcagctgctgaaaactttttagctggatttgcgtctataatgtggagacgccgcaaatctgtgctggacgatagctgacagatttgctccggaacatatatgctctgttagatacatctcaaattcacaggcaattatgaaaggaactcagattgatatgaagaaaaaacgattcgctacaattgtgacggcactcttggtaatttctctggctagctgtagtacacctgctgggagcttaccctccgcgcctgacggttcccatgtgccggaaaaaacacaggccctctattccaatttgacggatgacagctccaggagggaggtcgtggatgcgcttcaggcccacggcgtatctcaggagcagaccgataccctgctggcctgggcagacgactttaacgcccgggtgaccacgcccaccctcacggagggctttaccgccatggagggtgactttgttgactacagctcacttttgtttgacattaaggaactgccagacggcacattttttatggaggccaattgccgcctgaccgcgttcctgttgatgcgggatcagctccagacctgtgggactgcggatgagagtgatacctatctaatgtttgacattgaggccattgacacgcagaaggaataccagctcagttcagaagcacgggccgatttcattactctgttcaatgccgtacctctggagggggcggcgacccaggaggaacaccttgcccgcattgaggaagcgtggtcggagcgtggcatacaggtggacagcgccaagggaatgtccctgatcgaggtatatctgcattccccacttgacggggtccgctttgtgggacataccggcgtattgatggagacggaggacggactgctgtttgtggagaagtatggcccggctggtcccttccaggcgaccaaatttgagagccggaacgcattggagcactatcttctggcccgtccggacctatatggagacgagacggagctgccgcctattgtgctggaaaatgggaagatgatggagatatcctgaccggggtacgggtatccgcagtagacacggccaaaaatgtccgatgggagacccatcggacatttttcatattcgtttattttagccgcatttttgagtacggcgcgttcctgtaccttaccttagtcagtacactgtcagcagtgaggagatgtagccaggttagagccttaatttttgcaaaaatatgtcgatatgatacatgaaaccattaagggcagagggaaaccgaaatactactgtagacagagaaagggcgtggtaaaggtgcgttatctggtttatctctttggatgcgctctgttggtcggaggtggggcagtctgttcagttacaccggccggaatcagactggatgttgcaaacttgctgtcgcttctggattatacaacgctggcgttcctgctaatcgcgtgcttactggttcttctggggaacaactctttccgcgcttttggttgggcaatccgggctatgtttcaagagaaaaaaccttccgccgcccgtgcgctggagagttatctggcctatcggcaggtggctataggatctttactggccggaggtgctggctcactgcttagtctgattaaaatgatgcacagcctgggtggcggtaatctggaggaattagggattgccctaaatgtagcatgcctgtctctcggatatgccatctttttgaatctgctattacttccggtagggtttctgttgcgaaagacgttgggagagatagaacaggcggataaggtagaccaagctgcgggaactatttcggtgcggcgaaagcgccgtagagcagggtgattggtcggggtgaattagggcatctgtttacctgccgggctgaactatataggaagatagatatttttctctgacaggagaaaacacataggccgcagcttctgcgcttggtgtaaaaaagagaactgcacttccgtacgccgccctttcgggctggcggttcggaagtgcagttccagttctgtcgcctgataaccgaagccgacatactgctctgtcatgctatttcagatgaagaaagccccggatacatacctgttctgatctacccttatctaatcgagaaatccatcataccatgccaaacgccatttgtgacaccgtacgtaaatcaattgaggactggctgggcattttggaaggttcccagccagtcgaggttgaggggaatgggggtaaggaaggaatctggtcgga

SEQ ID NO: 4293 - DNA, 2503 bp, Unknown
  gut microbiota DNA sequence
cctcccacaaaacctgcgggatgagttccgcagcctggccaggcagctcaaggagctggggctgctcagcagcctggactacgacaccctggcccgctacctgttagcccggcagagctatctggctgccacccaggaggtgatcgccctccagcggggggcggagcgggcggacggcagccgggtcatagacaccgaggcgctggacgtggccacccgcatccaggaccgctttttcaagcagtgccgggggtgcgccaacgacatgggcctgaccgtcaccagccggtgcaggctggtgctgccggagagtgcgcggcccccggaggaaaacgccttcgagcggctgatgcgggagaagcgggagcggatgcagcgtgcctgagcggctgaccctggcaccgggggtggaggtgccagcgccggaggacggaagcgtgctccgctacagcggggaggcggtacaggacgtactggacttcttttccctgctgtgcttcgctcagaacgagtgggcgggcaagcccttcgagctgctcccctgggaggaggaggccgtccggcagttctacggtattcaggtgcaggacgaggacggcctgtgggtgcgctaccggcgctacctctacgacgagctgcccaagaaaaacggcaagacggaactggcggccggcctgggcctgtatcacctgctgtacgacggcgaggagcggccgcgggtgggggtgttctcttccgacaaggagaacgcctcccagatttacgaggcggccaagtacatggtggagaacaccagcctgggccagccggagcacgaccccattgcctgggcggtggactcccgcaaggagatccacaccaagtacggcggcgtgctcaaggtgtactccgccgacgcggccaccaagcacggatactccttcagcgcgattattatcgacgagctccacgcccagcccaaccgcaggctgtgggacgtgctgacggccggctccaacgccgcccggcggcagcaggcggtgatcgtgctgaccacggcgggcgacgaccccgaccgcaccagcatcggctgggaggtgcacgagaaatgccgccgcatcctggcctggcggcggggagagcccgagcgggagggggacgcggacgcgccggagtggtgccccatcatgtacggcatcggcatcctggccggagacgacccggagcggatcgcggagctggacatctacgacgaggcgctgtggtacgcctgcaacccggggctggggcacaacctcaagctgcgggatttccgggcggacgcccgggcggcccgccagagcgaggcggcggagcggtggttccggtggctgcggctcaaccagtggatctccaccaagagcgtggggtggctgcccctgaccctctacgacaagagccagtttaaccggccggaatggaaggccctcaaggccccggagcggcggcaggcggtgcgggactatctggtcggtaagcggtgcttcggcgggctggatctgtccaccaccaccgacctgacggccttcacgctgctgtttccgccccaggaggggctggatacctgggttgtcctgttttgggcgtggcggcccgaggagggcgttctggaggccgagcagcgggaccatgtaccctaccgggactggacccgagcgggctttttggagctgtgccccggcgatatggtggacttcacgatggtagaggacgccgtggctgcggcggccgatgtgttcgacttggacacattgggcgtagacccctacctgtcccgcacgctgacgccccggctgatggagcgcggcgtcaatgtggtggagatcccccaggacatgaagaacctgtccccggccatgaaagaggtggagcggctgacccgcgcccatcagatgctccacgagcacaatacggccgctcgctggtgcttcggcaacgtccggtgcgcggtggacgggaacgagaacatcaagcccatgaagaaccggagcatcggccgtatcgacatcacggtggcctggatcatcgccgtggcggtggcgctgcttcggatgccggtggggccggatatcaacgaacacatactctccgaggattgggggatttgagatgaaacattggaaggcggccgggcggaggctggcgctctatctggacgacctgctgctcctggccggcggcgcctgctttgtgcgggcggcctgggagctgggcggccgcccggccgcgctgcttgtggccggcgggtgcctggtggcctacgccgtggtcatcgccagggcgcggagagggggaggaggatgatccttgaccgggcaatcaacggccccagggcgtcgatggagacgcggacgctctcccaggaggagctggggcggttcctcaaaaatctgtttctgaccggggaggacgtggagacggggcatggaaccgcggagcggctctccccggtggcggccgcccaccgcatcctcagcaactcctt

SEQ ID NO: 4294 - DNA, 102523 bp, Unknown
  gut microbiota DNA sequence
cggcccctacgctagggggacgcccgcctcaacgtatcacggcgtaggggcgacccttgtggtcgcccgcgggcggccataaaggccgcccctacagggttgcggaagtgcaagccgatgggctagggcaaattacgccaaaggggcaagataggccgcccctactccagcttgcggcgcaggtgctccacggccttgcgttcgatgcgggagacctgcacctgggagactcccagcaccttggcggtccgatcctgggtcataccccggaagtagcgcagcaggatgacctgccgttcccgctcgggcagggcggccaccgctccccgcagggcctcccgctccacgatggcctcctccatgccctcggtgcccagcacgctctccagggtgaagccgtcccccgtctccatctggagggaggccactgggaggtttgcctcctcggcggcggcgatctcctccggctccagtccggtctcctccgccagctcggagagggcgggctcccggcccaggcgggcggacaggcgctcccgggcggagcggatggcccccgcccgctccttcagtccccggctcaccttcaccgccccgtcgtcccggaggaagcggcggatctccccggcaatcttgggcacggcgtaggtggagaactggcagccgaaggcggggtcaaagccccgcaccgccttcagaaatcccaggcacccgagctggtacagatcctccgggtcggttccccggccgtagtagcggcggacgatgctccagatcagtccggcgttctcctcgatcagccgggcacaggcgtcgttgtccccccggcgggcctcctccagcagggcgggggtatccgctacgctcacacgggcgcccccatccggcgggagaccctgcgccgcagggtgaccacggtgcccttgccgggggtggaacgcaccttcacggcgtccataaagctctccataatggtaaagcccatgccgctgcgctcctcggttccggtggtgtagaggggctggcgggcctgctccacgtcggcaatgcccacaccccagtccttgacctggatctccagggtgttatcctcaaacagccgcagtcgcatggacaccttgcccagccggtcggggtaggcgtgtacgatacagttggtcaccgcctcgctgacggcggtcttgatgtcgttcacctcgtctagggtggggtccagttgggccgcgaagcaggccgccgccgtgcgggcaaagccctcgttggccgagcggctcagaaaggtcaccgcggcctcattgatgggtttcatcttatgtaaacctcccgtcattcaaattccatgagcttgtccagccctgccgcccggagcaccttgcccgcctgggcggggacatggaccaccttgaccgcgccgcccagctctcccaggcggcggtaggcccgcagcagcaccgcgatacccgagctgtccataaaggtcacgccctccagatccagggtgagcgaccggggcagctccaggtcgatctggcggctcagctcctccatgatggccctcgcccggtggtggtccacctcgccgctgatggcggcccggagcacccgcccctcgccggtacaggtcactgccatagcttgtccctccttgttgacacaaaaaaacgcagtataccaaaatctggtatactgcgatcatagcacagccggtatgcgatttgcgtcgatcccttatcgcaccattgaaaaggtggtaaaaatccaccgctcccccacctgctcgtagaggaaatcgtgggtctcgctccccaccacggaaaatccctgctgcgggtccagcacctccaccgtcacccgaacggtgcaccggccgggcgtaccgtcccggagtacctggacggtctcttcgcccttggtgatgtccgcgccgcggccgccgtcgatggtgtagagcgcgccgtccagctccacatactgcgtcccgtccacggggagcagctcctccaccagcccgtcggaaaacaggcttttcaaataaccccgcagatccgccagggttttaatgcccgggtagtccacccggcagtagacctgctcccccacggttctctggtcgtcacggtccagcggcatgggcgcaatctcgaaccagccccaggcctcctccgccttctcgtaggccgccaggatggcctcgtccgcaggctcatccgccccggacgcgggggtggaggttggagccggggtcggggtcggaggtgggacgggtgtggggacgggctccgcctcctccggcgtgggggcgggcgtacgcaggggtgggctcgcctccgccgaaggaatggggctgtccaggatggtctgggtagccggaggcgtgggccggtctgccgtgccgctgctctccgcagggctggccggaacgcacccccagcagcccgacagcagtatgacaagagccagcaacggcatgaattttttcatggagcttggccccccttccgtttttatcctgtgtttgatctattctatccgctggggactcattctacaactacagatgtgttacaaaaagcaacaaaaacgcgcggaaaatgccgcctgccgaagagggcggcggcatttctccgtttttatcctgtttacgccatggaagcggcggattcctccagtttggccaggagggcccggagcttttcagcccggtcctgctcggcctccaccacgtgggcgggggccttgttgacaaagccggggttgcccagcttggcctccagcttgtccagctcggcccggttcttcttgagctccttctcaatgcgggccttctccttctccagatccaccagctcggccaagggcatgaacagccgggcggcgtgggtggtgacggtgaccatgccctgggcggtcatggcgtcgtcgctgcccgcgtcggccacgccctccacggtcacatcgctggcgtaggccaggcgcttgaggaagggaatcccctgctcaaagacggcccgctccagggtggagacggtgagctgcgcctttttggaggggggcacgttcatctcggcgcggcgggcgcgcacgccccggatggcgtccatgatcagctccatggccttctcctcctccgggaagtccagctcggcccggtgctgcggccactgctggagcatcaggtaatcgccgctgtggggcagggcctgccagatctcctcggtgataaagggcatgaaggggtggagcagcttgagggtctcggtgagcacgtagcagagtacctgctgggcccggagcttgctgtcctcgtcctccccctggaggcgggtcttggtcagctcgatataccagtcgcagtaggagtcccagatgaagtcgtacaccttctgggcggccacgcccagctcgtagcgctccatgttctccgtgacctcggggatgacggagttgagcttggagaggatccacttgtcctccagctccagccggccgggcagctcgcaccggtcgatggtcaggttcatcatcaggaagcggctggcgttccagatcttgttggcaaagttgcgcatggcctcgcaccgctcggtgtagaagcgcatgtcgtttccgggggagttgccggtgatcaggttgaagcgcagggcgtcggcaccgtactggtcggccatctccagggggtcgatgccgttgcccaggctcttggacatcttgcggcccttgtcgtcccgcaccaggccgtggatgaacacggtgtggaaggggggctttccggtgtgctcgcaggcggagaagatcatccgggccacccagaagaagatgatgtcgtagccggtgaccagcacatcggtgggatagaagtacttgaagtcctcgctgctctcgttgggccagcccagggtggagaagggccacagggcggaggagaaccaggtgtccagcacatcctcctcctggcggatgtgggtggagtggcagtgctggcactcggtgggatcggtctcgctgacggtcatctcgccgcagtcctcgcacgtccaggcggggatgcggtggccccaccagagctggcgggagatgcaccagtcgtggacgttctccatccagttggtgtagatcttggagaagcggtcggggacgaacttgacctccccgtcgttgaccacccgcagggcctcgcgggccagaggctccatcttcacgaaccactgggcggagatgatgggctccacgtcggtgccgcagcggtagcaggtgcccacattatgggtgtgctcctccaccttcaccaggtagccctgctcctccagatcggccacgatggccttgcgggcctcgtagcggtccatgccggagtagcggccgtagccctccaccaccttgccgttgtcgtccagcacgcggatggactccaggttgtggcgcaggcccacctcaaagtcgttggggtcgtgggcgggggtcatcttcacgcagccggtgccgaactccatgtccacataggcgtcggccacgatggggatctccttgttcaccaggggcaggatgcacttcttgcccacaatgtcccggtaacggccgtcctcggggttgaccgccacgccggtgtcgcccagcatggtctccggccgggtggtggccacggtcacatagcggccctcctccccggcgatggggtagcggatgtgccacaggtggccgggcttctccttgtactccacctccgcgtcgctcagggcggtgacgcagtgggggcaccagttgatgatgcggctgcccttgtagatgaggcccttgttgtagagggacacaaacacgtggcgcaccgcgttggacaggccctcgtccatggtgaaccgggcgcggctccagtcacaggaggcgcccagcttcttctgctgctccacgatacggttgccgaacttgtgcttccagtcccacacacgctccaggaacttctcccggcccagatcgtagcgggtcaggccctcgctcttgcgcagctcctcctccaccttgatctgggtggcgatgccggcgtggtcggtgccgggcacccacagggcggcatagccctgcatccgcttgaagcggatcaggatgtcctggagggtgcagtccatggcgtggcccatgtggagctggccggtgacgttggggggcggcatgacgatggtgaaggggcgcttgtccgggtcgcggcggccctcaaagcagccgttcttctcccacatctcatagacgcggccctccacctcccggggttcatagaccttgggcagttcttttttcatctgttacactccttttcggggcaaagcaaaagggcccgccccaagcctgttgctcagggcgaacccgtaagtccgcggtaccacctgaattcccccatgaagccatggaggcgctcttgtctcgctaacgggagaacccgccgggccctactgtattcaggcccggagctccgggacgaccttccccgcgccgccggagggccttgcaccatccggcccctctctgcaccgcccgcgcgggtactccttcccttcgtcgctgtgtatcgcatttagtatatgcaaaatcgggaaaaaagtcaaggcaaaacgtgatatccccgtgtccggcggaggttgtccccccttaccgcagttccttgtcgcagtaggcgcagcagtccacgccgccgttctgcttcaccaggggaggcaggtagtgctcggtctgggtgatgcagttggggttggagcacgccggcttgacgccgatttccaccggctccggcttttcccgctcctggttggccagatcggtgagcagggccatgcgggcgtacattccgtagcgggcctgctcgaagtagaccgcccggggatcgtcgtccacgtcgatggcaatttcatccacccggggcagggggtgcatgaccagcagttccttcttcgcccggtccagcttccgccgggtgaggacgtagacgcccttgcagcgctcgtactccagggggtctacgaagcgctcccgctggatgcgggtcatgtagagcacatccaactgagggatgacggcctccaggccggtgacctcggtgaaccacatgccatgctcccgcataaaggcccgcatgtactcgggcaccgccagctcacggggggcgatgaggaaaaacttgatgccctcaaacttggccagggccttgatgagggagtgaaccgtgcggccgttcttcaaatcgccgcacaggcccacggacagcccgtccaccttgccccgcaggcgggtgatggtggtgagatccgcagtggtctgggtggggtgcatgtggccgccgtcgccggcgttgatcaccggcacgtcggagtacagggaggccgccttggccgcgccctccttggggttgcgcatcaccaccacgtcggcatagcccgacaccatcttgatggtgtccttcagggtctcgcccttggcggtggaggtggactttgggtcggcgaagccgaacaccgtgccccccacccgcagcatggcggtctggaaggaaaagttggtgcgggtggacggctcatagaacaggctggccatcacccgcccacggcaggcgtccataaaatcggcggggtggtccataatatcactgcaccgctggtacagggactcccactccgccctcgtcaggtctccaaagtcgatcagatgccgcatgacgcttcatttccccttttgaattttttctatcgtatcatatttcccccggcccgggcaagagcagaacggacaaatttttacacttttttctcctccgccttgtcagtccccccgccctgttaaaaactgcatcgcatgatctctcccgcttcgcctcatgctatggaaaacggacgaagcggggcggttttatggtgtggttttggtactttctgatttacagttttctcggctttctggtggaggtggcctatgtccgcctggtgggtggagtcaagcgggaccggaagtgccgtctggtgctccccatctgcccggtgtacggcctgggggcattggccattctcctcctgccgcctctggtccaggacagcctgccccttctcttccccgccgccgccctggtgtgcacggcggtggagtatgtgaccgggctgttttatgaaaaggtctttcgggtatccttttgggattactcccacctgcccctcaatctgggcggacgggtatgccttctgttcgccctgtcctggggagtactggccctgctcgtcctccatgtgattcatccggcggcggcctggctggcggcgcggattccgctgtgggcattccctccagccgtgctggccacggcgctggacacgctcctcaccgcccggctcctgcgccggaccggagaccccaattccctgcgctggtatgcccgcctgccccgccgccggccggcataaagcagggcgggggcggccacgtgccgctcccgccctttttgcatctacgcccggcggagttcactgagggtctcgtcgatcttcttctgcggtacgtatgcctgggccacagacaaaatctgctccagggtgatggtgcgggccgctcccagcatggggtgcttcatcagcatggggaaacggcgctgaaacaccgcccgggcccccgggtggtccagcagctcccccaccgtgatctgattgtgcttcaagtccattggcttcacctcccagctatcctatgccgggccggcgggagatttgacttgccaccgccggggacaggcgctataatgataaatatcactgtagaaagggagaggaaccagcagacatgatacagcgctttcgcgggcattcgcccatcatccaccctgccgcccggctggccgccaatgccaccctggtgggctgcgtgacggtggaggccgcctccagcatctggtacggggctgtgctccggggggatgagagttccatccacgtgggagcgggctccaacatccaggacaacgcagtgctccactgtgacccagactgccccgccgtgattggccgcgacgtgaccgtgggtcacggtgccattctccacggctgtacagtggaggacacctgcctgatcggcatgggagccatcctgctcaacggctgcaccatcggcgcgggcagcctggtggccgccggggcgctggtcacccagggagctgtgattccgcccggcagcctggtggtggggtccccagccagggtggtgcgctccctccggccggaggaggccgccgaactgctccagtcggccgagacctaccgcactctgtccgccgagctgctccccaccgccgaggcgtccgaaacaggaggaagcgtatgaaaaagaaagggaaaattcccggccgttatcataaaacattgaaggaacaggtgcgtgagaacccccggctggccgcggtctacgtcattttacgggtgctggtggtgctggccctggtggcacaggtgtttaacgggaactttgaaaacgtgttcttatgcgtgctcaccctgatcctgtttaccatccccagcttcatcgagcgcacaatccgcattgatatcccggacaccctggagatcatcatcctcctgttcatctttgcggcggaaattctgggggagatccaggcttactatgtccagtttccctattgggacaccatgctccataccctcaacggctttctctgcgcggccatcggcttctccctgctggacattttgaaccgggatgagcggctggccttcaagctctccccggtctatctggcggtggtggccttctgcttctccatgacaatcggcgtgctgtgggagttcttcgagtgctttatggaccagatgctcctgctggacatgcagaaggacacgatcgtacactccatcggctccgtgatgctggaccccgccggcggcaacaccccggtggccatccacgacatcaccgacgtgattgtggtcacggctgatggggcccagcacccactgggcctgggcggttatctggatatcggcatcctggacaccatgaaagacctcttcgtcaactttatcggcgcggtggtgttctcctttatcggctatttctatgtaaagaaccgcggcaagggctggttcgccaagcgcttcatccccaaggtccttccggagtccggcgccaaaaaataaccgaatattccgcccccaggggcgcatactagggaagcactgctcccaccctgtcacgcagggcgggccggtgcttcccttgcgtcataccaaggaatcaaggaggaatctcaccatgaacaagacccccaacaacagcatcaagtgctctgtgaacagttgtgcttaccactgcggcgagcagaactactgcaccctgaacgagatcaaggtgggttgctgcgactccaacgtgaccaactgcgcctccaccgagtgcgcctccttccagctgggcgaccacggcggctgctgcaagcgctgaaccgtccatccatgcaaaatcgcgcgttcccgattgggaacgcgcgatttttatggtatttactccttgggctcggcaggtacctcggccttagggtcggcagcggcctccgctgtaggcttctccgtagctggagccgcgggcttgacagcggcagccggggcggccttgggggccgcaggcttcacctcgggcaccttgccgtccacggtgatcagcttgcgggggcacttctgtgcgcagataccgcagccgatgcacttctcgtagtcgatcaccgccaggttgttgaccatggtgatggcttccttggggcagctcttagcacacagggagcaaccgatacagccattgtcgcataccttgcgggcgtccacgcccttgtcgtgggaggaacagggaatggtgacgtggcgcttggtcttgtagggctccagggcgatgatgtgtcgggggcagatgtccacgcacttattgcacgccttgcacttctcctcatcgaccctggccacgccgtcgatgacgtggatagcgtcaaagggacatgccttctcacaggagcccaggcccaggcagccataggcgcagcccaggtcgccgccgccgggcagcttggaggccgccacgcagtcgtggatgcccacgtaagtgtactgcttgtagttctggccgcagccggtgcagtgcacctgggcaatctgcttcactgcggcgccagcggacacgcccataatctcgccgatctgggcggccaccgcctcgccgccggcggcgcaggcattgactggggccactcccttgaccacagcggaggcatagccggagcagccgggatagccgcagccgccgcagttggcgccgggcagacagcccaggatggcctcttcacggggatccacctcaacagcgaacaccttggaggcgatcgccaggaccaggccgaagatggcgcccagcacagccaggaccacaacggcaattataacagtcgtcatattcttccgccctccttaaccgaagaccttcaggccggagaagcccatgaaagccagagcgatgaggccggcggccaccagggcgatcgggaagccctcgaaagccttgggccactcggagaactccatccgctcccggatgctggcgaagatcacgatgaccagcaggaagccgatgccgccggtaacgccgtacacgacgctctcaataaagccgtagccgttctgggtgttctgcagcaccacgcccagcacagcgcagttggtggtgatcaggggcaggtacacacccagggcctcatagagggagggcatggccttcttgaggaacatctcgatgaactgcaccagagaggcgatgaccaggatgtaggtcacggtctgcatgaaggtcaggcccatgggaaccagaatgagctcattgatgggccaacagatggcggaggccaggcccatgacgaagataaccgccagccccatgccggaggcagtctcgatctttttggaaacacccatgaaggggcagatgcccaggaactgggccacaataaagttattgaccaggatggcgcccagggcgatggtaaagagctgagtccactccattacttggccacctcctcagtctttttgtcgcccttcttgggcttgttcagaatgtactgcatggccgcgatcacgcaggccagggtcaggaagccgcccaccgggagaatcatgcccagagcgggaatgccctcgggcaggatgcggatgcctgcggcagtgcccaggccgaagaccaactgtccttctgcgccgatctccagcaggccgcccataatggtgccatttccaaggaactcgcgaaccacacacatgatgaccagcaccatggtgtaacccaggccctggaagataccgtccagcgcagaagcgccgataccattcttgtaggcaaaggactcggcgcggcccagaatgatacagttcaccacgatcagggggataaacaggcccaagctcttggacagggccgggataaatgcctgcaggcacaggtcaacgatggtaacaaagccggcgatgaccacgatgaagcaggcgatgcggatgttgttggggatgatcttacgcagggccgcgatgatgatgttggacagggtcagaatcaccaacacggacaggcccatgcccaggccgttgaacagggtggtggtaatggccatcaccgagcacatgcccagcagttggacggtgacggggttctggaagaacaagccgtccctaaattgtttcatcacgttcatattcgattaccctccttagcccatgctcgcggcggcggcgatggcgctggtgacggcctcgcaaacgccgcgggaggtgatggtagcgccggtcagggcgtcgatgtcgccgccgtccttggtgaccttgacctcgccggtcttgcccacgaactgggcctggaagtccggcttgctggcgttggagcccaggccggaggtctcgccggtgctggtaatggagatgccggagcaggccccggtattgtccacacccaccatgatagtcaggttgccgctgaaggacgtggcgggcttaacctccaccacgtatccggcatcgccggccttgtagacggcctgcaccatagcgtcgccgccggtgtactccacctcgtcatagctgttggcggggagcacggcagccatggcctcctgggtggtcttctcgttgttagccgcgataaagggggcggtcacatagttggtcaggcccagcagaagggcggtggccgcacagatggcaaagaggacgatcaccagggtcgccatgcctggttcctttttcttggttgcagtctcactcatggcttagccctccttcccggcttttttggccgccttggccgcagccttcatttccttggtcactccgtagcggccgggcttgcccaccttgtcgatgagccacacgcagcagttcatgatcaggatggagtagctcacgccctcgggatagccgccgaaatagcggatgaacacggtcagcaggccgcagccgatgccgaagatgatctcaccctttttggtgacggggctggtgacatagtcggtggccatgaagaaggcacccaggaacaggccgccggtgaagagctggtaggtcatccacaccagccggtcgttgccgcccagggggaacaggaaggtgagcaccgccacggtggcgatgtaggccacggggatgcgggcgcggatgacgccgcggacgatcagatacacgccgcccagcagcagggccagggcggagatctcaccgatacagccgcccacattgcccacaaatgtgtcgaggatggtggcatcgggcagcaggccgccgtgcatgaagtcagcagacaagggggttgcgctgctgacgatatccaccccggccatagtcttggtgccgcccagcaggtcggcccaggcgccggtgccgatgccgggggccacccaggtggtcatggccacggggtagcacagcatcaggaaggcgcggccgcccagggcggggttcatgaagttcttacccaggccgccgaagagctgcttgaccaccacgatggcgaagaagtcgccgatgatcagcatccaatagggcagggtgggggcgcacacgaaggccagcagcacgccggtgacggcggcggacaggtccttgacggcgcaggacttgtgcatcagcttgcggtagccccactcgaagaactcgcaggccagcacggagatgatggtggccaccaaggcacgggggccgaagaacaccacgcccatgaccatggcaggtaccagggcgatgagcacgtcccgcatcaggttggtggtgtcaatgggagaggccacgtggggggacgacgccaccgtgagtctcagcttcttttcctcgttcatgctttggccgcctccttcgccgctttttccttggccgccagagcccgcagctcacccttggtcacacggaaggactggaccaggtggaggcgggcggggcagatgtagttgcaggaaccgcactcaatgcagtccatgacgttaagcgcctcggcctccttccacatgcccttctcggcgtacaggtgcatgtagaccggagtcaggtgcatggggcagacgttgacgcagcggccgcagcgcaggcagacctcctcctccacaacgggggcggcctcctttttggtcaggcagagcacggcattggtgcccttgatgcaggtgacatccaggttatactgggcgatgcccatcatggggccgccggtgagcacgcggtcgggctcctccttgaagcccttgccctcgtcgatgatctgctggaaggaggtgcccaggggcaccagcaggtttttgggctccttgatggcgtcgccggtgacggtgaggatgcggtgggtcaggggcttgccctccaccacggcgtcgtacacggcagcggcggtccccacattgaacaccgcgcagcccacatgggcgggcagcccgccgggaggcacctcgcggccggtgacgcgctgaatgagctgcttttccgcgccctgggggtagcgggtgcgcagggactccacctgcacgtcgttcttgccgcccaccagcgccttcaggtgctcgatggcgtcctccttgttggcctccacaccgatgacggcgttcttcaggccgaaggcctgcatcagaatgcgcacgccgccgatgacccgctcgccctgctccagcatcagccggtggtcagcggttatgtagggctcacactcggcgccgttcaggatcagggtatccaccttgccgacgccggagctgatcttcacgtgggtggggaagccggcgccgcccattccggtgatgcccgcctccttgacaatctccacgatctcctcgcagctcagcttgctgtagtcgggatggggggtgagcacggagccccaggtgtcctggaagtcattctcgatgaccaccgacatcacctttccgccgcccacatagggacggggctccaccgccttgaccacaccggacacagacgcgtgaatgggggcgcccaggccggcgatctcgccgatcttctggcccaccttgacctgatcgcccacggctacaatgggcttacagggcgcaccgacatgcattgccatggcgatgacgacctgcttgggagcggcgctcaggggcgcaacctccttgtggcgtgccaactctttccggtcattggggtgcacgccgccgtaaaagctttgcttcataggtccacctcgcaaatctgacccacacacgggccattgttctgagtcgtttgaccggtatctcaaacagatttatcatagcgcaaaccaagcatcttgtccagttaaaacgctcaaattcccttcattttttcttttaaaccaattagttttttctctttttccagaaatatggtaacatccgcagtaccattttcgcaaaaaccatccggtttactttttcgtcaggatgacaacagagctccgctccgttctccactttcgttgtttaaaatagagaagttcaaaaagtgaaatcaacccaattgacaaatgcggtccggaacggtatgatatcaggtaattacattttccgggcttgcccggagcgtacaaaggcgatgaccgggacagtacgggcggtacataagcgcagagagggagcggctggtgtaagctcccatgaggccgccccgaacgctcgcccgggagcagccctgctgaaccgcaggttaggcagggacggtttcccctccgttagcggggcaatgagtgcgcgggcgcgccccgcgaagttaggtggtaccacggagtcatggcggcttcgtcctatgggacgaggccgccatgtttttttgcgatttataaaggaggttcggacgccctatgagaatgaaaaccgcccagattttgatggagtgccttctggagcagggggtggacacggtcttcggctaccccggcggcacgatcctgaacgtatacgacgaatttgagctccacggctacaaggacaaaatccgccatatcctcaccgcccacgagcagggcgcctcccacgccgccgacggctatgcccgcgccaccggaaaggtgggggtgtgcttcgccacctccggccccggggccaccaacctgaccaccggcatcgccacggcctactacgactcctcccctgtggtgttcatcacctgcaacgtcagcgagaacctcatcggcaaggactcctttcaggaggtggacatcaccggtatctccatgcccatcaccaagtgcaactatctggtgaaggaccccggcgccctggccgacgtgctgcgggaggccttcgccatcgcccgctccggccgccccggccccgtgctggtggacatcgccaagaacgtcaccgccgccgaggccgattacgagcccctccccctcgaccagcacgccaaccacggccggctgggggccatgctccgccgggccagccacgatctcaagactcccgagcccgacgcgggggacattcagaccctgctggatctcattgagggggcccggaagcccctggtgctggtgggcggcggggtcatccgctccaagggagctgtgccccagttccgcacctttatcgagcggctcaacgctccggtggcctccaccatcatgggcggcggcgcctgccccggcaatcaccggctgttcaccggcatgatcggtatgcacggctcccacgcctccaatctcgcctccgaccagtgcgatctgctcatcgccgtcggctgccgcttctccgaccgggtggccaccgaccccgccaccttcgcacccaacgccaaaatcgtccacatcgacatcgaccgggcggagatcgacaagaacgtgctcacccaccaccacatcatcggcgacgcccgccgggtgctggagctgctcaacgagaagctcccccagcacgactacccggagtggaaggcgtgggtgttctcccacccggaggtgcccctcaagaaagacgatgttctccacccccacgagattctggagaccatccaggccgtcaccggcggggacgccatcgtggccaccgatgtgggccagcatcagatgtggtgcgcccagtactaccacttctcccgccccggccagttcatcacctccggcggcttcggcaccatgggcttcggcctgggggccgccatgggggccgccgtgggcaatccgggcaaggtggtggtgcactgcaccggcgacggctgcttccgcatgaactgccacgagctctgcaccgccgagcactacaacatccccgtcatcaccgtcatcttcaacaaccgcaccctgggtatggtgcgccagtggcagaacctgatctaccaaaagcggttctcccagaccgatctggaccgcggccccgacttcgtcaagctggcggaggcctacggcatccagggggagcgggccgccacccagccggagttcgaggcggccttccgccgggccgtggccgcgggccggccctacctcatcgagtgcgccatcgacaaggacgccatggtccaccccatggtctccgccggcgctccggttaccgatttcatcctggattaaaggagggcgtggatatgaatgaagccaatgtgacccgccgcaccctctcggtgctggtggaaaatgccgccggtgtcctgtcccaagtctcccggctgttctcccggaagggctataacattgagtccctggcggtaggcaccaccgacgacccagccgtctcccgcatcaccatcgaggtgtgggccgacaagcccatgattgagcagatcatgaaccagctgcgcaagcagttctccgtctactccgtgcaggagctgctgcccgagcggtccatccgccgggagctggtcatgttcaaggtgcgggccgagacccccgacatccgcaacgagatcatccagatcgccaacatcttccgggcctcgatcatcgacgtatcccttaagtccctcaccctggccctgatcggcgacgagaccaaggccgacgccatgcagaagctgctggaggccttcggcatcctggagctggtgcgcaccggcatggtcgccctggagcggggcgcctataccatcggcgacgagaccaaggaacagaccgagtttaatctgggcaagaacttcttgtaactccggccggtccgttcctgcgagcgcagcgagccgccgctctgcggcgtccaagcgtttcgcgcagcgaaaccttgccgcaggggcaattcactgcacagccgttggcggctttgccgccctacggatgtggcgtaccccttgcgggtgcttccgccgaggatgtgaattcccgcccggagggctcccaaacgcgtcggcgcgtttgggagatgcagaccgagtttaatctgggcaagaacttcctgtaaggctcctgttgcccggcgcgcagaacataggccccgtcaaattccacagaggcctctgtgttttcatattaaatatgaagtgtctcattttccacagaaagggggagagcatgtatgaagctgtatgaaaccatgttcctgtcaaccagagggagggtgttcctctattagccctccagatatgaaggaggaaatatgaaccatattaccctgcaaaaagtggatgaatccaactttcttgcgtgcttttccctgaaattagaggcccagcaggagaaattcgtatcccacccgatccggagtctggcccaggcgtatgtatactacagtcagtgtacgccctttgcggtctgccgcgccggtcaggtggtcggatatctgatggtcatctatgactatgacgaagaggcttacttcatctggcatctgatgatcgacgcccagcaccagggcaggggctgcgggagggcggccatggaggcggcgcttgcctatatccgttccaagcccttcggggcttccaacctcgtccggctgaccgtcagcccggaaaacgcggccgcctgccatttgtaccagaccctgcgcttctctcccaccggccgggcagacggggatgagatcgagctggagcgggtgcttgactgacctccgccccatgcggcggccttccgcttctgcggattgtatcacagttatcattcttttcccgaaaactatgctatcatgagttcaaattcccccaccaacaagaagaaaaaggagtgtatcaccatggctaagatgtactacgagaaggactgcgagctctcctacctgaacggcaagaaaatcgccatcatcggctacggctcccagggccacgcccacgccctcaacctgaaggactccgggtgcgatgtgtgcgtcggcctgcgggccggctccaagaactgggccgaggcggagaaggccggcctggcggtcaagactgtggccgaggccgcccagtggggcgacatcgtgatgatgcttatcaacgacgaggtgcaggccgaggtctacaagagggacatcgccccctatctgaccgagggcaatgccctggccttcgcccacggcttcaacatccgctatcagcagatcgtcccccccgccggcgtggacgtgttcatggcggcccccaagggccccggccacaccgtccgctccacctatgtcaacggcaagggcgtgccctgcctcgtggcggtggagcagaacgccaccggcaacgcctataagctcgccctggcctacattgcgggcatcggcggcgcccgggccggcgtgatggagaccaccttccacgacgagaccgagaccgacctgtttggcgagcagaccgtgctttgcggcggcgtggtggatctgatgcgctgcggctttgaggtgctggtggaggccggctatgagccggagaacgcctacttcgagtgcatccacgagatgaagctgatcatcgacctgatcaacaagggcggcgtggcggccatgaactactccatctccgacaccgctgagttcggtgagtacgtctccggcccccgtgtcatcccccacgaggagaccaaggcccgcatgcgcgccgtgctctccgacattcaggacggcaccttcgccggcaagtggatcgccgagaacaagaacggccgcaccttcttcaactccaagcgcgcccagctcaagaagcaccagatggagctggtgggcgacgagctgcgccgcaacatgatctggggcggtgataaagatctggacactgcctccaactgacccagaaccgggcgcgagccccgcgcagcgggtcgcgtccggagaggaggcgcaagggagcgcagcgagggatgcccgcaagggtgtcccgagcagagtggactttgcgccgacgaggggcggcgacaaggatctcgacaccgccttcaactgaaccggggcccccgcgcaaccccagcgtcagcggtttgcgtggggaagcggaaccttcccttctccccaaaaagtccggcccgtgcatttgcacgggccggactttttgtttctgattcagcgaatgtctccgggaagccccgccgcgtcccgcgcggcatcgtagtccctcttgttcacatagatgatgtactcgtactgtgcccccggcgacatgcccatggtaccgaagtcggcccgggtacccggattgagggcggaaggcgagctgcggtcgatcaccttcaccgcgtagtccagccccgcgtcccgcagggcggacaggatatcgctctgttcctgcatggtcagaacggtgaccagctcgcggcggttccaaatggcaagcatacgttcccctccttctgctctttcccggtcagcccgagcgccctgtcctgtaagtcagggtgcttttgaattcaatgcagaatcccgtggagaaagatctttgtcagcgtatctacaatctcatcgtcttcgtactggggctccactcccaccacaattttatactgaatcgcaaatccaaacagggaacccacataggtcttggcggccagataggtgtccaccccctcttgtagattgccggtatacctcttcagcaccgtctctacacagcgggccacatagccgatgccgttcttatgatagatgctgctgacctccgggtgccgcttggagtcccggatgatggcccgggtaaaggcgatacgctccggcgtgtcaaaaaccgccagataggccagccctatctttttgatagcagcctccaaatcatagccgtctatttccggctgaatgctcaaaaaattgaaatagaacggtgtctcctgcatgacagcggagtagagctcctctttgtccttgaaatactggtagagtgtggccttggaatagcccgactccctggccagcatatccatagataccccgtcatagccgtgttccccaaaaaggatcagcgccgtctgaagaattgaggtgcggttggcgttatatgcatcctgcaacgcctcttcttccgaaatgtccagattttcaaacagatcctttttcccattgaagtgcaggtagatggtggacggggagatcccagccgcccgggcgatactgttaatggttgtccctttgtagccctctttcaggaaaatacatctggctgtctccaaaatcttttccctgacatcgctctccatgcttctccccctcctttcaaatttaactgtcgattctagtttatcctgttataaatatcctgtcaagcatcactgtgcctccaattctgtattccgcacaagtttcccgccaactttttgtccaaaacatctattttgttttttctccgcaacaataatataataacacttgacagtatattattattatgctactcttgcatcgtgtaataattattaccgactatttcaattatattattcctcaaagggaggtctttctttgatccgcattgatctggaaaatcacttttacgctccatgtctcattgacgcgctggcgcagcgcagtcagccgccgttttatgaccgcgccactgaccagattcactggaccgaggatgtctgtatgccccagggggagctgcttcagcggcttctggaagtaggcgagcatcgcctgtccctactggagcagcaggggattacccatgcggtgctgagctgttcccccggcgccgagcagcttgagcccgccaagagcatagccgtttgccaggccaccaatgccgcgctgtatgagctgacgcgggcccatcccggccgtctgttcggcagcgccattctccccgtaaaggacgtggctgctgcggagcgggagctggagcgctgtgtgaaggaatatggctttgtgtcatggcacacccactctaattacggaaacaccgcaccggacgatccccgctatctccccctcttccgcaaggccgccgaacttggcgtctacgtctatctccaccctcagctccccgagggcagccgctacgcaggctacggctttacctttgccggtcccggtcttggctttacggtggatacggtcaccacgctgctgcgcatggtggtatccggcctgttcgacgagattccctctctccggctggtactgggacacctgggcgaggggcttccctttttgctggaccgtattgaaaaccggatcaaatttctgcccaatccggccattcgctgccgccgcccgctgcgctactactttcagcacaacatctgggttactaccagcggcaatatgtcgccggaggctttccgctgtacccaggatgtgctgggtatggaccacattctctttgcaagcgactacccctatgagtccgtggaggacatgatggcctttttgcgcgggattccgctgaatgaggcggactacgccaggctctactatcaaaacgcagaagcattactgggaatttccctttcttaattgatttggaggtgtcatccatgaggaacaggaaacatgacggcaacaagtcctcggtcgtaaacttcggtgtgcagggctgggtcaccatcctgtactgtctgctgatgttctggctttatgccggcatggtgaacagcggttccaatgtaaccgccccggccatcgcagagaagttcggcatccttcccggtaccgtactgaatatgaacaccgtggccggcgtggtgggcgtcatcttctttattgtcgtaggccagatcaaccgggtgatcggcgcccgcatcacctccggcgtgtgcctaattgtcgccggcctggcctatctcggcgtaggcaatgccgtcaatcttgccatgtataccgtctgcatgtgtattgtggtgggcggcgtcatgtctgcgggctacatctccggcggggatctggtcacccagtggttccccaagaaaaaaggcatcgtcatgggctacaccaccatgggccacaatctggcctccgtcgcctttgtcccccttatcacacttctggtaggtcggctgggcattggcaacggtgtaattcccatctccgtttgcgccatcgtgcttggcattcttggtctgcttctcgtccgcaatactccgcaggagcgcggcctcaacccggacaatgtgtccgatgaggtctaccgaaccgagtacttccacggccatgaggatcccactggcggctggaccaccggcagactgctgcggtgcaaggaaacctggctggtggccgtcaccaccggcatgttccaaatctgctccctgggcgtggtatctcaaatggtgctgcgcaacatggagctgggcttctcccgggagcaggccacctttatcctcagcctggtagctctcatcggcctggtcggctcctttttcgtgggctatatggatgagcgccttggcaccaaaaagtccatgctgttcttcggcatctggtacgccctctccctgctggccaacgccaccgagaacaccgttctggtctatgtctccatctttatgatcggcatgtccatcggcggctccgccaacttcaccacctcccttaccacctccgtgtttggccgtcagggattcagcaaggtaaattccgtcgttttccccatccaaggcgcggtgtccgccctctccttcgtggtcaacggcgtagtctccaacatcaccggcggcaacctgcgctacacctatctcatttttgccggcgtatccgtagtctccgcgctcattgtactgctagtggatgaacaccgcttcaacaaggactggcagcagggacagaacgcccgctccgcctcttgatgagtccaataaaaaagatcgcctgccccggccggggcaggcgatcacagtttttggggtcattccacgcttttcagcagctcctccgccgaaactccgaagagcttggccagggccagcaggttggaggtgctgggatcggcggtgccgctctcccacttgctcaccgcctgacggctcacgcccagggactccgccacgaactcctgggtcatcttgcagcgggtgcggtgatacctgatggcctcccccaggctcctggccatctccgccttctcctgccggacgggaccggatttcaggtacttccgcagagccttaatgagcagaaccgccagataaatcaccagggccaggatgcccgcccagatcaccagccccagtaaaagtgggattgtcgtcgcgaaactcatatcaaacactcctttccagatggccccattttagcctgtttgggcggttgcctccaccaattatggcgcaacttttggttgctcttcccgctcctcccgcttccgcgcggcccgctgggccaggattttggggaagaagtggaggaacaggcaggtggtcactgtggcggccaccacgtcggcgatgggctcggagaggaaggtggcctccggggagaccagggcgggcagcaggagcagccccgccaggaacacgcacttgcggaagatggagcagaacagagccagccgcacgtggcccagggcggtggtctcgtccaccaggggatactggatggccagggggatgatcatggcggtgaataccttaatgtagcgtaccgaccgcgccgccacctccgggttctgggtaaacaggcccacaaacaccggggacagggtgtgggtcaccaccgtcatgagcacacagaaggtcacgcacagggccacgatggactggatagccctcttgatgcgctccaggttggccgcgccgtagttgaagctgaccaccggctggctacccagggtaaggccgcccatgggcatggtgatgaggagcagatagctctgcacgatggtggcgcaggtcaccagggtatcccccagctccggcccgccgtagcgctggagcacagtgttcagcacgatcagcaggatgctgtccgtggcgatgatgaggaagggggacaggccgaaggccagcacccgccgcatgatgcgccaggagaagccgccccaccgcaggcgcaccggcatccgcttccgccgcagggagaggaggacgaaggcgcaggaggccatctgggagagcacggtggccagagcggccccggccacgtccagatggaggccgaagatgaaaatgggatccaggatgatgttgagcaccgcccccagcatcaccgtggccatccccaggccggagaagccctgggcgatcaggaagctgttcatccccgtggccatgagggcgaagaaggtgccggcggtgtagatggtcagataggtgttggcgtagccgaaggtggcgtcgctggcgccgaaccacatgagcagatgctccttcagcagaaggaacagagtggtcagcacgccggacaggatcagcagcatcaggaagctgttggacagcacccgcccggcctccctgtccctcccctctcccatgcgcatggccatgatgggggagccgcccaggcccaccagggaggcgaaggaggacagcagggtgacgatggggccgcacacccccacccccgccagggccagatcgccgataccctggatgttgccgatgtagatgcggtctacaatgctgtataggacgctgactagctgagccagcatcgtggggatggccagccggcacaccagccggaagaccggatcacgccccagatcgttggtctttctcacggtttttcctccctttttgaaacacactggggcattatacctctttttccgtcccccgtaaaggccctttggctttttagcactcttaaacgtagagtgctaacatttacaatttagacatatttacatgtatatttgttcataaactcggcctatactttgtctcagaaaatgagttgaggggccggaaaggcccccggaaagaggatgattggaatggaacaaaggaagttttagcacatcaatgttcccattgctaaatcacatttccgaaaaaaggagcgatttttatgtttggcatgcttccctttgagcgcagcgacgacaacctgtttgatacctttgataactttacccgcaacttcttccgcggcagcaacgccagcctgcccgccttccgcaccgacattcgggacgccggagacaagtttgtcttagaagccgagctgcccgggttcgacaagggcgacatcaagctggatgtgaaggacggtatcctcactattaccgccgagcacagcgagaaccaggagcagaaggacgccaagggtgcctacatccgccgggagcgccggtacggctccttcagccgttcctttgatatcaccggcatcgatgagggctccattaccgccgcttacaacaacggcattctggagctgaacctgcccaaggccgtccccgtggttcctgagagccgccggattgccattgattgacctggatatccgggagtcggtcagccttggctgaccggctccttcccgttttctgttccctcccagcgctcgcagccgaagtccggctccgggtgccgccgccaggggtggatgcaatggccgtaccacaagggaatgtaatatccctcccggctgcggacatagtgctggcggtaatgaacgcaggtcccgcagacccgcttttccaccatgtacttccggggcaatgacataaaatcacctcatattgttatattactatcattcgatagtatattcaatactattatccggtagtaagatacaatagcgccgaggtgaataacatgtatcttccccggctgcgcgatttgcgcgaggatcacgatatgacccaggcgcagatcgctgcgattcttggaatcgaccaaagagtttacagtatttatgaaaccgggaaacgggatatacccctgccccatctggtaacattagctgactattataaagtctccacagattacctgttgggtcgggagaaatcctgattctccttataaaaggagcgtgacgcaatatgaacgcgcagaaatatacccagaaatccctggaggcggtgcagaacgcccagtccatcgccaccgagtacggcaaccagcagattgagcagccccacctgctgctggccctgctgctggacgagggtgggctgattccccagctgctggggaacatgggcctcaccgtcccctccttcaccgccgccgccaaggcggaggtggagaagctgccccgtgtgtccggctccggccgggagcagggcaagatctatgtggcccaggacgtggacaagtgcctcaacaccgccgagagcatcgccgcgtccatgaaggacgagtatgtgtcggtggagcacctgctgctggccctgctggacacggccaaccgggagctgaaggagctgttccgcacctacaacgtacagaaggagggcgtgctccaggccctgaccaacgtgcggggcaaccagcgtgtgacctccgacaacccggaggagacctacaacgccctgaagaagtacggctccgacctggtggagcgggccagggccaacaagctggatccggtcatcggccgggacgacgaaatccgcaacgtcatccgtatcctgagccgcaagagcaagaacaacccggtgctcatcggcgagcccggcgtgggcaagaccgccatcgccgaggggctggcccagcggatcgtcaagggggacgtacccgcctccctgaaggacaagaccatcttcgccctggacatgggttccctgatcgccggggccaagtaccgcggcgagtttgaggagcggctgaaggccgttctcaacgaggtcaaaaagtccgagggccgcatcatcctctttatcgacgagctgcacaccatcgtgggcgcgggcaagaccgagggcgccatggacgcgggcaacctgctcaagcccctgctggcccggggcgagctgcactgcatcggcgccaccaccctcaacgagtaccgccagtatatcgagaaggacgccgccctggagcggcgcttccagcccgtcatggtctccgagcccacggtggaggacaccatcgccatcctccgcggcctgaaggagcggtacgaggtgtaccacggcgtcaagatccaggacggcgccatcatcgccgccgccaccctgtccaaccgctatatcaccgaccgcttcctccccgacaaggccatcgacctcatcgacgaggcctgcgccatgatccgcaccgagatcgactccatgcccaccgagctggacgtcatccagcggaagatcatccagcacgagattgaggaggccgccctcaagaaggaggacgacgccttgtccagggagcatctggccgagatccagaaggagctggccgagatgcgggacgagttcaacgccaagaaggcccagtgggaaaacgagaagaacgccatcggcaaggtgcagaagctccgggaggagctggagagcgccaacgccgagctggaggccgcccagcggcagtacgatctgaaccgcgccgccgagctccagtacggccgcatccccgagctgcggaaacagctggaggccgaggaggccatcgccaacgagggcagggcccgttccctgctgcgggacaaggtcaccgaggaggagatcgcccgcatcatcgagcgctggacgggcatccccgtggccaagctgatggagggggagcgggaaaagctgctccacctggaggacatcctccaccagcgggtggtgggccaggacgaggctgtgcgcctggtgagcgaggccattctccgctcccgggcgggcatcgccgatcccgaccgtcccatcggctccttcctgttcctgggccccaccggcgtgggcaagaccgagctggccaaggccctggccgaggccctgttcgacagcgagaagaatctggtgcgcatcgatatgagcgagtatatggagaagttctccgtctcccgcctcatcggcgcgcctcccggatacgtgggctatgaggagggcggccagctcaccgaggccgtccgccgccacccctactccgtggtgctcttcgacgaggtggagaaggcccaccccgacgtgttcaacatattactccaggtattggacgacggccggattaccgacagtcaaggccgaaccgtggacttcaagaacaccattatcatcctcacctccaacctggggtcccagtatctgctggacggcatcgatgagaagggcgacatcaccgccgaggcgaaaaatgccgtcaacgatctgctgcaccactccttccggcccgagttcctcaaccggctggacgagattgtgttctacaagcccctcaccaaggacaacatcacccacatcatcgatctgctggtggctgagctcaaccgccgcctggaggataaacagctcaaggtggttctcaccccggcggccaagcagcacatcatcgacagcgcctacgacccggccttcggcgcccgtcccctgcgccgcttcgtgcagcacagtgtggagaccctcatcagccggaagatcatcgccgacgaggtacagggcggcgacaccctcaccgtggactgccgggatggcgagctgacggtggaaagcaagagcgtcctcaccggcgaggtggtcaatccgtaaacagacagccccggccgcattgcggccggggctgtttcgttccctttcgccggctagaccgcccgcccggcggccagcatctccttacaggcccgaatgtccgcctcgcccagtggggtgaagcggcccagggcggaggcgtagtaggccacctgggccgcctcctccacataggcggcggcggtcatggccgcgggcaggtcccggccgcagcagaggctgccgtgattgcgcagcagcacggccagcccgtccgtccccaaggcggcggccactgaggcggccagcgcccgggagccgggcaccgcgaagggcaccacccggatgggggcgaactccgcttggggcggcgtggaggggggcagctcatccaccgccatggccatcacggtgcagaacagggcgtggttatgcaccaccgcccccacgtcggggcgggcacggtagaccgccgtgtgcattggggtctcggaggagggcgcgtagggcccatccacccactccccgtccagggtgacaatggcgatgtctcccggctccatagtgtcatagggccgcccgctgggggtgatggcggccacccccgcctcccggtcccgcacggagatattacctgatgtcccgtggatcagcccctgagcgctggcctgccggatggcggtgagcacctgccgccggatgtcctcatacttcatgaaatcgtccccttctctctgtggtatctgccctattatagcacaaaaaacggtctgagtcatctgactcagaccgtttgcgcctgcatatgggaaaggcggaccgcccggcgggcctggagctcccggaccgccggctcctccagcatcagccgtttcccattttccagggccaccacccggccctccacccgggagaccttgtcggtgttcaaaatcaggccgcccgggcagatcagaaactggggctcgccgtccagcagcagggccatggcctgaaagcccagccgggcccggacgcggtcgtaggcggtgtagagcagcagggtctgcttctgcgcctgaatgtagtggatatcatcggtacggagcgggtgcttaatgggcagaatggcatcccgcgcgtggcggggagccagcgcgaaatagtccgtcatgacggtgttcatgccgctcacccgccgccactccacggcgccgaaggtgtcggccgcggtcagcaccttggcccgcagggcctgtccctcctccagataggcccagagggtctccccctctccgcggatgcgccgcagctcctccgccgccctccactggcgctcgccgccacggaggcagactaattgatatccaccgctctgcgccgccatggcgaactcctccaggcagtcgaagcagtcggtcaccacggcgaccttccagcgcaccgcataggaaaacatctgctcccggagctgctgccggtccttctcctgtggtgcgatcaaggcaattctgatgatgttcaccctctctctgcgccgcagaaagcccccctgaaccaatccgggtcaaggttcaggggggcttttgagcgattagtctacgccgccgatcaggccgagggcctcggcgatatccaggttgacgcccagaacgttcaccgtctcctcaccgaagatgcccagcaccttgccggtggtgttgtccgccacgaactgctccagctgctcctcggtcaggcccgtgttctccgccaactgcggaatctgcacagccgcagaggcagggctgatgtggggatccaggccggaaccggaggccgtcaccaggtcggtggggatgtcctccaccgtcaggtcgggatgctccgccaggaattcgtcgatgtcgccctgcacgcgctccgccagagcggggttggacgcgccgtagttgttggagccggaggccacgccggcgtactcgctgccgtcgttgtagaacttgttgccctcctcatccaccgtataggtgttgtactggtaagcggaggggcggcagcgcatgaagcgggggtcagtgaagtcctggcccacgttcttggcgcccacggcctggccgtccacatagatgatgctgccgttggcctggctggggaagagcgcctggctcataagcgtcatgacaacagggtagatcaggccgcagatcagcagcagtaccagggtcaccagaaccggcgctctgagagatttgatcactttcatgttcggtttcctcctgttacattgccatgccgaggccgagcatcgtcagcaggggcgcgatgatcaggtcgatcactttgatgccgatgaaggggacgatgacgccgcccaggccgtagatgagcatgttgcgggtcagcatcttgctggcgctcatgggcttgtacttgacgccgcgcatggccagcgggatcaggcaggggatgatgatggcgttgaagatcagagcggacagaatggcgctggtgggagaggccagcttcatgatgttcagcacctgcatctggggaatcaccatcataaacatggcggggatgatggcgaagtacttggcgatgtcgttggcgatggagaaggtggtcagggagccgcgggtgatgagcagctgcttgccgatctccacaacctcgaggatcttggtggggtcggagtccagatccaccatgttggccgcctccttggcggcggtggtgccggagttcatggccaggcccacgtcggcctgggccagagcgggggcgtcgttggtgccgtcgccggtcatggcgacgatcttgccctgggcctgctcctccttgatgaccttgatcttatcctcggggcggcactcggcgatgaagccgtccacgccggcctcctgggcgatggtcgccgcggtcagcgggttgtcgccggtgcacatgatggtcttgataccgatggcgcgcaggcgggcaaaacgctccaccaggccgtccttcacgatatccttcaggtagatgacacccagcacacgcttgcccacgcagacggtgaggggggtgccgccctgcttggacacctggtcggtgtggccctgcagatcggcgggcacggcgccgcccaggcccttgacgtactccacaatggcgtcgctggcgcccttgcggatggaggtgccgtcaggcagatccacgccgctcatgcgggtcttggcggtgaactcgatgaactcggcgcccttcaggctgctctcgtccaccacgacgccccgctccttggccagggcaaccacgctcttgccctcgggggtggcgtcgctcagggaggagagggccgcatacttggtgagctcctccacgctgacgccgctgacggggatgaagtcggcggccatgcggttgccgtaagtaatggtgccggtcttgtcgaggatcatggtgtccacgtcgccgcaggcctcgacggccttaccgctcatggcgatgacattgaagcgggtgacgcggtccatgccggcgatgccgatggcggagagcagcgcgccaatggtggtggggatcagacacaccgccagggcgatcagggtggacacgggcagggtgacgccgctgtagcggccgatggggtacagggtgacgatgacgatcatgaagatgatggtcagggccaccagcaggatctgcagggcgatctcgttgggggtcttcttgcgggaggcgccctccaccagtgcgatcatcttgtccaggaaggactcgccggggttggaggtgatgcggatcttcagccagtcggacaccacggtggtgccgccggtgacggaggcgaagtcgccgccggactcacggagcacgggggcggactcgccggtgatggcggactcatccacgctggcggtgccctcgatgacctcgccgtcgttggggatgatctcgccggcgctgaccatgaccacgtcgcccttcttcagctcgctggaggagacgacagtctccgtgccgtcggccttgagcagacgggccttggtgtccttctgggtcttcttcaggctctcggcctgggccttgccgcggccctcagccaccgcctcggcgaagttggcgaagaggacggtgacaaagaggatgacgcagacaaagatgttgtacaggcggacattgttgatgccgtcggtgggcccgaagagctcggggaagatggagagcagcagagcgatgacaaagccgatctcaaccacaaacatgaccggattgtgcatcatatatttggggttcagcttggtgaacgccccgataacagagcacttgaagatgtcctttgttacgaatttggtccgatgcttatctttcatagggaatccgtaatcctcctttaaaccggcagccagatggacagatgctcagcgatggggccgagagccagggccgggaagaacgtcagcgccgcaaagatgtagaccacgaaggccacgatgacgccgaagccgatgttgttggtcttcagggtgccgatggactcgttcatgcgcttcttgcacagcagcgaccaggcgatggccagctggagcacgatggccaggtagcggccgaagaacatggccaggccggcggtgatgttccagaagtaggtgttgtcggccaggccctcaaagccagagccgttgttggcggcggaagaagagtactcgtacagcacctggctcaggccgtggaagccggggttggtgataccggcgcggccggcctcggtgccgacggccagggcggagaagcccaggatcagcagggggtggatgatgaggaccagcacggccatcttcatctcgcggccctccaccttcttgcccaggtactcgggggtacggccgatcatcaggccgcacaggaatacgcccagcatgacgtacatgatcatgttcatcaggcccacgcccttgccgccgaacacgcagttgagcatcatgtgcagcaggggcaccatgccgcccaggggggtcagggtgtcgtgcatgttgttgacggtgccggtggtgaaggatgtagtgacggtggtgaacagggcggactgggcgatgccgaagcggacctccttgccctccatgctgcccatggactggctcaggccaatctccgccagcttggggttgcccgccagctcagagaagtagcacaggcacaggcccaccacgaaaatgatgcccatggccacgaacacggtgcggccctcgccgccgaagatgggctggcggtcggtcaggcggcggcccacgacggggtgcgcctcatcagtcagcttcttgcggttgtggtacatcaggccgaacatgatcacgcaggcgccgggcaggatcatcatgctcagcagctcggtaatgtcggagatgatggtggggttctccagcggggtggtggagttggcgcccaggaagccgccgccgttggtgcccaggtgcttgatagagaccagggaggcgatggggcccatggcgatgtcctgctgggtgccctcgatggtggtcaccgtctggttggccatgaaattctggggagcgccctgccacaccaggatcagtgtcacgataatggagaaggggatcaggatgcgggtggtgatgcgcaccagatccacatagaagttgcccaggttgttcttgctggtgcccgtcaggccgcggcagaaagccacgcaggcggcgtagccggtggaggcggagacgaacatcatgaagatgatgaccagcatctgggagaggtagctcagcccgctctcaccggagtagtgctgcaggttggtgttggtcatgaaggagataatggtgttgaaggagagggtgggctccatggcgccgatgccgttggggttgaagatcggcaggaactggatgcgcaggatcaggtagccgataaacaccatgacggcgttggtaagtaccagagccagggcgtatttcttccagcccatgccctcattctgattgatgccgcagatgcggtagattccattgtcgatgcggttgaacacggggtcgcaaaacgtatgttgaccagtggcgatgtggaacatatagcggccgatcgggatgatcagcagcacgaaaatcaccagggtcagaatgatttgcagcattgcaaaattcctcctctgtgcctcagaacttttccgggttggccagggcgtacaccagatagcacgccagcgcaataatgacgatacccaaagcaatcataactagcaattcctcttttctagcaaaacagtcttatttgtccatctggcggtcgcaccagtcggccaacagtttcaccaggacaaagctcacgaccagagtggctatcatagcgagatccattacttccatcttgtttccctccttgtgtccgtctccgcgtgctctccaccgccggagcggtgccggtcgtctcccgcggtccggacctgacgcgctgattcccaaccgccgggccgcagaaccccgcctctgcctccagcgattgcacgtatgagttttaccacgttccggaaagaaatcaagagctttttcacaatcttaattcagccttaacacatccgcatgttcccttatcctttctttttgttgtggtaatatttgtatttttagctttgtgggattcttatggattcttaacgccctccactctcctcttgcaccttcctaatccctttcgcgctatactgattctgtaaagagagtatccagcgcactgtgacacaccgctgcagagaggagtccttctgatgtatgcctatccagtccattcgtctgtccccgccccccgcaccgcagcccgagccagttggaaatcggccgccagtagctgcctcgcctgggggctgaagacccaccccattgtgaccggcacggcggtgcttgccctgagcggcgctgttcttgtgggcggcgtatctctggcggttctcgccgtcaatctgccgctctatctggccgccctcctgctgtgaggcttacggccagagctcaaaaaaggggccatcaccggagtgatggccccttttatggttctatgtctgtgtttatacggcggttggcagctccggccggttttcccctgccccacactgccacaggcttgcctgtccgtctgcctccatacaaagtttgggagcggcccctgcctcggagccgctcccgcggggtgagccctatccatatatcaagtcagaacgacttttttccactgcatagcatctgcatggagaaaagcgcctatcattcgccgtgccggtgcggcatgggctgtgctggcagacacagcccatgcctgcgccaaatcacaaagagaggtggtctctggatccacaaaacaaaaaagctgtacctccacgggtacagcaaacaaaccttatgatacctgtctcaatcataagcaactgcaccctccctggaccggggaggcttcctgtgcgtcatatacaggcaggtattctgactcaggcatccagcgcggttctcgccttcccagggcatagccccagtgacctataagaaccgctccaccaatacagcaacggcattgtgcgggattcacacccgcttcccttttcagcgtctccgggaggaggcgcacctgtataccattcagtattccattgtataggtagattatagtccctctttcttcccatgtcaagccatttccctcctttgcccgctggtgcgggcaaaggagggacggcctgacaccgccatgcccttactgccagtcggcaggatagacaaagtaggcgtagcgggtccggttgggggtctggaagtgaatgtggcttcccttggggatatagatgatgtcgccggggcctccggacaccacacggccgtcgatctcgatctccagcgtgccgtccagaaccaggtcgtactcatcataggtgagggtccactcgaagctggtgtgatccagctccatgatgccgcagcccatgcggggggcctcctccagcgtcaccacgtccttgagcttgacgccgtcctgctggaagggctcgcacttgacggtgctggtcttgatgccgatgatcccgctgggatcgatgtgcttttcaaactcgggcttgctgcccttgcccgcggactcctccaaaaccttggtgacaatctcgcggatgagcgcttcgcttacattcatgatagattccttgcctttccggtattggccttactcgattacttggaaatggtctggatcttggagagcagcttgggggccaggaggttggccacaatcagggcggtgacaccggccaccagcttaccagcgatcatggggaagatcatctgggcatcgttgccggcggcaaagcccaggtggtcgccgaacacgaaggcggcggacacggcgaaggccacgttcaggatcttgcccttggggttcatctcgcccatgatgttgaacatggcgatgttgttggccagggtagccaccagaccggcggagcccttgtcattcatgcccagggcgccgcccagcttggacagggcgccgccgaaggtacgggtgatccactccaccatggggaaggcgccgatcagaacaatgccgatctggccgcagaccagcaggccgttgttcagcggagtcatgcccaggtcgggatccaccgtggacatcacatcgaacacggggaacatgatgccggtgatctgctggaacacggcgatggcagtcaggacggtgatgaccacggtgacgccggtgccgaacttgttgaagccgttgatcatgggaccgggggcgaaccacaggccgatgacgatcagggcggcgatgacgatgacgggcaccagattaatcaggatgcggccgatgtccatcttatagggggtcatgttcatgaccaggccgcccacgatgcagccgatggggatggtgatcataccggccaggacgccggcgcccaggtaggggcggtcttccttcttgatgatgcccagggccacagggatggtaaacacgatggtggggcccatcatggtgcccaggatcaggccggcgaagttaccgatggaggggtcgctggccagctccatggccagagggtagccgcccatgtcgcaggccagaatggtggtggcgaacatagaggcatcggcgccgatggcggtgtagatgggggagatgatggggcccagcaccatggacagcacgggggccgccgcatacacgccggccatggcgatggccaggccgccgatggcgttgaagccgtcctcaaacttctcgccgtagcccagcttattgccgcggatacggtcaatggcgcccacaatcatgaagatcatcatgatcagcatgatgacggagttgatgttcagtccggaaacccaggctttgatactctcagtaaaaatactggggtcagcagctgcgatcagttcgctaaaatccattacttacactccttctctaactctcaaaacagtttgggggttgaaggtctctcttctctttgcgcttacagcagggactggaatacctgctgcgcggggcgcgggatgacggaggtgcccaccagcagctccgcgtcacgggacgcggcggccacggcttcacgcaccgcccccacatccccggtcagggtgacaaagcccttgccgccgatggcgtatccaatgcgcacctcgatcagggtcacgttggctgccttggcggccacatcggcggccgtaatggccgaggcgatggaatagaactccagcacgcccaccgcgccgcctgcggggggctgggtggtcatgctgatggccggaatcagttggggatgggcgttggggagcagcagcgtgttgaccacgctttcgccgccctggcggatgccctcggccatggaggccttgacatcgccggtatcgcccgcaatgatgatgatatacttgccgggacacacggtagaggaacggatgagctccacctgggctgcctttaccataaaatcactggtctcaatgccccgggcaatactggtcagctcgaccatgccgatggcgtttgccataccgttcatacctccttccggcagagcctggcgcccgccggagtgatttctgtcaccacgccgtcgatgctggcgtggatgttggcgctcaggccgtccggggcggcctgagccagaagctctccctttgccaccgggtcgcccacggccttgacaggcacggcgggcttgccgatgtgctgctggaacgggatgaataccgtctccggctccagggggatgcaggtgtgggcgtgcaggccgtagtaggccgacaggcccagccgggccaccagccggtcggtgggcgtcttgcgctcgtccacaaactcccgggcgtggggctccatgttccggggcacctgaatgccgcgcttgcgcagctcgcccttgatgtagccgttcaccttgcggggagacaggcccatggggcaggcgaacatctcgcacacgccgcagtcgcagcagttggccgcgtcgccgaaggagcgcagatactcctcgttgtcctcgatgctcccctcccgccacaggttgcgcatgaccaggttggggcggatctggtgcccgatgagatagcgggggcagagatcggtacacatgcggcactggatgcaggcgctcttggtctgatggcggatggtctccatcgggagctgggcccgccggaacaggtagtgctccttgggcaggacgatcaggtttccggtggtcttagtgaccacggccgcctcaatggcggcccggtcggtgagggtcttgcccatcatgggtccgcccacgatgagggcgtagtccgctaagttgggccgggcctccgccacgcaggccgtgagggccgtgcccaccgggacctttaggagaatgggctccttgacctcgcccaccacggagaggtatttctccgtcaccggagtgccctccagggcgtcctgaatgttgagcagggtgcccacgttgtccacgacgcagcccacgtccaggggcagcccccgctccgggacggagcggccggtcacctgctgcaccatggtctgctcgtcgccagccgggtagaaggtcttcatccggaacagctccacctgggcgccgctccggctgatagccccctccagggccgcgatctccgcgtggtacttgcccttcagggcgatcaccgtgcgcttcgcgcctaggtgctcggccaccgccaccgcggcggccaccacccggtcggggaaggtacggcagagatatttgtcggtttcgatcagcggttcacactcggccgcgttgaccagaaagcactccgccttggctgagagctttacatgggtggggaacccggcgcctccggcgccgactacacccgcagccttgaccgcttcggtcagattcatgacgtatgaccattcctttcgcggaagtttccgccgggccgccgcggcgcctccccgtcaggggagcacgctgcggtcgatctcctggtcgtccacaatgccgaccacggtggcgtccaccgggatgctcatatcgccggcggcgctgcgggccgaactgcctccgaccacgagcacagtctcccccacgccggcgccgatgatatcggcggccacgatggggggccgttccgcttttcccgtcagcacatccagcggctgaaccagcagcagcttcaggccagccagtttttcttccttacgggtggcccagatgttgccgatcacctttgctaccttcatagccttgatccatcctttttcgggtaatggggctcagggcccggggtcactcctgaaccagccggatcccgtgctccttggcgcagtccttggccagagccgtcaggatgcacttggcggggacatggatgcaggtgaccttttccgccgcggcgtcccggatgtcccgctccgtgagcacccgcttggtcacatgaaccagcttctcctcacgagccgcgggcataggggcagtggcggagggttccgcggccgcgggcccctccgccggagccgcctcacagcccgcgccgcccagcaggagtccctccaggttgtgtttggagcagaccaccacgccggaggtcaggagcaggtccaggcgctccttcatcatggcgtagtaggccgccggggcggtggaggcgtagcggtagagctccacctcctcggtgggtacgtagacccgcttgcccgtcaggatggcctgggcggccagacgggtatagggggtgtcgcacaggcccagggccagcttggcaagggcctcgttggtgagcccggtgagcacgaccacgccataggaatccaactcggccggctcactctggagggaagcgcagtccacacggaaccgcgccttcagcttctcgcacttcagcatggcccggcaggtgtcgttcatctcctggctgagcagcagcaggccctcccggtcattccggtctgcggcggccggggcggcctcgctcccttccacctccgccagcttggcggccacgcgggctacaatttcattgagcagcgtttgttccatggcttcccctcctttctgttcgtgaatttaaggggtttattccagggtacagttcatggcaatgcctgtgggggtcacgaggaaggggttggccggcttaatggtccggattcccgtcaccttctggaagatgtcctcgatgcccgtcaggcagcaggtgccgccgcagaggtaaatggtgtccgtgtgggccttatccacatagcggctcacgatcgtggccatcttttccaccacggggcgcaccacggggaggatctcccggtggcgcttgtagtcctgcttgatggcctccgcctcctcgaaggagacgtgatagttgcccgacagaaccagggtcagatgggtgccgccggtgggctcatcctcgatctgcaccaccttgccctcctttaaaatagcaaggccggtggtgccgccgccgatgtccaccaccacgccgtcctcaatctgatagatggcgttggcagcgctgggctcgtccaggatgttggtcacctccagcccggcgccctccgccacatactggtgggtcttgacactggattcggtgcccgcgggcatggcgatggcgcagttgaccagctccgtgcccaggcgggcctccagcttttccttgagcgaccgtacaatgcgcagcgcgccggtgtagtccaccaccacgccgtcccgcagaacctgggccgcctgcttctcgcaggccacggggttgttttcctcgtccagcaccaccagcacaatgtaggcggtgcccagatccacgcccaccttgagccggcttcccaccggcttgaaggtggttttttcggattcctccacacgggcgaggtagttgtttacgcggtccaagtccatcatgtcgctggcgctccttctgttgattatcggatgatcttgccgagggtaaagccgctcaccagagccgcgttggcctcgtccacgtcaatgtgcatcttacagctgaactccgtgctcacccggatgatgacatcctggaaaatcacgggccgctcgctcatcacggccacggacacccgctgcttgtctttcagatccagcagcttggagtccggcgcggtgacgtggatgtggttgtgggcgatgatcacgccctccttcagctccagcgtgccgcaggggccctcaatggtgatggccccggagccggccacgtcgccggactcccggacgggggccttgacccccagctccatgcagtcgctcttggacagctccacctgggtggccttgcgggccgggccaaggaccgccacgcgctccttccggcccttggggcccaccagtgtgacccgctgctcagacaggaactggcccggctgagagagcggccgcttgggctccagcctggcgccgggcccgaacagcacctccacatcggcctgtgacagatgcacatgccgcgcggagacctccacctcgaccagtcccgcccggtggaccgcatccatcactgcggatacgatttgttccatatgcctgttcctcctcagcggtactggcccgccaggtacatgcacatcatgatatgaatggcgctggacaggcggttgagttcctcgatgatatctttccgggtgtatttgttgcccacccggaaggcctcggtcgccgctacctccgtctcacggacggcggcgcggagctggttgagcagcgcataatccctgcccatggtgtaatcgggcagctgcatgtactgcacgccgaagaacttctgcggattgtgggaacgctcccgcagctcggcgtgggtgagaccaatgatggtctcgttcttgaacgcctcatccagcacgtcgcagcgcatcatctcccggagaacgcccaggatgtttcccaggtcgtccaccagcttctggcagccgccctcagcgatctgaacctgatccagcaccaccagggcctggaggctgtccagcttgccgcggaaatggatgcgggggtgatccttggccaccagcacgttgccgaacagctgggtcatatgctccggcttttccatgtagtaggcgccggtctcatagtccacgtacttgggcttgggcggctccggggcgcacatcacggtcgggacgaccggctgggcggccggggcggccgcgggggccggctccgccggctgcccccctgcggccactttgattttgcgctgctgaagatattcccgcgccgcgggcgtcagtattttcccctccgggatgtagtagacctcgggctgggtgttccgcagctccacccggaggaaatcttctgtaattgccttcacgcgctccaccccttcctatggttgatgggacacgggcgtaatgcccgtatcttacttcgccagggagggcaggatggactccacctcgttgtggggacgggggatgacgtgcacggagatcagctcgcccacgcgctcggccgcagccgcgcccgcgtcggtggccgccttgaccgcgcccacgtcgccgcggaccatcacggtcaccaggccgccgcccacgtgctccttgccgatcagggtgacgttggccgccttgaccatggcgtcggccgcctcgatggaggccacgagacccttggtctcgatcatacccagagcttgcatcatattcataacagggacactcctttacttgtttgcgtcaggctgcctcagcccaggtggggcaggatggactccacttcctcgtggggacggggaatgacgtgcacggagatcagctcgcccacgcgctcggccgccgccgcgcccgcatcggtggccgccttgaccgcgcccacgtcgccgcggaccatcacagtcaccaggccgccgcccacgtgctccttgccgatcagggtgacgttggccgccttgaccatggcatcggccgcctcgatggaggccacgagacccttggtctcgatcatacccagagcttgcatcatattcgccatttgtgatccttcctttcacaggtaaaccgcgctgtacgcggatgagattgggttacagcttctggagcttaccgatgatctggcggacgatgtcgtccacatcgatgttctccagagagggagccgtgcggcagacgccgtcggagcagtccggcacggaggcgcggatctcgtccagctccttgaggccgtaggccacataccgcaggttgagcaggtgcatggggcccacgttctccgaggtggcggagccacccacggcgccgcagcccagggtcagggcgggctggagggcggtggtgccgccgatgccgcccagggcgctgggggtgttcaccatcacgcgggaggcgggcacccggcgggcgaagtagtccaccatcttatcgtcgttggtgtgcatagagaaggtgtggcccgcgccttcgtagtggaggatctcacagaccttctcgcacaccttctcgtagttctcggcggtgtagaaggccaggatgggtcccagcttctcgttggaatagggatggccgcggcccacgccggtctccttggccaccagcacgcgggcggtggcgggaaccttctccaggccggccagattggcgatggtcttcacgctgcggcccacgatctcggggttcatggtgccattggcccgcagaatgaagcggcccagcttctcccgctcctcgtcgtccaggaagtaagccccctggcgctccatctcggccttgacggcgggcaccatgtcatcgtcgcagatgatggactgctcgctggcgcagatggtgccgttgtcaaaggtcttggagtccaggatgcgcttcactgccaggggcaggtcgcaggtcttctccaggtaggcggggccgttgccggggcccacgccgatggcgggggtaccggaggagtaggccgcccgcaccatggcggagccgccggtggccaggatcatggccacgtcgcggtggcgcatgaggttgtcggtggcctccatggtggggatggtgatgcaggagaccaggttctcattgccgcccgcctcggccaccgcctgccggatgaccttgacggtctccaggatgcagcgcagggccgtggggtggggggagaacacgatggcgttgcccgccttgatggcgatctccgccttgtaaagtgcggtggaagtggggttggtggaggggatcaggccggcgatcacgcccacgggcaccgcgatggtgcgcaggcgcttggcgtcgtcccggctgatctctccgatggttttcatatccttgatgtgctcgtagacaccgcggctggcaaagatgttcttgatcaccttgtcgtccacgatgccaaagccggtatcctcgttggccatctgggccagccggcgggcgttgcgcacacccgcgtcggcaatggcacgcacaatgcggtccacctgggcctggtccatccgggccagctcctgctgggcctccttggccgcctctaccagctcccgaacctcctgcatggacaggagatctttatcgattagctgcatacagttccattcctttcgctgaacttcatgccgggggcagtctcaaaccgcgaagcatgctcagttgttttgctccgccaggaacgccgtgattgccgcgagaagctcttccttcttggcaaaccggatctccttgcgcgtcatgctggtcaggccgatctgtctggccacggcccgcagttttaccaccgccatatgctccagctcctccgtggtcaggctggcgggctccatcaccgcgccatcgctctcctgctcctccggctccagcggctcaccctcctccggctccggctcaggggccggggcgggaggcgtggggggaaccggctggtctggttcggcggggatgtgtcccaggatttcttccagctcctcatggggtctggggatcacgtggacggaaatcagggttcccacccgttccgccgctgcggcaccggcgtctgtggccgccttgacggcgcccacatcccctcggaccatgatggtcaccaggccgccgcccacatgctccttgcactggagggtgacgttggccgccttgaccatggcatcggccgcctcaatggaggcgaccaggccgcgggtttcaatcatacccaatgccttcatatgtacctccgttcatgggcccgtgcgggcccggtcgctctgccggtcagaccttgggctggtcggcgacggactcgacggcggcggcgaaggcgtcacaggcggacttgcaggcggactggctgccggtcagcagggcgccgccaaagttggtctcagacgggggggcgtacagcacgcacatccgcacgtcggcggccttcagcgcggcatccacgccgtacatggcctccaggggaggcgcaatcaggtaggcaatggcctcgccttcggcaatgccgcagccctcggacaggtaggagccggtgcgggagatgcagtgggcatagtagcagatgctgtcgtcgtcattggcggagacaaagtggcacacattctcgatcatgtccacgcaggcctccaggccggccttggcctcggcggggttgggcgcggccaggatgccgatgatctcgccggccagcttggtgttggcgttggcggcgccggcgtagaagctcttggcgtagacaaccttgcagtcggccttcttggtggcctcgtccagggcggtgtaggtcacatcgtcgctgtcggcagtaacgatggccagggacttctggtcaggggtcaggcccagctccttcgccatgtcgggagccacgttggggataatgcgagtcgccagtacatgtgcgggcaacggatcgcgtttcatattgattttcctccctgctcttacagtttcagatcggtaccgctggccttcttatccagcatgatcttgatgatttccgcgatgtgggcgccggcctcggcggggatggtgccggcccggtggatgttggacaccacggtgcggcgggcctcaggcatgcccacggtggccttgtaggcgatgtaagcggacatggactcggcggtgatcaggccgggacgctcgccgatcagggtgcaggtgacggtggcgccggtcagctcggagatctcatccatgacgcccacgcggccatacttcacgaagaagggggtgcccacgtcgatcttgtagctctccaggccctgcaggatggcgggcagcagatcgccgatgttggcggccacggcggcggaggacaggccgtccgccacatagatctgaacggtggggttcttcttgcacttggccttgatggtctccacggcctcggggctgagcttgcggcccagatcggggcgggtcagataggtgtccttgctgtcgcactgggtctgcaccgtccacaggcccatcttctccacgaactcggcgtccacgtcgttaaacacggcgtcctgggcggcggagtgggcggcgcggaactccagctggggcagggtgttgtagcgggcgccggccttgccgatgcccagacggcagggagcgttcatcttcagctcggcatactcctcgccgttctcagggttctttaccagatactgcttgcggatgtcgatctccgtgatgtcggggatgcagccgtcctcaacctccggcgcagactcacacgcacaagcggcagcggccttctcggcgggcttggcgccggacacattcatttccgtcagcacctgctcaatgatgcttctcagatctttctcgtccattcttcgctcctccttacttcttcaggaacacggaagcgtcgccggccttgggcgtcagcttgccattctcagagaagcccatcttctccagccacatgtcgaactcgtggatggggcgcaggccaaagacctcgcgcagggcagcagcctcatggtagccggtgcactggtacatcagcatgcagtcgtcgccctcgggcacgcccatgatgtagttgcagccggcggccaccagcagggtcgccaggttctcgatgtcgttctggtcggccttcatgtggttggtgtagcaggcgtcgcagcccatggggatgccggtcagcttgcccatgaagtgatcctccaggccggcgcgggtgacctgcttggaatcgtacaggtactcgggcccgatgaagccgacgacggtgttgaccaggaaggggttgtagcgcttggcgaagccatagcagcgggcctccatggtgacctggtcccagccgttgtgggcctcggaggacagctcggagccctggccggtctcaaagtacatgacgttgggtccggtgcaggtgccgcgggacagcatggtggcgcggccctcgtccagcatggcggcgttcaggccgaaggcctcgttgcccttctgggagccggcgatggactggaacatcagatcgaggggagcgccaaacttgttggcggcctcggtctgggtggtcacgtgggccagcacgcagatctgggtgggaacctcccacttgcgcttgaactcgtcgaacatcttcaggatgcgggccacgctctccacggagtcgtccacggggttcaggccgatgacggcgtcgccgcagcccagggacaggccctccatcacggacgcgatgatgccattgggatcatcggtggtgtggttgggctgcagacgggaggagaaggtgccgggcagaccgatggtggtgttgcagtgggcggtcacgcgcatcttcttggcggcgtagatgaggtccaggttgctcatcagcttgcacacgccggcaacgatctcagaggtcaggccgcgggaggcccggcggatcatgtcgggggtggtctgggtatccagcagccactcgcggaactcggccaccgtcatattcttatactcgttaaagatggtctcgttgacagaatcctggatgatccgggtcacctcgtcctcctcataggggacggcggggcagttgcgcagatcgttcagggtcagattggagagcaccaccttggcggccactctctcctctgcggtttcggcggcaatgcctgccagcttgtcgccggatttttcctcgtttgccttcgccatgacttcccgaatcgatttgaactcgtacacatggccgaacagctttgtcttcaggatcatgctagttcacctctcataagtcctaacattaagaattgaaaatcaaggtcttgatcactacgggcagcacctgcccgcctgcaatgggctcgccgatatcgatgtagtcgccgctcagggtgcggataccgtcaatgcagatgacgtccttctcccgcttgagcagtacgttcagcgcgtttccgagcacctttccgatatcgttctccaccaccacgaccaagggatacctgctgctgatcacctccttcgtgctctcaatgatagctgccgccaatgcctgaatgtccgcaaagctggtgcgcttttctccggtaaaagcgatcgcaagctgctccgcttttccctcaggcatatacagcggcatctgattcaaaatggaagccttcagcgtttccagcgacgcctcgtcttcctcggacaccttaagaatggggacatttttcagggggagcgtgccctgctcatagtggatggtgctcccgctgacctcggtggtatgggttcccgcccctaccacggtggcccggatggtctcgatggaggtaaagcgctccacccggctcagatccgggtcggcccgaatggcctttcccaggaggacgccgatgtcgccgaagcgaaacacgtcgccctccatctcctgatagatgcagtccgccacgccgccggagtaggtcaccgcgcggatggccggctgctccggcagaggcttgccgttgttggtataaaggccggcgtggtggctgtccgcccccgccaggcggagggcctgggccagctgggccgccatgaggcggcacacgccgtagagctgctcgggataggcccggtcgcccaccgccagcgggattccattggcggcggccagggcctggatcttggggaaaatgtagctgatgcggccgttttccaccttgatgagccgcccgccgatatccaggcagcaggtcccccgcagcacgcccttctcatagacggcgatgttgctggtcccgccgccgatgtccacattggcgatggccgtgcgcttttccttagacagggcgtcggtgcccgccccccgggcggagagcaccgactccagatccggcccggcggtggccaccacgaagtctccggccaggtcggacagagcctccagcacctcgttggcgttctccttccgggcggtttcgccggtgatgatcaccgcacccgtgcggagcatctccggcgtcatgccggccgcctggtactcctcccgcacaatccgtttgaccgcctccgcgtcgatctccgtggccgaacgcaggggcgtaaagtagatcttgctgcggtagatcacctctttatccacaatgtcgatgcgcggcacggtatagctgctggcccggttttcgatggtcagccggctgaaaatgagctgggtcgtcgaggtgccgatatcgatgcccacgctgaggatcacttcatgcaacttgcttcacccgcttcctgagagttcaatgcaaaacggagcccgggtacagagaatccctctgtatccgagctccgtcgctcgtctgttccagccgtcgttacgtcacgtcggccgttccgatgatctgatttttaaagtcgaatctggcgcaggttccctcggggcccgactcgatctccaggttgccccgcagcttgtccttcaccaacgtctgcacgatggacagccccaggcggttgccctccgtgttggccacatcgaatccgcctccgttgtcgctgacctggatgctggagtacagcttcccctgctccacgacgatccgaatctctccggaagagcggtcctggaaggcgtacttcagggagttctgaagcagttcgttgatgatgatggccaccgacgtggcgatgtcggagtccacctgaaagtccccgccctccatggtaatggtgacatagcatttggggttggaaaaataccgcatggtattgttctttatgttcaggatgacctcccccagcatgacctcgtccacaccgctctgggccagcagctcgtgggtgctggcaatggagaggatccggttcatgctctcccccagcacctgccgcgtctcctcgctgtcggtgcggcgcgtctgcaggcgcaggaggctggcaatggtctggaggttgttcttcacccggtggtggatctccttgatggccacagacttgagaatcagcgcctgctcctgctcccgccgccaggttacgtcctgaatgatcacggcgaaggccgcccccgccgagttgagctggatgtgcttgatgtccagcaccagattgctcaccgtagtctccacataggagtagccgctgcactcctcgctgttgccgtcctgttccaccaggcggacgttctcatagggctgtcccaggatgtcctcaatgtagcccagcctccggtatagatcctgggccagggagttgcggaaggtcacgatgccgctgcggtccaccatgaggagtgcctcgtcgatacactcggtgagccagttgttctccggcaccatctgagccagggcgtgggcgatggtctcaaagctctgctgcgagaaatgaatccgctcactgacctgcctctgctcgtccacccgcttctccaggatcagcacgccgatgatatgggagccgttgcggatgggctctaccgactggatcgtgctcccattctcctgggtcacggccttcatctgcttggttcctacccccaggcggaaggtgcgggccaccgccggctcgttctccggcttggccagcagtcccacaaccgtgttcttgtaggacgacggcacacattccggcttggcctccgccaccacgatggcgttcccgtcccgtccggggcagtcgatgaagatgtccgcaccctccagattggccagaggctgcagcgtctctgacatgtgctcaatgatgcggatctcttcatcggacagatcggtatactttctgcagagggaccaaatcacattcacctgtcaacccccgcctttcacgaggatcatctctgccacccggcgcatggaaaggcccttgagctgactgagcttgcgtatatagtggtacgcctcctgctccgacaggttctgctcctgcatcacctgtcccttggctttttcaatgatgctgcggttggccagccgctcggaaaccttggccatgtccttgcgcagccgtttcatctccttgctctgggccacaaccagctcgatgttgggaatcagcgacttctcgtcgatgggcttgaccagatagccgctgacgccgtaatccttggcctgctccacgaactcccgctcactatacgccgtgagcataatgatcgtgtccgccagctcctcctcatagatgatcttggccgcggccagtccgtccagaaacggcatcttgatgtcgagcagaacgagatccggatggtagagcttgcagttctccacggcatcaaacccgtcggagacctctgcgacaaccgtatacccgccttccgtaagcagttctttcaaatccattctgctgatcggctcatcgtctgcaatgacgacacggatcgcatccttttccatgcggctcctcctgacttcaaaggaaatccagatgccttaccaaggcttccacgccctcgcccgtcacgctgctgacgacaaagatctcacccgcgccggctgccttcaaatactgcctcgcatttgaaatctcatgctcagacgccagatccgactttgtcacaacccccacgcagggctttgcaaacatgctgctgtaggcgggcgggaacatgctccccttctcggtggcgtcctggaccagcacaatcgtgtccgcgtcggcggccgtcaccatgagggccccgcgaaagtagcgccgctccagatactcgcccggtgtgtcaatcatactctggttgacaatctgtacggtctgggtcttgtggtactgcagttcctcgtggttgatccgctggcaaagcgttgtcttgccggccgtggagcggccgatcaggataatgcgtctttttctctccattgcatcacgtcttggtgatgggggccgatgcaaagcccatcataccgcacagggtattcataacctctgtcagcgccgactgtaccgccgccacatcgccggtgatgaccaacgagccgttgaagcggtccacaaagccgatggacacgttggccgacttggtggccacatcggcggcgatcatggccgcctcactgggggtgatggtaaagatcccaatggcgccggaggcgtcgatcagtcccagcttcaggtacagatcctcggtggggtttgcgatcacatgggccagggtgacctgcttgccgggtacaaattcctgtataatccgctttttctcatcaagctcaatcaaatcggcacgctcctcctaaaaaccgctggaaacagcgggctgtcccccctatcatgccacagggccgggcagcctatcctgcgtaaacgcgctgcggtgttttctgcaacaccggcagggggttcacaggcgtacggggcgaaaaaacaaaaaaagcccccagaatttcaagtcaaaattcttgggagctacatcgctcttgatcgtttaccaggcgagccgtactaacgccgcacgaatccgcccttccactatacgcatctctatcattttttctggctcattttaacagaaatttgcggagttgtcaatccgaaatatcattttacgccaaattcctccgccgcgcaattgcgcggcggaggagctctgtcagggcaatttcccgctgtaggccttgcggaagatctgttcaatttcctccgccgtgcagcttctggggttcgtggcggtgcagcggtcggccagggccgcctccgccatgtcgtgcaccgcctcctcgaactccgccgcgttcacgcccgcggcctggagggtggagggcatgttcagcttttcgatgtaccgccgggcagtgcgaatgaggttgagggcgctctggcggacactgctgctctccagctccagcaggcgggaaatacgggcgtatcgcttggcggtggaggtgagctgttcggcgcagccggcgttgaagctcatcacatagggcagcaggatgccgttggcccggccatgggggatgtggaaccgggcgcccagggcgtgggccatgccgtggttgaggcccaggccggagttggagaaggcgatgcccgccaggcaggaggcattgtgcatcccctgccgggccttgcggtcctcggggttctgataggcgggcagcaggtggcgcttgaccagcttgatggccttttccgccgccgcgtcggagaagtcggtggcctcagtggacacaaaggcctccacagcatgggtaaacacgtcgatgccggtgtccgccgtcacggtaggaggcacgctggtggtcagctccgcgtccaaaatggcgatgtcgggcagcaggctgtcctccaccaagggatatttgacccccttctcccggtcggtgatcaccgcaaagcggctcacctccgagccggtaccgctggtggtggggatggcgatgaacttgcagtcccgcatgtcccgctcccgggcggcgaagaacacgattgccttggccgcgtcgatggcggagccgccgccgaaggccaccaccgcatcgggctggaactccaggatctgctccacgcccctggtgacggtggcgatgtccgggtcggcctgcacgtcggagaagatcttgaactcgccgccgctgcgcagcagccggtcggtgacataattcgttttgccgctctcggccataaacttgtccgtcaccagaaagacccggcgcagccgctgggccagcgcgtccatgccacctccgatcataatttttgtacgaacactgaaggcgtccatatgctgctcctttctgccggtagaaatacaaaaagcgccctgaaccgctgttcaggacgctacatcgcttccaaaagccctgccgcttcctcgcagcatggccagtctcactttaccccatggcgcagccctctgtcaagccttttctttcgccggggctcaatttttttcgttcggcaaactgcgggttgactttcgcggcaaatgctgacataatggggctcgtcaaagcaggtgcgcatggaaccgtctggttccacctggcacgggctcccccgtgcccccgcgggcgctgtccagccagccccgccccctgcgccggcctccggcgcggcaagtaaatagactctctgtttcacagaaaggaatcggttttgatggatatcagattcgttctcccttctgaggtggagcagctggcccggaatgtggtgacctcattcccctccaagacgccggccgccctgctccagaacatggaaggcgaactgcaccgtccggacgagggccgttacctcggctgttttgacgacgatggaaccctgctgggctccatcctgatgatggatttcaccctcaacgtcagaggtgtgatgatgcctatgggggccgcagcctatgtctccgcaaactttctccacaagaaagagcgggtggcctgcacgctcctgaaggtgttgatgcggtattacgccaaacaggggacgccgatcggctgtctccaccccttcaatcccgcgttctatgccaacatgggatacggttactgcaacgagaactatctctaccagcccaagccctccgcgatccgctcctacggcgacaagtccgggctgtcctatgcccggccggaggaccggcaggagattttggacttctaccgcgcctatgcggcgcgtacccacggtgccacggtccaccactatatggacccccaccggatcttcgacatgccctacgtggtggtctgccgccgggacggccggctcaccggctacttcaccttcgatttcgtggcggtggaccactacaccgacatgtaccacgatctgctcgtccccgagatggtgtatgaggatctggacacgctgcggcagttcatgacctttttcgcctcccaggtggatcagatcgagcgggtgcgtatcctctcccccgaccccagcctgactatgctgttccacaacccggacacaggcgagaaccgcgcgcacgacggctgcatccatgaggtggcccgccgcacaatgggctacatggcccgtatcttcgatgtgccggcctacttccgcatgcagagccgctgtgagtccccggtcagccgtccctttgtgctggccctccaggtggatgacaactttatcgagggcaacaacggcaccttcctgctgaatatatccggaagcacggtggaggtggttgagcatgctcagcccgacgtcaccctttccgccgatatctccaccctctcttccctggtgatgggcgctttctctctggacgaggcccttcgcctgggccgcctgaccctctccgaccacggctacgctgccgacgtgcagcgcgccatcggctggagtcggaagcccataaacttcacctatttctgatcctgtccgtgcaagcacagtaaggccggggcggcttctgccgccccggcctgtttttgtccctcaccgctccagaaaggcggccagcgccacatcgtactccggcagcccattggccgcccacagcagctcgatgcccagctcccgccgggccagcgccgccagatcaaagccgaacgcggaaaaggagtagcgcatccgccccggattccggcagggcagcccgtcccgccgggcgcagcgggggcacagctcacaccgtcccgccgcgatggtccacgccccgctccgggtctgctccagcgccagaagggtttccagcagtacccgcttggctggtccataggacgcccggcgcaccgcctcagccccctccgccgtggacacctcccggcgcgtctgtgcatcataaaatacctgcatgcccagcacatgggctgtccgaaaaggccgcagggcctccgccgccgacggtacccccggcgggcaggaccaatcgtttccgtagtccgggcaggcccggcaggcctcccggaaccgctccgggaaacagtattcccccagcagttgctccaccgggagctccgccgccgttatcctggtctgatacatttaaccgcccccatcggcgttttctccgtgttccattatagcgcattttccgccaaatgggaactcctgttttccgcccggccggatattctgtaggggtggggcttgtccccgcccgcgggcggccataaaggccgcccctacatttccggggttcgatttccggcaggctatctcacggcgcttgtatgtaggggcgggtgcccacacccgcccggggctggccggtggcccggaaagacgggcctatgtgggcatcggcccatacaaagcaggacttatccccgcctgtccccgtacgtctccacccgtaggggcggcccttgtggccgcccgcggcagggacaagcccgcccctacaagccgtccagcagacaagatccccgcgtccggcggtatgccgggcgcgggggtgcccctatctccagagggggtaataagaatggcaaattatacggagcattatcaattacatcaatgggaaccggaggacagctttctccgcaccgacttcaacgaggacttcgccaaaattgacggggcgctgggcgggaaggcagaacagtctgcggtggatacgcttgccgagcaggttgccgggaaatccgagctggtaacggggagctataccggagacggggaggccagccgcaccattgagctgggtttttcccccaaggcggtactgctggcctccggttccgggccgatcaattacaccagctcgcgttatggcggtctggccctggagggggcagaggtaaacacggactgggaatccacctccggcgagccggttctccgcgtcgttacagggggattccaggtattctacgattatgacgaggaggttttctccaactccgatcgcgaccgctatcactatctggctctgcggtaatcctctctgaacagacggcagggcatctgagcaagcggccaaccgcataaggtataaaaacaggcgctccccgcgttaatgcggggagcgtctgcaattcggaataatttgtgctgattggaagccttagaaggtcaggccggagatgtcgagcgtaaagtcggcaccgggccactccttctcggtagtgcccgcaccgtttccggtgaagaacttggggccgtcctcggtcttctcaacaaccgtaaagtggttggtaccattctcggtgacaaccaggaaagcaatcacgtcgtcatcgtcaatcaagcccttggtaaccagatcgttgtagtcggtgatctcaggatcgctgggccagaactggttcaggcccgccaactgctcctcagacagctcggtctcagcattgatgggggtcacagtgccggacaggtagatggtgtcaccctccacaacctgggtcaggcccagggagacaaggtggggaacgttgttccagctctcaaagtcgtcgttgcccttcatgctgtcgatcagagcctcggcgctctcaggctgcggctcggtgttagcggccagagactcgtcggcggtagccttggcgtccacatagacctcggtcaccagatcatcgtccacgacccaggagatcacgcccttgaaggcgtcgtcctcatagtcgcgggccagacggctgggagtggtggtcttgccggtgccgtcgtcgttcaggaagatggtgtagtcgtcggccagaaccagatccaggctgccgaaggacagcacaccagacgcataagagacagtggtgttcacagaagcggccttcaggttggtgtcagccgtatcctcgatcttcttcagatccttggtgttgatgtagccgtcggcgtcgtaggtcacgctgccatacaggcccttctcgataccagtggtgctgttcagctcaacagtgccgatctcgccgttgacgatagcgtcatagacatagtagtcgttgtcgtcggcgtcctggctggactcgtaatcggtgtcgaggatgtagatgcggtcgccagcagtgctgccggagatgcccagctcaccgctcttgccgttgatgaacaggtagtcggcatagccgttgtcgtccaggatggcacacacctcgacggtgccgttagccgtgatctcgggaacgttcttgatgccggagtacacattcacggtgtcaccgcggcgcaccacgaacacggtgtcgttgttcaggcggacgctcttgtccaggttaatgcgggagtcaccggtgtcaatgatagtgccggtggtgaagtccttctgggcctgagcagtctcgcccagctcgtaggtgccgtcgttctgctcgtcgtaagtgtaccacgcgttcttctcactgtcgctagtccagtcggtcagatcatcgctattggaaacctcgatgacagcggtagtgccatccacgaagtaggccttggcttcgtagctcttgttaacaccgccgatcttggcaatgtcagtgatgaagacgtaatcgtcggaagcctccacgccgtcagcgtagatgacatagccgtaagtatccaggaccagatcgtagtcatccttcaggttgtaggtgctgctgtagccctggctgtactcgtacttggtaccgtcaagcgtgacgttcttattggaggtgtaggaggtcacagtgccggagactacttcggcagcctgaatggtcttgacctcgtcgcccacagcggtgatcaggacataatcgccgtcctcaaatgcggacaggttttcaaagtcgtcggcggacagggtggtattgacagcggggaaggtatccaggcccagatcatccagctccagctcctcgttctcctcgtcgtagccgccgtccacctgagccacataggtgtgaatctgagacaggatgacgttgttgtcgtcgtccacaaacacctgggtcaggacgcccttggcagtgcccttggcgtcgtcggtttcgttgttcacaaagtagtcggccacgtcagggttgctgaccggatcgccatccacgtaaacagaaaaatcagtgggcttagaggcggtgatatcgttgtagacggtgcggccgagcacgtcatacaggtcgcccttatccacagcggtagtaaaggttccgtcagcctcagcaggataagtgccgatgatgtcgttcttcagcttccactggctggcggggcgggcaaagtcgtcctcaccgttgacctttttcagatctgcgaagtaacgctcacagaactgctgggtatcgtcgttgctgtcgccggcatagtcgctgtcggtcttggagacaggttcagcggcagtgttgcccacgatgatggtggagccgtcgggctgctggatagtggtgccgcggctggcgtagcgcaccatgtcggcctccagggtctggtaggccatctgggcagcctgctcacgggtcatggcatcggccatgattacaccggacacggcgataccggcatccacggcatcggcggccacattgacggcccagtcgttgcccacatactgctcgatagcgggatcatagcccagggccaccagcaacatcttggcaaacgccagtccggtcagctcaccctcaggattgaaggtgccgttgcctgtgcccgccagaatgttctgctgggcgcagtagccgatgtagccggcagaccagcggtcggcagccacgtcgctgaacacagtggagttagtggtcaggttctcggcatcgtcgcccaagagcatgcggcagatgatggccgcagcctgctcacgggtcagaatgccggtaggatcaaaggcgcccttgtcggtgccctcgaacacgccgagcgcggtcatgacttccgcggcctcggcgtaagtgatctcgttgccgtcgacgaaatcactgctcgcagcggaggcgccgacgaccatcataccgacgagcatgacagcggccagaaccaggctgagagtccgcttgaggtttctcatttggatttcctccttctgaattttgaagcctaggggcgtatgacgccccttacatgggaggaaagaatgcagctttcggggaataggggtataaaaggcggggaaacagaatcaaaaggttcgcatggtagacgtatggtagacattataaaaaactccttggggaaaaagctgaaaattcaggcgctttgcgttgcattttggtagacatttggtagacataaccccacgcacgatcagaagaggtataaaagtcggcagattgggtattttgaaagcaaaggatcacaggcacgagaagagaaaatcggagcacacgagaattttgctttgattttaaggagagatctgctataatgtactcgtattggagcgcacttccatggaaggcgtttattaaattgtgtttaccgggccggtgaattgccggcccttggataccgtttatgccggaaacggctgcggcggaaggaatagagggttgtagctttgacaaaatatgtgatccacggcggaaagccgctttttggagaaattgacatcagcggcgcgaagaatgccgccgtcgccataatccccgccgccctgctggtggacggggtatgccgcattgagaacattccccagatcagcgacgtgacattgattctgaatattttgcaggagctgggcgccgatgtgcgcaccgtcaaccgcaccacggtggacgtggactgctcccacatccgcaacgcccgtgtgcctgaggagctggcgcggaaaatccgcgcctcttattacctcattggggcgctgctgggccggttcggctccgccgaggtgccccctccgggtggctgtgacttcggcggacggcccattgaccagcacatcaagggctttgtggccatgggggccgacgtggatgtgcggggcggctacatccatgccaaggccaaaaacggccgcatgtgcggcacccagatctatctggacatcgtctcggtgggcgccaccatgaacatcatgctggcggccgtgctggccgacggcctgactgtcattgagaacgccgccaaggagccccacatcgtggatctggccaacttcctcaactccatgggcgcggagatcatgggcgcgggcaccgacgtgatcaagatccgcggggtggagcgcctgtccggcggcagctactccattatccctgaccagattgaggcgggcacttatatgaccgccgtggccgccgccgggggcgaggtgctcatccgcaacgtcatccccaagcatctggagtgcatcaccgccaagctgctggagatgggggtggacgtggaggagcgggatgacgcggtgctggtgcgccggcacggcaagctgacccgcaccaacgtcaagaccctgccctaccccggcttccccaccgacatgcagccccagattgccgccgtcctctgcctggcggagggcaccagcgtgctcaccgagggcgtgtgggacaaccgctaccgctatgtggacgagttccggcggatgggcgcccagatccaggtggacggcaagatcgccgtcatcgagggcgtggagaagctcaccggcgcccgtatccaggcctgcgatctgcgggccggggcggccatggtaatcgcgggcctggcggcccagggcaccaccgaaattggctgcatccaccacatcgagcggggctacgaggatatcgtgcgcaagctctccggcgtgggggcggacatccgcgtggtggtcaccccggacgaggagaagcagagccaggtaggctaaaaagaaaacagggagcggcggcgcaggccgccgcccttttttgcgcagagagactacatagtgaggagcgattccgtgctggaactttgtaccctggccagcggctccagcggcaacagcctgctggtgaccgacggccgcacccacgtgctggtggacgcgggcatctcctgccgccgtatctgcaccggcctgaaggagctgggcgtggagccaacggagctcgccggcgtgctgatcacccacgagcacagcgaccacatctccggtttgaccaccctgaccaagcagctcaggctgccggtgtatgccagccctgggacggggcggcagctttgctaccgcatcgcctttctggaggagctgctccgccccgtggcgccgggggagggcttttccatcggcgggctggcgattgagagcttccccacctcccacgacgcggcggagagcgtgggctacgccctgtccgccggggggcggaaggcggcggtggtcaccgacctgggctatgtgaccggggcggtgctccgcggcatccggggggcggatctcctggtggccgaggccaaccacgacgtggagtgggtgcagtccggcccctacccttaccacctcaaggcccgcattctgggcgaccggggccacctgtccaacgaggcgggggccgagctggcctggacggcggtggaggggggcgcccgcacggtggtgctggcccacctgtcccatgagaacaatacccccgcccgggcccacgaggtggtacggggcgtactggagcgccggggcgcggcagtgggccgggacgtggcgctggaggtggccccccgcagcgagaagagccggaggtacacggtatgaagggcatccgggtgcagctcatctgcgtgggcaagatgaaggagaaattttacatcgacgcggcggcggagtacgtcaagcgcctgtcggcctactgtaagctccaggtggtggagctgccggaggagcggctgccgtccaatccatcccaggcccagatcgacgccgccctggagaaggaggcggcggccatccgcgccaggctggcgccgggggccagcctgatcgccctgtgcgtggagggacgcatgcgctccagcgaggagctctccggcctcctgtccgactggagcagccgggggggaagcagcctggcctttctgatcggcggctcctacggccttgcaccctccctcaaggcccaggcgtgggccaagctgtccatgtcccccatgacctttccccaccatctggcccgggtgatgctgctggagcagctctaccgcagcttcaagatcgacgaaggctccagctaccacaagtaggcgtgacaatctcccgaattcgtcaaaagacgggctggatattggtaaatttttgtgctataatcacagtgcagtacattgtttacgccagaatttcagatattggaggttagtcccatgtcctatcgtgatgtttatgaaaagtggctcagcagttctgcgctcagcgaggcggaaaaggaggagctgcgctctatttccggcgacgagaaggagattgagagccggttctttgccccgctggagttcggcaccgccggcctgcgcggcaccatgtgcgtcggcctgcaccagatgaacatccacgtcatccgccacgccacccaggccttcgccgaggtcatcctggccgagggccccgaggcggtgaagcgcggcgtggcggtgtgcttcgactgccgcaaccactcccaggagttcgcccgtgagaccgccggcgtcatggcgggcaacggcatccccgtacgtatcttcgagtccctccgccccacccccgagctgtccttcgccgtccgggagtatggctgcatcgccggcgtaaacgttactgccagccacaaccccaaggaatataacggctacaaggtctactggcaggacggcgcccagctccccccccaccacgccgaggccatcgccaagaagatggaggagctggacttcttcgcctccatcaagcgcatggactacgacgaggcggtggagaagggcctgatcaccgtcatgggggctgagaccgacgagaagttcctctccaacgtcatgggtcaggtcaacgacaaggccgcggtggagaaggtggccgacaccttcaagatggtttacacccccttccacggcaccggctacaagctcatccccgaggccctgcgccgcctgggcatgaagcacgtcatctgtgtccccgagcagatggtcatcgacggcaatttccccaccgtggtctcccccaacccggagaacccggagggcttctatctggctgtggatctggccaagaaggagggggcggactttatcctcggctccgaccccgacgccgaccgggtgggcatcatggtgcgcacctccgacggggagttcaaggtgctcaccggcaaccagaccggcgtgctgctgctggactacctgatcggggcaaagcagcgcaccggcaagatgcccgccaaccccgtggccctcaagaccatcgttaccaccgagatggcccgcaaggtggccgagaccaacggcctgaagtgctacgacacctttaccggcttcaagttcctggcggagaagaaggacaagctggagaacgccggggagggcaaggtgatcttcgcctacgaggagagctacggctacatgctgggcgactatgtccgcgacaaggacgccgtcaccgccgccctgtccctcaccgagatggcggcctggtacgccggacagggcatgaccctgtacgacgccctgctggcctgctatgagaagtacggctattacggcgaaaagaccctgaacctggtgatgcccggcctggacggcctgaagaagatggccgatctgatggccaaccttcgggaaaagcccccggtggagatcgccggcgtgggcgtgctccagcagaaggactacaaggacggcagcgtggtcaacgtggccgacggcgcgaagagcaccatggagctgtccggctccaacgtgctgcgctatgagatggccgacggcaccagcctcatcgtccggccctccggcaccgagcccaaggtcaaggtctacatcctggccaacgacgcctccagggaggcctgcgacgccaaggtggacaagtatgccgcctgggccgagagcctgaaaaagtgagtgaatagagtaaaccggttccccggcatccgcgccggggaaccggttttttcacgtcgggagcagcacggatttccagcctcccggagtagcgggaacctgaacagaggcggtgtcgccccaaaattcattttacaccctgtgcacgggcggcacttgcggccgccccctttttgcccccgccgggaacgcttcgccccgtaggggcggggcttgtccccgcccgtgggcggccacaagggccgcccctacttccggggttccgttcccggcggactaccttgtggcgcttgtgtgtaggggcgggtgcccacacccgcccggagctggccggtggcccggaggggcgggccgatgtgggcatcggcccctacagaggtctgctgcggcaggcagcgcccggcaaaatgctccgtaggggcggggcttgtccccgcctgcgggcggccataaaagccgcccctacttccggggttccgttcccggcgggctatcttgcggcgcttggacgtaggggcgggtgcccacacccgcccgcagggcgtccggcagaaggagtcccccgcgtccggcggtacgccgggcgtgggggactctcatatcccggaagggggaatattcatggcaaattataccgaacattatcagctccaccagtgggaatcggaggacagcttcctgcggacggatttcaacgcggacttcgccaaaattgacggggccattgccgcgtgcagccacacggtcaaaggcgcctataccggaaacggaagctatttgacggtggagctgggcttccggcacgcggcggtgctggtctcgctgggatatcagtcctacaaccagccgcggctctccatcgacggggacaccgcttatatggtcatgactgacagcgggttccgcgtccaggatgatcggaatgccaatctgaacgaggtagggagagaatatctgtatttggcgttccaataataacaagaatcccccggacaagtccgggggattcttgtttgaacttgagtttgacagcaatgccagattactgaacctcaacaatgtaggcggagtaacgggcaaaggtgccgtcccaagtctttaccacaataacgttgccgttattcagattcttgctactggcgatatcgtcagtgcggttagtcagatcactatccgtgccattttcagcgaccgccgcagtggtgaagataccggaagcgtgcgcggtaacagagtcgtcgacggtgatggtcacagtagcgttcttggcctgctcagcagacagaggcagagtggtggcattcgcaacggccttggcgatggtggtatagtcgccagcgctggcagtcttaacgccgtccacagtggtggaggtgatgcggtcgttattggcgttgtcgtcatcgccagcgtcgacgtcaacctccatcttgtaggtgtcggtgacatacacgacctcggcctggccgtcatcgttgtacaccacgataccgtactgaccggaggtcaactcagtggtagcggcagtcttgtcgtccgcctcggtgttctccacgtcgataaccagggccttgtcggcatagcgctcccagtcggtgttggagttgtcattgacgccactcacgaaggactgcttcacagtctcgtcatcggacatcagatcagttgccttgtcgaagtcatagaccttgaagtacttggtgcgggtggtaacaatcaggcccacgtcgttggccacgtcagccgcagcggtcttgttgctgttagacacacaatcggcctgagcctccagtacgtagtagtcgccatcggtcgtgtaggtgcaaagcttgccggccattcccttggtcttggattgcatctggagaacgttgccctcttcgtcaatgacggagtaggtatacacgctgccggacttgtcgtagacgctcatgacatagacataggcgtcggtgccgaacttggcctggtcagtgtagagcacgatgacctcggcaacgtcggtggcatcgtcgaaggccaccacggaggcgcggaccttgccgttatcgatactacccgctttatcagcgtcgatcatcttggccatgttgtcatagcccacggccacatagcccttggatccattatagtagtaaataatggtttcctcgtcgataccatagctgttggtgtgggtatcaacagagctgttctccagacgcaggtcgacatcgcctctggcaacatcagccttcagctcggtctggctactatggaagaaagtagacttcccgctttctgtgtagttgtcgcctttgatatagtttttgctggtgccattgacgatcacgccgtcatccagctcagcaggcccgaaggtcacgacctcatcgtcgtcaatggtgtaggccaccaagttgccggaggcatagcccttagtcttggcaccggcagcggtagcgtcatcggaacccatgaacttcaggacggcgtccatggagttgtcgtcggtgatcgcactgccaaaccaggtctcaaccgcgctgtccttggtgctgttgtcgtcggaattggcgagatcctcaaagcggtcagcggtggcgtccatgtccacgtcatagaccttggaggtgccgtccgccagcagcagcttgatctggccggtggtggtcaggccgttgatggagtaagcggagtccagagccagagcgtactgggtgggagcgccctcgacctcacggaaggccacgatgttgccgaagtcgtccaggaagaagtcgtactgagcgtcaaactgcacgccgttggccttatcgtcacactcagagatcaggaacttgacggggttatccttgttgatgttgctcagaacctccaggccgtcctgcttgtactcctcgccgccgaccttgatgtagttcttgttgtcgtccttgttcttggcgttgaagagctccatctcaccggtaacggtcttgggctcctccacataggtacggccgccgtactggacaaccagcaccacgtcgcccttggtcagatccgtggcagtggtcacgatatcctcgttgtcgatgacatcgtcgccgggcaggccgtacagggtggtggtctcgttcttggagctgacgccggacacatgggtcagggacttctccacggagatgacatagttgacatagccgtcgttgtcgttgtcgatgacggtcagggcggcgcccttcacgttcatgatatcgtccacatcagcgctgtcaatggccacttcctcatagttgtggtaatactcggtggccttatccgtggccaggccagtgcccttcagcagggcggccagggagtcgtcgtccttggagtcgccgccggtgaccttctcgccggtctcaatgacggtgttcacgtcggagaccacaggagcgccatacacggtggagtcggccagaatggtggtcttcttcacgtacatggtgacggccttacccagcatatcaacaggagtgctgacattgaagacctgggtcttcacgttggcgctggaatcctgggccacggcggtgttgccggtggtggacaggatgccgtcggggttgtagatgcgggtcttgccctcctgcagcgcggtatcggtgtcgtcgtccaggatggcccactcattggcggtgacaacgccctccaccttgatcacgccatacttgtcggacaggatggtgcggtgatcgctgtaaacgatggggtagttgttggtggtgtagctctggatcatctccacgtccagggcgttgtagatcagcagggccgcgtcgtcgcggttcaggggagcggacaggtccttggtgaagccctcgaagatgccctgctcgtcggcgcggacggacacgttgatggcccagtcggcgccctcaaagccctcgatagcggggtcgtagcccacggccaccagcagcatcttggccgcctccagggcagtcacggtggcgctgggatcaaaggtgccggtgccgcggccggcaatgatgccggtggtgtagcagtagttgatgtggcccttggcccagtggctggtgatatcggtcaggccggagttgacgctctggtacagagcgctgttgtccacgcccttgttcatgatgacggagagcatcttcgccatctgagcgcggtcaacattttcggtgggtgcataggagccgtcgggcttgccctcgatgatgccgagggaaaccagcatggaaacggcgtccttgttcacgatctgatccttatcggtgagatcgttgtagctcacagcggaggcggagacaaccatcatgccgatgagcatgatcgccgccagagccaggctgagagcccgcttgaggtttctcatttgaatttcctccttctgaattttgaagcctaggggcgtatgacgccccttgcaagccatgaaaaaggagggattccccccacatgcagttccaaatggcacaaaagagcggcaaaaagtggcgttggtagacatctggtagacacgccgggcatgccaagcacaaaaagagcccggaaccgcaacggttccgggccacttttggtagacatttggtagacttaaccttaaagcacagtacaggtcacttgagccaatcacacacctcagccaggctgatgccctggccgcgggcgatacgggccacatcctcgtactccggcttggagcggacgacgccccagccggaggcggtcttgagccgcacggggccgtggggggtatccacggtgtgctcaccccgctccagggtataccggcggcacacattctcccgcacgcccagagtggtggtgtgccggaaaagcaggccaagcagcctctcccgatcctccatgcggcacatacaggagagcagcacggcggggcggcccttcttcatgccgatgggcgtggtatacacgtccagtgctccgacggcaagcagctcctcctgggcaaagccgatggcctcggcggtcatgtcgtccagattgcagcacagctcggccacctcgtccccgccgcccgcggtctcccccagcagggcgcggacacagttggccgcctcaaagtccttgtttcccataccatagccgattttttccaccttcatcaccggcatggcgccgaattcggtgacaaagtgcttgagcagcgccgcgccggtgggggtacacagttctccccggatggccccaccatagatggggacatcctggagaatgtgggccgtggcgggggcgggtacgggcaggatgccgtgggcgcagcgcacctggccgcttcctacatgcaccggagaggccacgatacgctccacacccagcatgtgtaccagcaggcagacccccgccacgtcggccaccgcgtccaggctgcccacctcgtggaagtggatctcctccaccggcgcgccgtgggcgtggctctcagcctccgcaatcaggccgtagaccgcctccgcatcggcccgtaccgcctcgggcagctccagatggcccagcagatggcggatctcccccattccggtgtggtggtgatgtccatggtcgtggtcgtgatggtggtgctcgtgttcatggccatgttcgtgctcgtggctgtgctcgtgaccatgctcatggctgtggtcgtgatggtggatgtgcccctccggggatacgtcgcagctgacctcctcctccccgtgtaccgtcaccgccacatgggtgccggtgatgccgcatttgacggccggtacggcggacaccgccacgccgggcagacccaggccgttcatcttctccagaaaggccgccttgtcgtccacaagctccagcagggccgccatgagcatatcgccggcggcccccataccgcagtccagatagagtgttctcatttctgtttccctcccatgtggttgatcatgctggccagatagcccgcgccgaagccgttgtcgatgttgaccacgctcaccccgctggcgcaggagttgagcatggacagcagggaggacaggccgtggaagcaggccccgtagccgatgctggtgggcacggcgatcaccgggcagtcggccaggccgccgatcacgctggccagggcgccctccatccccgcgatggcgatgatgacgttggcgctcatgagctcctccaggtgggagagcagccggtggagcccggccacccccacgtcgtacagccgcaccacctggttgcccagggcctcggcggtgagggcggcctcctcggccaccggcatgtcgctggtgccgccggtggccaccacgaccttgccggccccgtcgggggcgggcaggctgcccacgatgccgatgcggcccatctcgtggtaggtgaaggggtgggccgggtcgatggcggcggccgcctcggcggacatgcgggtgatgaggatcgtatcctgtcccccggcccgcatggcgtccacgatttgggcgatctgctccggggtcttgcccgcgccgtagatcacctcggccaccccctggcggagcccccggtggctgtccagcttggcaaagcccagctcctgaaagggctccagcttcagcttgaggagggcgtcgtccacctccatctgtccggcggccacctgctccagcagggccttgatcgctctctgttccattcagcgctcctccaaatccagcagaatcggcttgaaatagggggctagagccgcccgcagggcggcccgctcccggatggcccgctccagctgcccggccggaagctggagccgcgccgccccgtgaaacacccgcacccggaagtcggtatagcccaggcggaacagggcgtcctccgccccctccacccgcgccaggacctcctccgtgagcgcctccccggtgggaatccgggtggccaggcaggcgtaggccggcttatcccaggtgaacaggcccgcctccctggacaggcggcgtatatccgccttggtcaggccgcactcccgcaggggggagcgcacctccagctcccgcagggcccgcatgcccggccggtcccccgcctcatcggaggcgttggtgccgtccagcaggacggtgtacccgtcggccgcggcccgcgccttcagcgcgcggaacaggttctgcttgcagtagtagcaccgctccgccgggttggccgccacccgcgggtcggccagggcgtccagctccagcaccgtcacctccacccccagttccccggccagccggagggcgtcctcccgctcaaaccggggctggaaggcggtcttgatgtagtaggggcggagatccgccccggcccgcaccccggcgtacagcagataggccgagtccaccccgccggaaaagcccagggcgcacttggggtgggccgcaaaaaactcgttcagcgtcatcctttgactccttacacgtcgaagcggttgtaggcccggaagcagtccaggcacagctttttcccgttctccagccggagcaggtgctccgccgtcacctcgccgcagccgtcgcaggggtgggactggaagagccgggccctctccggcagggccagcacggcgggcttcacgtcgaagagggcggcgggggcggcgtcctggaggtagcggaaccgctcctccttggtctggtactccgccggggtggggcggagcactaggcgcaccgccttgccggtcttccggttgtagaaggaaaaggcctgcttgccccggaggtgaaagagcaggttgcccttgcccacgctgcaccccagaagcacctgaatggcgtctacgccgcaggcgtcgttctccgcgatgcacaccacgtcctcgtcggcggagaagtccagctccagcagctccatagcgtaccgggcggcctggaagccgatggtcaggccgccgcacgcgtggccgtggaaggccacgcatttgtcccagagggcttgtcggtccatattcattcgtcctttctacggcgtagggctagcccgcgtcaaacaggccgtcaaaacgcacttgaatgtagtcgttggggttcagccgggtgagcgcgcccttctccagacggaagagacggtcggaaatcttcagggcgctgtccagatcgtgggtgatgaacagcatggagaagccccggttgttctgcaggcccttgagcatccgcagcaggttggccttgcccgaggggtccagcatggaggtgggctcgtcggcaatgaggagggccggctccatggtcagggcacgggcaatggccacccgctgccgctggccgccggacagggcgtggatgtgccgggtgagaaagctgtcgcaggcgaaaaggcccacgtcctccagcgcccgctccgccgccccgtcctgaaagcagccggacagtcgcatgggctcctccaccgcctcccgcaccgtcatgcgggggttgagggcggcctggctgtcctggagcaccatctgcaccccgcccaggcggcggtggagggcggcaaagtcggccgcttccccctggaactccaccgagccgccgccctccagggggagcagccccgccagggtgcgggccagggtggtcttgcccgcgccggagcggcccaccagggagacgatctccccgctgtagagggtgaggtcgacgccgctcagcacccgctgccgcccgaaggacttgcggaggccccggcattccagcagcgtgagcacgcccccccggttgcaggccaggagccgcccgtcgggctgggtctccagctccggggcgtggccggcgcaggcgggcaggctctgggtacagcggccgtaaaaggggcagccgtggggctgccgggtgtaggagacggtggtggggcggatgccccacatgtcccgcaccgggttgaggcccaccgccgactggagcaggccccgggtgtaggggtggcgggggtggtccaaaagggcgcgggtgtcccccgcctcctccacgtgcccgtcgtagagcaccaccgtccgcccgcccaggtcggcggccagcttcatgtcgtgggtgatgaccaggaaggcggtgcccagcctgcggtttaattcctggatcagcgccgtgatcccccggctggaggcgatgtccagggcgccggtgggctcgtccagcagcaccagggcggggttgagggccagggcgttggccagcaggaacttctgcaccatgccgccggacagctcccggggatagcgctccagatccgccgtctccagacccaccagggccatcagctcctccatccgcgccgccatggccgccccccggtacgcccggcacagcacctcccgcaggtgctccgccagggtgagggaggggttgagccactcggccgagttctggaaggagagggcgaactccttcatgcgcaggggtctgcgcgcccgctcgtccatggccagcagctccctgccgttgaggtacacctgcccgctgacctgggcctccggctcggacaggcaggcgatggcgcgggccagggtggtcttgccgctgcccgactcccccacgatggtgagcatttccccggcgtccagagcaaagctcaccgggtgaagggtgaactccgggtaggacaccgacaggttgttcacttccagcagcacggcttgtccctcctctgttgttcctccagcccgcccaccagcaggcgcagcagcagcgtggacagcaccagcgcccccaccggcgggaggagccaccacgtccagaagtccgtccggtagagaccggggaagtccacggcccgggcgatcatcataccccaggagcgggccagcgggtcggacaggcccagaaaggccagggaggactcctggagaatggcccgtcccaccaccgccagggcattgatggtgagcagaggccacagctcatggccgatgtgggtgcggatgaggtaccaggttccgccgccgtagagccgggccatctgcacgtagtcccgccgccggatggagatggtcttggcccgcatctgccgggccaccggggcccaggagaaggcggcaatgatccagaccaggttccaggtgctctgccccagaaaggccccgatgacgatcatgaccgggagctgggggatggccagaagcacctggatcagaaaggagatcagagcgtccgcccagccccccgcaaagcccgccagtatccccaggccgccccccaccgcaaaggtgaaggcggcggcggccaggccgatgcccaggctgcggaagaagccggcggagatctgggcgtagatgtccacccccaggttgtcggtgccgagccagtgggcggcggagggggcctccagggagccccccgacgggagctgggccgggtgggggtatccggtgaccccccacagaaaacagagggtcagcagcgccagcaggagcaggggaaccagccatttgcgcctcatggcccctcctcctctccgtccagccggcggttgaccacgtccgccgccgccaagctgaggagcaccagcacggcggacaggaggaacaccccctggagcatgggatagtcccggtactgcaccgcttcccgcaggacggtgcccaggccggggtaggcgaagacgttctccaccagaatggtgccccccactgcgccccccacgctgaggaaaaagcgggccacgatgggggtggcggcgttgcgcaggatgtaggcggtgcggatgcgccccgcggtcaggcccttggcacgggcgctggtgaggtagggcctgcccaggatggtgaaaaagctggcccgggcggtaaaaaagagcttggggaccgtgaccagggtgagggcgcacaccggcatcaggctgtgcaccaggatgtcccccagccgctgccacaggccgtcgtattgggcaaagggggtgtaggccccggagaggggaatccacgctgcccgggccgccaccaggaagagcaggagcacgccggtgaggaaggggggcacctccgccagggcggagaggaccgggtagagcgcccggtcggcccagggccggcggacgcacagcagggccagggccacccccaggagcaggctgagggccagggtgctccccatgatccacaggctccagggcaggcgctccagcagaatatccgccacgggccgcttatagtggatactctggccgaagtccccgtggaggttgtccacaatggtatccctcaactgtggaaaaaagggcttgtccaggccgtagtaggcccgcagcagctccttctgctcctccgagtaggcggcgtccacatcgtccccggcggccccggaggtgtagtcaaaggggtcgcccggcatcagccggggaatggagaagttgaggagatagatgaccagaaaggcccccagcaacatcagcagcttttttcccatgcttctcctttcccggcggggcggacctcagcgcgccatgtaggacaggcggttctgctccgcctgctggtaggcgtaggtcttcatccagccgtcatagacatccttgcggtacatggagtaggaggactggttggcgatgacgatgatggggatctcccggctcaccagcagctccagctcctgaaacagctccacccgtttgtcaaagtcggtctcgtatacctggccctcggccagcgcggtcatctcggcgttggagtagccgatggcccccatggagtgggggttggtgccggagaacttggactcgtcggagaacagggtgcgcatgtaggtggggggattgttgccccagccgccgttgcccaccagggcgaactcgtagtcgccgctgttgatgcgcccgtcccgggtggccgagtcgtgggcctccaccgccacctcgatgcccgcggcggtgaggccgttgcggatgatctccgcgatggccaggtcgtccccgtcgtcgccgcacagaagggtgacggaatagcccttccccgcaaagacggcgcgggccgcctccgggtcataggggtactgcgccacgttctcgttatagtacaggctgccctgggggacgtagcccgcgctgcccaccgtgcccgcgccgcggaacacgctgtccaccacgctctgccggtcgatggcggcgtacaccccctgccgcagggcgagctccaaaaagtcggggcaccgctcgtagttgatgagcagcttatagcccatgtcgttggccttctccaccacgccgatggacgggtcgttcaaataggtgtccatcaggtcggcgggcagggaggtgatgtcgatctccccgctctcaaaggccagcagggggtcgctcaccggcacaaactggatcttctccgccgcctgctccccgttgcaccagccgtcgaaggcggtgaactcatagctgccggtggccccgtcataggcggtgcaggcataggccccgctgcctgtcagatagccctccccggtgtaggagttgggatcgtccacgctctcccagatgtgcttgggcaggatcacgaaggagcccaggttggacagggtgtcggcgttggcctccttcacggtgatggtgatggtctgctcatccaccaccgtatagtggtccaccagatagccgtcccccacccccagggagttggacaccggggggtgctcctgatagtagtccagggtgaaggccacgtcggcggtggtgaggggcgcgccgtcctggaattgggcgtctgcaaagagggtgaaggtgtagtcgttgccgtccatggaccagcgctccgccagccagggcacgtcgccggtctcgtccttctccagcaggctgccgtacaccaggcgcatcttggccgtgccggggccgcgggactggtgcagatagggatttgggacgccccagtcggtgcccccctccaggcggagggtctccacccggcggccggaggcggagccgctctccgacggggccgtcggggtgacggcggcctccggcgcgccgccgcagccggccagcaggccggcgcacagggcgcccgtcaaaagcaggccgaccgctctttttccatacttgctcatgggtctctctccttttcttccccggacacaaaaaaagcccaccatgtgcgcgcaggcgcacatggtgaacttcggttcaccggtttcaacggccgggggatgggtgtggaaaaaggcttcagcctttctaaagccgcttcagcggctcgtttggctcagtatagcagaaaaagggcggggctgtcaatcctgttcccccgatttcgccgcttttcccgccgccccggctgtgctatacttttaaccaaagggggttatggaaatgtacgacctaactgcaatgggggagctgttgatcgacttcacccagctcagcaccgatggagagggctatcccaccctggccgcccaccccggcggggcgccgggcaattttctggccgccctctgccgctatggggcctccgccgcctttctgggcaaggtgggggacgacgccttcggccgcctgctggtggacactctggcccgggcgggcattgagacccggggcatccgggtggacccgactgtgttcaccaccctggccttcgtcaccctcgtggacggagagcgatccttcagcttcgcccgcaagccgggcgcggacaccgtgctccgctttgacgagctggagctctccctcatcgaccagtccagggccttccacttcggcgccctcagcctgaccgacgagccagcccgctccgccacccggcaggcggtggcctacgccagggcgcagggaaagctcgtcacctttgacccaaactaccgtccgcccctgtggcggagcgaggcccaggccagagcggaaacgctctggggcctggagcaggccgacgtggtcaaactcagtgacgaggagttgtccttcctctggggctgtacgccggaggagggggcccgccgcctgcgggaggagtgtggtgtggctctggctatgatcacactggggccccagggctgttacctggaaaacgccaggggggcctgccgggtgcccgccccggcggtgcggccggtggacaccaccggcgcgggggacatcttcgggggcagcgccgtggcgaagctgctggccctggacacacctccggcggagctggagcccggcgcgctggagggcatcgcccgcttcgccgtcaccgccgccagcctgtccaccctccgccccggcggcatctcctccatccccacagaggcggaggtgctggccactctgtaagagtaatagaaggcccgccggtactccggcgggccttctattattcttcaggctgtcgaaaaaccttccccgaaggagggcctcggaaatgacacttcgcatggcggaagaggtgacaattttgcgggaaatcgtgccccttccgccatacaatctttttcggcaggctgtattactctctgcgggtcttgaggcgggccatggcccgggccagagccgccttggagtggtaatactcgtggatgctctgcttctgacgcagacgttcctcggcccgctcccgggcggcctcggcccgcttgcggtcgatctcctccgggtgctcggcaaagcccaccagcaggatcacatagtccggcttgatctctacgaagcccgcgcctacggcggcgggctcccatttgccgtccaccttgtagcgcagctctcccggctccacggcagtgaccgccggctcgtggccggggtacactcccatctcgccgtccacggcgggaaagaccagggcctcggcggggccgatgtagaactgccgctccggggtgatgatctccaggtagaaggtggaagcctccgccatttacaccgcccccattttcttggccttggcgatgacctcgtccacgttgcccacgttgctgaaggcggcctcgggatacttgtccagctcgccgcccaggatggtttcgaaggagcgcagcgtgtcctccagcttcacgtagcggccctccaggccggtgaactgctcggccaccgagaagggctgggagaagaactgctggatgcggcgggcccgctccacggtgcgcttgtcctcctcccccagctcctccatgcccaggatggcgatgatgtcctgaagctcccgatagcgctggagcagctcctgggtgccgcgggcgatcttatagtgccgctctcccaccacgtcgggctccagaatacgggaggtggactccaggggatccacggcgggataaatgccctgctccacgatcttacgggagaggacggtggtggcgtccaggtgggcgaaggtggtggcgggagcgggatcggtcaggtcgtcggcggggacgtagacggcctggacggaggtaatggccccgtccttggtggaggtgatgcgctcctgaagggcgcccacctcgttggccagggtgggctgatagcccacggcggagggcatccggcccatcagggcggagacctcgctgcccgcctggacgtagcggaagatgttgtcgatgaagagcagtacgttctgcttctcccggtcgcggaagtactcggccatggtcaggcccgtcagggccacccgcatacgggctccgggcggctcgttcatctggccgaagaccagggccgtcttttctatgacccccgactcggtcatctcccgccagaggtcgttgccctcgcgggtgcgctcccccacgccggtgaagatggagtagccgccgtgctcggtggcgatgttgtggatcagctcctggatgagcaccgtcttgcccacgccggcgccgccgaacaggccgatctttccgcctttggcgtagggggccagcaggtcgatgaccttgataccggtctcgaagatgtccaccacggggcgctggttctcgaacgcgggaggttggcggtggatggaccacctctcgctggcctgcaccgggcccttcccgtcgatggcgtcgcccagaacgttgaacatgcggcccagcacgccctcgcccacggggacggagatgggcgcgccggtggcggtgacggccatgccgcggcccaggccctcactgggggagagcatgatgcagcgcaccgtgtcgccgcccacatgctgggccacctccatgacctcccggcggccgtccagctccacctccagggcctccttcagctccggcagagcgccgccgtcaaaggccacgtccaccacggggcccatgacctgtacaatggttccttgcttctcactcataatggcaaaatcccctttcgggcgttggtatgttctgtatatcccctctccgtgggatgttacagggccgcctgggccccgcctacaacctccgtgatttcctgggtgatggccgcctgacgggcccggttgaaggacaggttcagacgctggagcatagcccgggcgttgtcgctggacgacttcatggccgtcatgcgggcattctgctcggagcaataggactccaccagtgcgccgaacaggtctccctttacatagccgggcaccagccggtccatgaccgccttcaccgagggcacatacaccacgtcccggttatagctgtcccggttcttcgcatattcaggaaacacatcggggtccaggggcagcagcttgtgggcggtgggctccatctgaaaggagctcaccattttggtaaagaggacatacacctcgtccaactggccatccagatagaggtccagcatcagctcggccatatcccgggcccggcccatgttggggtcctgggccgtgtagagaaactccacgtcgatggggatgccgtgctccaggaagtaggagcggcccacctgccccaccacaaagaggctgggattggcggccctggacattttctcctcagccagcttgagaatgttgtggttgtaggcccccgccagccctttgtcgccggtgatgacgatgaagcccgtcttccgtttgtcgggcgggataccggggcgcttatcgaaaaagcggtggtcgatctccggggagtggtggaggatatcggagatggtggcctcgatcttgctgaaatagggctccacatcggtgagctgcctgcgtgccttgcgcaggttggaggaagagatgagatacatggcgttggtgatcttcagcgtctgctccacgctcttgatgtgggtacggatctcctttatgcttgccatgtggcgctcccccgcttcttggcgtcggccagcgccgcccggatgcactccactgccgggccgctcagggtgccggtagactcaatctccgccaccatgtcggggtgctcggcctccatctcgtcggcaaatccaagcacgaaggggcgcacgtgctccagaggcacgtcgtccaccaggccgctggtggccacatacaggaggatggcctggcggcttaccggcatggggtggtagaggggctgcttgagcagctccagcagccggcggccgtggtccagggcctgctgggtagctgggtccagatcggaggcgaactgggtgaagacctccaactcccggaaccgggccaggtcgatgcgcagggtgccggcggtcttcttgatggcccgggtctgggctgcgccgcccacgcgggacacggacaggcccacgttgacggcgggccgctgtccggcgaagaacaggtcggtttccaggtagatctggccgtcggtgatggagataacattggtggggatgtaggccgacacgtctccggcctgggtctcgatgatgggcagggcggtcatggagccgccgccgtactccttcgtcaggcggcaggcccgctccagcaggcgggagtggagatagaacacgtcgccggggtaggcctcccgtccgggggagcgcttgagcagcagggacagggtacggtaggccaccgcgtgcttgctcagatcgtcatagacgatgagcacgtccttccccttgcccatgaaatactcgcccatggccgcaccggagtagggggcgatgtactggagtggggcggactcgctggcggtggaggacacgatgatggagtagtccatagccccgtgcttcttcagtgtgtcctgaatacgcgccacggtggacgccttctggccgatggccacatagatgcagatgacgtcctgccccttctggttcaggatggtgtccaccgcgatggcggtcttgccggtctggcggtccccgatgatcagctcacgctgtccccggccgatgggcaccatggcgtcgatggccaggatgccggtctggaggggtacatcgaccggctcgcggctgaccacgccgctggcctcgtgctcaatggggcgggtctcgttggtctcgatggggccgaggccgtcaatgggctggcccagcacgtccaccacccggccgatcagaccgtcgcccacggggacgtcggcggcccgcccggtgcggcgcaccacggtgccctcccggacgccggcctcgctgcccagcagcaccacgcccacgctgtcccgggccaggttcatgaccatgcccttcaccccggtgtccagctccaccagctcgccatacaccgcctgatccaggccgtagacggtggcaatgccgtcgcccacctccaggacggtgccggtctcatcccggcgaacccgggtgtcataattctgaatctcttcccgcaggatggagacaatctcttccggttttgctctcatgccattcgcctctcttccagttggcggcccatccggcccagcgccccgcggacgctcttgtcatagcgcacgccctcgatatccagtgtaaagccgcccagcagggccgggtcggtgcgcacgtcaaagacgatctccttcttgtggtggagacggcacagggccgcccggagcttctccagctcctccgcctccagcgggcgcacacaggtcagcacgcaccgggcgccgccccgccgggccagctccagcccgtgaaatgcctccacaatctcagacagcagggccatgcggcccttctctgccaggaggcggtaaaaatgtggcagtgggccgccctcttccagcccgggcagccgggccagtacccgccccttttctccggcctggacggcgggggagcagagcgcctcccaaagggcgggctcctccatcagggcccgggccgtgcgctccagggcctccccgtcgggagagacctgccacagggcctgggcatagcggcgggcgagctcgctcatgcctgctcacccacttccgccaggaaggagtccaccagcgcccggtcgccgtcctccgtgggccgctgggccaccttggcggcggccagcagggccagggaggccacctcgttccgcgccccgcgcagcatggcgtcccgctcggaggcgatctgcgcctccgcctcgctccgcagccgcttggcgtcggtctcggcgtccgccattttggcctcataggcccgctgggcgcggttctgggcgtcggccaccagcttggccgcctcctgccgggcgtcggtgagcttgtcctcatactccgcgcgcagctcctccgcctggctcttgctggcctcggcggagtcgatggtctccttcacccgggccgcccgctgctccagcacggcgttgacccggccgaacaggagcttgcgcaggataaaatagagcaccagcagattgatgacggtaaagacgatggtggaaacttggaagtccagcattggggacgcccccttaacccatgaagatcacgagcagcgcggtgatgaagccgaagatggcggtgccttcggccagggcgcagcccagcagcagggcgctgttgatctttccggcggcctccggctggcgggcgatggcctcgctggccttaccggtggcaaagccaatgccgatacccgcgccgatgccggtgaaaaccgcaatacccgcagcaataattcccagtgtcataatgatttcctcctaaaagcgattgatttagtcttcctccttgatgccctcaccggtaaacagggtggtgaggaacacaaagacgacggtctgaatgagcccgtcaaacaggtcgaagtagaggctgaacaccgccggcagcaccaccggcaccagcagcttgagcatctccatgatgatgaaggcgcccagaatgttgccgaacaggcgcatacacagcgccaggggccggatggccacctccatcaggttgatggggatgagcagcggcatgggctcggcgaacttcttcaggccgcccgccaggccgttgtagcggaactgggcgccgtagatgagaaacatactcatgagggccagggccgccgtcacgctgatgtcctttgtgggcggaaccagcccgaagatgccgatgaggttgctcaggccgatgtagagggccaccgtccccagccagggggcgaagggccgccagtgggcgcctatgttggtcttgacgaagccgttgaggaactccaccgtccactccagcgcgcactgtaccttgccggggcggtccacgctgagccgacgggtcagcgccagggccagcgcgatcagggccgccatcacaatccaggtcactaccaccgactccgccactgggacgccgcccagcaccgggacggtaaaggccaccttgtttcccagctcctccaccagggattccttgaatgcatccaaactcacaactcgcatcacctcgttttcgcgtgggctatcatactaccagccgggcggctttgggaacccttttgaaagtaaaaaaactttcgaatatgtccgtgctgcgctttcgtttgacagcgtggctgaatttatcttatactgatcccaaccgggaaaaaggaggcgcattgtccatgtccaaccagaccgggcgttccatccgcgcccagctcatgtggctgagcctgattatcgtcaccgtctcggtggccctttccctggccggcaccctctacatcaccctgcggaccgagcggaagaccctggaccagaatttgcttaactccgcatccattctctcccaggtgcccctcgtgagggaggccctgctgggggaggtgcccgcagacgagctggccgactttctggacgcggccaccgcccgcacctcggatatcgatctgattctggtgggagacacggaaagcgtactccgctatgcgccagaccgcagctttatcggcagccgctacaccggctccgcccagacccgcgccctggcaggggcggagccctatacctttgatgacagcggtccaatgggctccgaccactcggcctacgcccccatccgggacgaatccggggcggtaatcggctttatggccgtggggctctacctgcgcagcctgacccatgtggcgctgaccaccgccctgcgcctggcggccatcggcgcgctggcggcggcagtgggggccctgctggccctgcggctgtcccggcgcatcaagcgttccctgatgggctacgaaccagacgccttcgcccggcgcttccaccagcgggaggacattctggaggccctggaggaggggattctggccatcgaccgggaagggcgtatcatctttctcaacgccgccgcagcccagatgctctccctggcgccggaggccgccataggccgccccctccactccgtctacccctcctccaccctggaccgcattctgcgcaccgggcggccggagtacaacgtgagcatgaagtccctcaaggacgtgcgggtgctggctgaccgcctgcccctgtatgaaaacggcgctctggcaggggcggtgggcatcttccgcaaccggaccgaggtggcccggctggccgacgacctcaccggcgtgcggcacatggtggatgccatgcgggcctatacccacgaattcatgaacaagctccacgtcatcctgggcctgctgcagatcggcgagccggagcgggcccagcagtacatcatggataccacccgtacccagcaagaggcggtgagccgcatcatgaaccagatcaaggagccctcggtggccgccctgctggtgggcaagaccagcagggccaacgagctgggtatccggctcacgttggaccgggagagcgtcctgagtgccggaacctcctggctctcccccgacgcctgggtgaccatactgggcaatctgattgaaaacgccattgagggcctgaatcagacccgccgtgggaccaaggaagtctccgtcagcatccgcgagggggcggataacctgtttctctgcgtggaggacaccggccccggcatcccctccgccctgcggcgcaccctcttcgagcgcggagcctcctccaagggccgcagccgggggactgggctggcgctggtacgggaggtagtggaggcttaccacggcgacatccgggtggagtcggaaaccggcgtaggcacctcattttttctcagcttccgccgggaacccctcccggcccccaaggaggaaccctgaatgtaccgcgttgtcattgtggaggacgaccccatggtttccctcctgaaccgcacctttgtggagcgggacgcccgcttccaggtggtgcagtcctttcaggacggccgggccgccctggcctggctggagcagaaccccgccgatctggcggtgctggatgtctatatgcccctcttcaccgggctggagctgctccacgccctccggggccagggggttggtatcgacgccatcatggtcaccgccgccaacgacgcccccaccgtggacaccctgctcaagctgggggtggtggactatctggtgaagcctttcacctatgagcggtttcagcaggcgctggataacttctgccgccaccgggatgcggtggccggggacgcggtggagcagagcgcgctggaccggctcttttcccccgccctcccggcggagcaccagccgcccaagggcctccaggagagcaccctggagcttgtgcgcgcctgcctgcgggcggcaccgccccagggcctgcccagcgaagccctctcccgccagaccggcctttcagtggtgacggtgcggcggtatgtcaattacctggtagagcggggggaggcggccagcgccgtcaactacgacacaggcggccgtccctgccgcctgtaccgctgccccggcccgcctgcctgaaccccttccccgccaatggcgcgcgcatctgtaaggaatgcgcgcgccattggccttttccggctccgctcctcctccccggaacagaagggcaaagtccaaataccagagccgggcagccgctgagccctaactgcaagggcccgcaattccagcggaattgcgggccctgttttgcctcagaaggatggatcgcggaagacgcacgccccgcccacataggtgcgcagcacccgggcggagagcagttcctccggcgggcaggtcagcaggttgcggtccaccaggaggaagtcggccagcaggccggagcgtatgcgccccttgatgcgctcctcaccggaggcgtaagcgccgcctgcggtataagcgtacagcgcctggtagggcgtaagggcctgctccggcaggaaggggccgtttccggtgaagtcccgccgggtgacggcgcagtagaccccctccagggggtgaaagcgctccaccgggcagtcggtgccgaaagccatgtggaggcccagccgctccatgtcgccccaggcgtaggagtgggccagacggtttccgcccagtcgtccgggggcgatgtgcatgtcgccgttgatgaacaccggctggacaaaggcggtgacatccagctccgccatgcggcggagctgtccctccgacaggatctgacagtgcaccatgccgtgacgggggtgcagccagggcagctccgcgcgggcccgctggaaagcgttgagcaccatctcagccgctccgtctccgatggcgtggatggcaacggccatattgtgccggtgggcggtgaccaccagccggtccaactgtgcctgctccgggtagatgggcaggccgcaggtgtccggggcgtcggaatagggctcccgcaggaaggccgtccgcgcccccagggagccgtcggccaggagcttcaccgtggagatgcggaagcggtcgccgccgccgaagcaggccccgccccgggtgaagaactcctccagggtctccggctcggtgagcagggcctgctcggcaaagcgcagcttcagcgccccccgctcggccagctcccgcaggccgtccatgagggcatagggctcctcgtccggcgcatacttgaaatcgtcgctctgtatgctggtcaggccctccgccagcaggtcgtgctgggactgaactacctgctccagcaggggactcaggcccacggaggggatggcggccttgatgtcgtccagtacgttctccttcaccacgccgttgggcgccccggtctcgtccacctcggcaaaggcgccgtagtgccccactgtgtcccggttgatgtgcagcagctccagagccctggaattgagcgcccctacgtggaagcaggagcgcaggatcaggatggggtactccgtactcacctggtccagctcccggcgggtgggaaaacgccgctcgccggtgaactgctcctggttccacccctcgcccagaagccagcggccggagccggcctccagcccggccagcccccggcgcaggcgctcctgcacctccgccagagaggcacagccgaagaggttgacggacagctttgttttgacatagtggatgaagtgcaggtgagagtcattgaagccgggcattacaaagcggccctggagatccagagtctcccaggctcccctggaaaagcggcgggcgaagtcctcggcgtccgcccggccgcccacataggcgaagtatgcgccgtccaccacggcggcctccgccattgggcgggccgggtccatggtggcgatggttccattggtcagcagcagcatggtgtttctcctctccgcatttagtcccggaacgggtcgggatcaaagtgctcatccagggctgccagaaactcggccagcacctccaccgtctgctccacatcggccagagagcccacctcactgggggagtgcatgtagcgcaggggaataaaaagggtggtcacgggcaggcccacacccgtctggttgagcttatccgcatcggtgcccataacgcctggggtgacggcatactgcagggggattcccaaccgcccggcggcctcctccagcgcccggttgagaggcgcgctgcacaccgagcccttggccagggcggggccgccgcccagcttgatacggccgaagcgctgggggggcataccggagaaatcagaggtgtggatcacatccaccgcgacagccagcgtgggccgcacccggcctgctgcatggaaggcgccccgcatggtggtctcctctccggtggtggtggccgcaaagacgcccaccttcgcccccttctcccgggcccgcagcagagcgtggagcacggtataggcgcccaggcggttgtccagcccccggccggcgatgcagtcgttctccagctcgtccacggcataggagtaggtgacgaaatccccgggggcgaccagctccagggcctccgcccggctggtgaagccacagtcgatgtagagatcggtcagctcgatgtcggtgcgcacctcgccgttgcgcagcagcaggcccataacaccggtgagccgcttccgccccagcaccgtcacccgcttaccctgagccagtgccagacggatgccgccggccttgcccacctggaggtagccgtcgtcggtgatgtgggtcacccggaagccgatctcgtcgatatgtccgcacaggagcacccggaagggggatgcgctgttgatggaggaaatcacatcccccgccagatcggtctccacctccgctccctgctcccgcatgtaggcggccacctttttctgaagggggatctccccgccgctcaccgactcggtacggagcatctcatataaaaaagccttgttcatgaccctatcgttcctttctaacgccgaccggccatgcggtcttccctgcgcagcaggagctgaaagcgcactccgtcggcccagttggaggcccagatgtcccccttgtgaaactgcacaatcttttttgcgatgtagaggcccaggccgaagttgccgtccgcccccttgtagaacttttgaaacaggacgttcagagtcggctgcgggatgggcgcgccgtcgttctccacggtcaggaggtagccgccctcctcctccccggtcaactccatgcggatgtagctggccgcatagcgcaggccattttccaccagattgtcaaagacggtctggagcgcagcctcattccctgacaccgtgaggccggccgggacatccacctccagccggataccccgctcgttgccccgaaaccgcctgcggcactcctccatcagtccccggagctccaccggccggaagtcgctctgtttgcccagcatgtgatcgaaggaggagacatagagcagcttcctgatccctgcctccaccgccaggctctccttcatgatgatgtcgatggcctcggagccgtagatgccgtcctgataggcggcgcagcagttctggatgaccataatgggggtcttgagcccatgggacacactctggtagaaaaactcctcgtcctcgttgagctccaccacattgcgctgaatctgtgacagggtgttgacgagcgtcccgatttcgtcccggcgggccacctgcaagaccggctcattccagtttttgcccttgatgcgctccagattccctgccagccgctccaggggctcggtaatgcgccgggccgccagcttggcggcgaacaggtttgcaatgagcagcagggggaacagggcggccagcctataccactgtccgggctcctccggccggagcagaaggaggacgtacagcaggctggcggccaaagtgagtccctccgccagtgagaggcaggcccagagctggacgctcaggggccggtcctgcagccagtatctagtcgcaaagcgattcatgtctctcctccgtcaggcagtagcccaggccatagagcgtactgatttcgatgccgggcagcttcttgcgcaggcggcggatcgtgtcgtctaccacccggtcggagccataaaaggtatagccccacacggcgtccaggatgtcgccccgcttcaggacgtgcccccggttagccgccagatagagcagcaggtcgtactccttcaccgtgaggctgatactctcgctgccgcagtaaaccaggtgcttttccagatggaccgtgtacggccccacctggacctccgctgttttaggccgtccccccttcagcagccgctgaaccttgataaccagctcccgcaccagaaagggtttggagatgtaatcgtccccgcccagctccagcccggccaggcggtcaatatcctggttgcgggcagaaatgaagatcacatagctgttgggattcttcctctgtacctcccgaaagacggtgaagccgtcgatgtccgggagcataatgtcgatcacccacaggtcggtgggcttgtccagcccctgcacagcatcctccccccgcaggtagctgcggacggagtagccctccttctgcagatatttggtaatcagattgttgagaacggcctcgtcctccaaaacgctgatccacatgccgcacacacctctctccccaattgctcaggagcataataccaagcccgtaatactttgctattataccatattcccggggcggctggtagaggatgccggaaagaaagggcgccccccatgcgcggcaggtggcatgaggggcgcctcggctcagccgatcaccgtatagtactggaagtcccactggccgaccggggtgcggccggggccggaaaccttgccgtggtcaatgacctgggtataggtggtatagtagatcgggcagatgaccatattctccatgaggacatcctcagcctccttcaggtaggcgtcgcgctcctccccggaggtcttggccgccatcttcacggcgttgtcataggcctcgttttccgggttgagaatggtatccccgggcacgccggagtagggcttgtagcgccagcggacatcgttcatgccctcggcggtgaagagggagagcatggtcatggggtcgttgtagtcggcgctccagccggtgaaggcaatgctccagtcgccggagttgatggtgttggtgaacaccgcgtactcctgcacctgcaggttaaccttgatgcccaggttttcctgccacatctgctgcaccgcctccacaatcagggagttgttgccgctgtcgtagtaaaggacgttcagctcggggaagcccgccccgcctgggtagccggcctcagccagataggcctgagcctcctccaccttggcggagtaggggtcgatttcgtactcctccaccacgtttccgttctcatccagcgcccgcatactctcgccggtggacagcttgaagggaggcgccacaaaggcggaggcgggtacagagccgtcacgcaggatctggtcggtgatggtgctccggtcaatggccagggacagggccttgcgcacattgaggtcgttcaccacgtcggcgtccatgttgaactggaagtagctgttgcccagggcgggctcgctggagaagttgggatcctcggccagcaggcggggaatctccgcgccgggcaggatggaggtgacgttgatttcaccggcctcatagccctggagagaggtggtggcgtcggagatgaagaggatgcgcacgccggccagattcacattatcggcgttccagaagttgggattcttcttcagcagaatgtgggagcccaccttgtactcctccagcatgaacgcgccgttggagacgcatttggcgggatccttttcccagccctcgccggtagaggccatatcctcgcggcagggcatgtaggtaaaccaggacaccaggttcaggaagtatgcggtgggctgcttcagctccacctggagggtcttgtcgtccagggccttgaccgccacttcgtcccggctgccttcgccgctgaagtactcataagcgcccttgatgtagtcggtcatcaggaaggcgtagggggaggccatctccggggagcaggcccgcttccaggcgtactcgtagtcgtaggcggtgaccggctcgccgtcggaccaggtcaggccgtcccgcagatagaaggtgtacacggtgtcctcaacgccgtcggcgttggccgagagctcgtagcgctcggcggatgccatctggacgccgtcccgggtgtcgcgcaccaggccgtcgtagaggttcagaatgacatggccgcccatgctggaggtgttaagctgggggtcccaggtcttgggttcctcgcccacgttgtaaaccaggtactccgaggatgcaccgccggagccggagtccgttccggtgggctgcgggctgtcgttcccgccgccggagttggtggtgggcgcgcaggccgccagccccaggatcatggaaccggccagcagcatggaaacgagatgcttcgctttcataatatgcctcctttttcctcattcccccttgcgggggtcactctatggcaggcaaccgcatggttgcttcccacctcggtcagcggcggctcctgctcggcgcacaactgcgtggcgtaagggcagcgggtgcggaaccggcagccggaagggggatcgatggggctgggaatgtccccctgcagcatgatgggctcgctcctgtgcgccagctccgggtcggggaggggcacggaggagagcagggcctcggtataggggtggagatggttctggtagatttcctcgctgtcccccacctccaccagcttgcccaggtacatgacgccgatgcggttggagatatggcgcaccatggacaggtcgtgggcgataaacaggtacgtcagcccgaactcccgctggagatcctccagcatattgaccacctgggcctgaatggacacgtccagggcggagatgggctcgtcgcagacgatgaactcgggattgaccgccagggcgcgggcgataccgatgcgctggcgctggccgccggagaactcgtgggggtagcggttggcatgctcccgcatcaggcccacgtggtccagcagttcatagacccgctggctcctctgctccttggtggtgagttcggagtgaagatccagcgcctcccggatgatgtccatgaccgtcatacgggagtctagggaggcatagggatcctgaaagatcatctggatacgcttgcggtaggggagcagctgggggccggtcagatggctgatatccgtcccgtcgtagaggatttttccctcggtgggctcatagagccgggtgatggtgcgtcccagggtgctcttgccgcagcccgactcgcccaccaggccaaaggtctcgtggcgcaggatatggaagctgacatgatccacggactgcactacttgttttctgcggcccagcaggcccatgggcttataaaagtatttggtcaggccctccagctccaggagcttatccgtcggcacgccgcatcgcctccttccgctgaacatactccggattgacgggggcctcctcgtggaggagccagcacatcgtccggtggccatcctcctggaaataggggggcatctcctccatacacacattcatgcagtaggggcaccgggtgctgaagggacagcccttcggcgggtgaatcaggttgggcggggtaccgggaatgggcttaagccgctgcttctccccgcccgtgacacgggggatggagtcaatcagacccatggtatatgggtgcttcgggtggtagaagatctcctccaccgtgccgtcctccataatcagcccgccgtacatcaccaccaccttgtcgcacagggtggccaccacgcccaggtcgtgggtaatcaggatcgtggtcatgtccagctcccggttcaggcgcttgatcaggttgaggatctgggcctggatggtcacatccagggcggtggtgggctcgtcggcgatgagcagcttggggctgcacgccagagcaatggcgatcatggcccgctggcgcatgccgccggagaactcgtgggggtagttgtgaattcgcttctcgggggatgggatacccaccatacgcagcatctcaatggcccgccgtttggcctcacccttgccgatgtcctcatgctcctggagcatctccatgatctggttgcccacagtatacaccgggttgagggaggtcatggggtcctgaaagatcatggcaatctccttgccgcgcacccggcgcatccggcgctttccgtaggagaggatgtcctggtcctggaagaagatctctccgtccaccacccggccggggtgctgaagcaggcccatgatggacaggctggtgacgctcttgccgctgccgctctctcccacgatgcccagcacctcgccctggttcacatcaaagctgatgccgcgcaccgcctttacctcgcctacgtgggtgaaaaaggaggtctttagatttcgaaccgaaagtaaacgtcttgacatatcgcaaactcactttctcagccgcgggtccagagagtcccgcagtccgtcgctgaacaggttgagcgccaggatggtgatactcatgatgagggcggggtagaagagctgataagggctggtgtaaaggctgggcagcgcggcgttggccagcgcgccccaagatgcctggggcttggagacgcccagtccgatgaagctcagaaacgcctcggtgaacatggcactggggatttgcatggtcagggccaccataatggggcccatggcgttgggaataaggtggcgcaccaggatcttccgggtgggcacacccagcaggacggcggcggagacaaactcctgctcccgcatagtgagcacctgggagcggacgatgcgcaccatgcccacccagtaggtcaggcccatggccagaatgattgagtgcaggccggagcccagcaccaccatgatgagaatgacatagagcatcatggggatggagctgatggtgtccacaatccgcatcatgatgttgtccacagcgccgccgaagtagccggcaatgccgccgtagagcacgcccacgaccaggtttaccagggcggccaccacgcccaccagcagggagacccgggcgccgtacaccacgcggatgaacaggtcgcggcccagggagtcggtgccccagatataggtcttgttcaggacggttttggcgggggtgatctgcgccccgtcgtagaacacacggaagcggtcgatcttgtcctccaggatgtgctcggcctcccgcagactcaccgtctcgggggcgtcctccccgtagtactccctcaggtactccacctccgccacggtgacgggactgccgtcgccgtgggcagcctcctgggtgataaactccgatttggcccggaagtacacgccgtaatccaccagcaaatcctttccgttgatctcatataggtaggtccgcccggctttgtcatccttgaccagggtggaggccccaagcaggtggccggagccgtcggtgtcaatacacttgtagtcgctggtgacatagacgaagctgttaccgcccagatcgtagatttccagctccggcgggatgttggcgtaccgcaggtcctgttcctcgtaggaatagggccagaacatgggcacaaaaatggcggagagcaccacaatcaccaccaccaccatggacaggagcgcggtcttgttccggcacagccggtgccagcagtcctgccagtaggtcaggctggggcccccgatggcctcggaggccagggcgtcccgctccgccggcagccagcggcggtccgtttccttcatactcatgcgcgcctcctcaatccagcttgattctggggtcgattaggacgtaaacgagatccacgatcagcacggccaggaccagcagtacggcaaagaacaccgtaatgcccatgatcagcggatagtcgcggtttacaatgctgtcggtgaacaactggcccacgccggggatgccgaatacggtctcaatgacaaaggagccggtgacaatggaggccaccatgggcccgatgtaagtcaccaccggcagcagggcattgcgcagggcgtgcttgtagattaccttgaattcggagatacccttgctccgggcagtgcggatgtagtcctgctgctgcacctccaccaggctggtgcgggtcaggcgggtgatgaaggacagtgggaatgccccaatgaccagcaccgggccgatatagcccgccacctcgtccacaccgaaggcgggcacaagacccagggttttgctgaagagaaacaggaaacccgtggccagcacaaagctgggtatggtggagcccagggtggacagcaccatgaaaaaccggtcaatcagcttgttctggcgcagcgcgcacaccgagccgaacaggattccggcaaacaccaccaccagggaggcgtagatgccgatggtcagcgaaaaggggaagccgtcggctatgaccttgttgacagtcaggccggccttggtgtaggagacgccgaaatccccccggaggaagttgcccagatagatgatgtactgcttccacagcggctggtccaggccgtacttggccatcatggccgcctcaatttcgggattgggcatcttctccgcggcaaaggggttgccggggatcgctttcatcagaaagaatgtgatcgtgatgataaaaaagatggtgaccaatgcggataaaattcgtttcagcacatacttgagcatacaaactcctttctgaacagacaatgcctccccggtctgtcccggcctgatagggaatacagtgctttaatgtgttacagaatattataaatcaaaattgtcttgagaatatcgacggtttatgtgaaaaatcacatatttttgcgttccatttcggtctgcatcaggtcgggatggggcgtaacatgccagatatggacatcccggtagtgctccagcagcaggaagtaccagttgctgtcgaacagcagcagccccgcgagggcgagtgaggccagcccggcggccccaccggacaggccgggaagcagcgccgttcccttccagatgtcccacaccgccgccgcccccaccaggccgaggcagagcaggccacaccgccgtccctccggccgggccaaggcgcgcactacacggcccagccagagcaggccaaacaggcacaggaaagcccacaggcaggtctgtggccagcggttgtcctcggggaccagccgggcgcacagaaacaggagccccagcgccaactgcaccgtaagctgcagcagcccgcgcagctcctcgtagaaggcggcctgggccggatgggcaaaggatggcccctcctcccgggcagacagggtgcggagcagcgccccgccgcagcctgccgctcccccggcctggagggcggccgccagccccgccccggacagggagaacaggaagcggctccggtcaaaggcatccagcagcaccagcttgacggcggggatcaggttgggcagattgccgagcagggccgccgccagcaggagcagaaagagcagggagagcaccgtctcgcctcgctcccccacaagccggcagagcagccacagggccagcagaaccaccagccagggcaggagctccgcgcctctcgccggggcggaaggactggccaatatccggaacagcagaggcagcatgccgcacagcgccagtgtctgaagccagcggagcagacggcccagtcccggccttgcgcgggcccttttgcggcacagtattccctccagcagggcggacagctcgacccgcccgccgcagccaggctggtagtagcgccacagcccggccagcgcccccagcgggtgcagccagagcagggagaacaccagataccagaacagggctcccgcccctcccagggagagcgccgccattgtcagtatccaggccatggcgccgctgtcgccggggagccccgccagaagggcgcgcacgatggcgcggcgctgccccggggcacactcctccccgagaaagctccacagggaatgccggtacggtacctcagcaaagatccgccggtatccggcccagaaaaaaagccccaggcaggcggtaaaaaagagataaaatgggttttgcagcatctgcgtccctcccagtggcggctgcggccggtaaaaatctgttttctgaatcataacacacttccccctgcttcttcaatctggatcgcgcttcccttgccccggctgtgggcggccacaagggccgcccctacctttccggggttccgtctccggcaggctattctgcggtgcttgaagcctgtaggggcgggtgcccacacccgcccggagctggccggtggcccggaggtgcgggccgacgtgggcgtcggcccctaca

SEQ ID NO: 4295 - DNA, 8512 bp, Unknown
  gut microbiota DNA sequence
gccggccaatggccggcgccccttcttcttaattatttcagcagctcctccagcagctccaccgcttcgtacaccatccggtcgcagtggcacttgcgctcctccccccgctccttggccagccggagcagattggcgcagtccaggacctggtttttttcccggaaccggcgcatcagcgcggtggcctcatcggcccccttgcccgccagccccaacaccatcagcgcgccggtcaccgcgccgcaggtggagccatggcgcatgccggagccgaagttggcccccagcttgaaggctgtctccttatccaggccgcacaaatcggcgaagggcaccaagaccgactggcagcagttgtagtgtacgtccgtccgggcccgcagggcctcggtctcttccatcctcgtcataccaaacactcctttttaccggtcaatgaccatctgcttgtagtccagatagcggaagcccatccgctcatacagccgggcggcccggttctccccggtgacctccaggcggtagcgggcgcactcagggtgctgctccatggcccagcggatcacctgctcgccgtagcccttgccccggcactcgggagccaggtagagctcatccagcagcaggtagcgcccgcctacctcagcggaatagccgatgcacatataatggtagcccaccgggcggccgtcttcctccagcaccaggccctggatcagcggctcggccgggtccaccgccgcctgaaaggatcggcggagaacggccaggtccacctcatgctccaccgccgggctgtggtagaaccggtccaccatctccatgacggccccctcgtccgcagtggtcatctctcgaatggaaatcatacgtcttactccttttcatgtgattcttcgccccctgacggggcgctcagttgaacatgtcaccgtgctgggcaaacaggcggcgcacccggcccagcagcggtgcgtgctcccgccgggacaggccgggatcggcctccagcaacgcctgggcggcctgctgggcctccttgagcacccgcatgtccgccgccagatcggcgatgcccagttggggcaggccgtgctgccgctggccgaaaaagtcgccggggccgcgcagcttcaagtcctcctccgcgatgcggaagccgtcggcggttttcgccagcacccgcagccgctcccggctctcggcactgtgggtgctggtcatcagcacgcagtaggactggtgctttccccggcccacccggccccggagctggtggagctggctgagaccgaagcggtcggcgttctccaccaccatcagcgccgcgttgggcacgtccactcccacctcgatgacggtggtggacaccagcacgtccagctcccccgccgcgaaggcggtcatcgccgcgtccttgtccctggccttcatcttaccgtgtaccagccccacccgcaggtcggggaacacctcgcttctgaggtgttcggcataggggacggccgccttgaggccctccctgccgggctctccgggggactcctccccctcctccacggcggggcagacgagataggcctgccgcccctggcccaccagcttccgcacgaagcggtacatccgctgccgcttgtcctcccccaccacataggtctccaccggcgtgcggccggggggcagctcgtcgatcaccgacacctccagatccccatagatgatgagggccagggtgcgggggatgggggtggcggacatgaccagcacgtggggcgtccgcccggccttggcggccagggccgcgcgctgggccaccccgaagcggtgctgctcgtcggtgatggccagggccaggttggaaaaggtcactccctcgctcagcagggcgtgggtgccgaccaccagatccacctcccccgccgccagggcggcgtagagctccttccgggccttccccttcaccgagccggtgagcaggcccacccgcacccctgcccgccccagcagcggggccagggagcggaagtgctgctcggccagcagctccgtgggggccatcagggcgcactggccgccgtttttcgccgccagccacgccccgtaggccgccaccatggtcttgcccgagcccacatcgccctgcacaagccggttcatgggcgcgccggaggcggtatcggccgccacctcctccatggcccgccgctgggctgccgtgagggagaaggggagcagcgctaggaattcctccaccggcggtgtggaaaaggggacgccctccgcacaggtgcgccgggtgcgcagcagggccatgccgcaggccaggcagaacagctcctcgaagatcagccgccgccgggccagctccagggcctcctcgtcccgggggaagtggatgttccggcaggcaaactcggcggcggccagggcgtgctcccgccgcagtccggcgggaagcgtctcctccatctgcccggcgcactcctccacgcagcggagggtcagccccgccagcaggttgttggagacgccccgggtcagggggtagatgggcagaatacgaccggtgaagcgggccctgtccgcccgctcgcacaccgggttggtcatctgacgccgccccggcgggccctccacccggccgtagacgacgtatgtctcgccggtgcgcagggcgtccttcatataggactggttaaagaaggtggcgctgacgctgccggtatcgtccaccaggcgggccttcaccagctccagccccttgcggatgcgggagaggcggggcggctccgccaccagcaactccaggcacaccggagtgtccacaggggccgccgccacggtggaaaaccggcggcgatcctcatagtcccggggaaagtagcgcagcagatcctccaccgtggccagccccagcttctccaggctcttggcccgggccggcccgatgccgggcagctgctccaccccgtcgccaagccgcagcgccatggatgctccctcctctcctctgtgaggtcttagtgtagcatatttcccagacagtggcaaggccccctccccccgacggcgaaaccgccaaatacaaaaccggccggttgaatttcctgtgcgtgtcgccaagttttgcaaccgttcataaaatcgcttgcaaaaaagccgccttactgctataatcagtcttaacatcgcatttccccgcacgccccggcggcggggccatggcggccggagagccgccgcagccgaacggtgtctgtttgacgcgatcggactcatttgattcaggaaggaaggacagcatggcggaatgcaagtttaacaaagtcctggtggcaaaccggggcgagatcgccatccgcgtgttccgggcctgctacgatttgggcctgcacacggtggccatgtactccaacgaggacaccttttccctcttccgcaccaaggcggacgaggcctatctcatcggtgagaacaagtcccccctgggcgcctatctggatatcccctccatcatcgatctggcccgccgccgcaacgtggacgccatccaccccggctacggctttttgagcgagaacgccgacttcgcccgggcctgcgaggaggcgggcatcaccttcatcggcccctcctccaccattctggcccagatgggcgacaagctgaccgccaaggccatcgcccacgcctgcggcgtgcccaccatccccggttccgaccgtcccctgaaggacggggaggaggcccttgcaaaggctgtcgaatacggcttccccatcatcctcaaggcggccggcggcggcggcggccgcggcatgcgccgctgcgacaagccggaggaggtcatccccgccttcaacctggtgaagagcgaggccaagaaggccttcggcaacgaggacatcttcatcgagaagtacctggtggagcccaagcacattgaggtgcagattctgggcgacaagcacggcaatgtggttcacctgttcgagcgggactgctccctccagcgccgctaccagaaggtggtggagttcgcccccgccttctccgtaccggaggccacccgtcagaagctgtacgaggacgccgtcaaggtggcaaggcatgtgggctacgtctccgccggcacggtggagttcctggtggacaagagcggcaaccactactttatcgagatgaacccccgcatccaggtggagcacaccgtcaccgagatggtcactggcgtagacctggtacgggcccagattctcattgccgagggccaccccctgtccaccccggagatcggcatccccagccaggacgcggtgcacatgaacggctacgccctccagtgccgggtgaccaccgaggaccccgccaacaacttcgcccccgacaccggcaaaatcaccgcctaccgctccggcggcggcttcggcgtccgtctggacggcggcaacgccttcaccggcgcggagatctccccctactacgactccctgctggtcaaggtcacctcctgggacaacaccttcgagggggtgtgccgcaaggccatgcgggccatcagcgaggagcatgtccgcggcgtcaagaccaacattcccttcgtcaccaacattctggcccaccccaccttccgggccggggcgtgccacaccaagttcattgacgagactcccgagctcttcgacatcgacgtgggccgcgaccgtgccaccaagctgctcaagtacatcgcccagatacaggtcgataacccctccgccgagcgggcccagttcgacattccccgcttcccgccctacgagcacaccccgcccaagtgcaccggcctcaagcagcttttggacgagaaagggccagaggcggtgcgggactgggtgctgggacagaagaagctgctcatcaccgacaccaccatgcgggacgcccaccagtcccttctctccacccgggtgcgcacccgcgacatgctcaaggccgccgagggcacggcagagatcctcaacgactgcttctccctggagatgtggggcggcgccaccttcgacgtggcctaccgcttcctccatgagtccccctgggagcggctgcgcctgctgcgggagaagatccccaacatccccttccagatgctcctgcggggggccaacgccgtaggctacaccaactaccccgacaacctcatccgggcctttatccgggagtccgcccggagcggcatcgacgtattccgtatcttcgactccctgaactggattcccggcatggagatagccatagacgaggtgctccagcagggcaagctgtgcgaggccaccctgtgctacaccggtgacattctcgaccccaagcgggataaatataccctcaaatactacgtggacatggccaaggagctggagaagcggggcgcccatctgctgtgcatcaaggacatgtccggcctcctcaagccctacgcggccaagaagctggtcactgccctgaaaaacgaggtgggcctgcccatccacctgcacacccacgacacctcgggcaaccaggtggccgcctatctgatggccgccgaggcaggggtggatattgtggactgcgccatcgactccatgtcctccaccaccagccagccctccctgaacgcggtggtcaccgccctccagggccaggagcgggacaccggactcgaccccgaaaagctccagaccctctccgactactgggccgacgtgcgcctgcgctacagccagtttgaggcgggcatcaagaacccctccaccgatatctaccgctacgagatgcctggcggccagtacaccaacctcaagagccaggtggagagcctgggcctgggccaccaattcgaggacgtcaaggagatgtacgtcaaggtcaaccacatgctgggcgacattgtgaaggtgacgccctcctccaagatggtgggtgatctggccatcttcatggtgcagaacgagctgacccccgagaacattgtggagcgcggagaggccctcaccttccccgacagcgtggtgagctacttcaagggcatgatgggccagcccgcctggggcttccccgaggacttgcagaaggtggtgctcaagggtgaggagcccatcacctgccgccccggtgagctgctggagcccgtcgacttcgccgccgcccggcgggaggtggagaagttctaccccggcgcgtcggagcagaacatcatctcctggtgcctctaccccaaggtggtggaggagttcttccgccaccggcaggagtacggctacatcatgcgcatgggcagccatgtgttcttcaacggcatggccctgggcgagaccaacaagatcaacatcgaggacggcaagaccctggtcatcaaatacctggggctgggcgatctcaacgaggacggcacccgcaacgtccacttcgagctcaacggcatgcgccgcgaggtggcggtgcccgacaagaacgccgaggcacaggtgaagcacgttacgctggccgatccctccgacaagagccaggcaggggcctccatccccggcatggtgtccaagatctgcgtcaagcccggagacgcagtggaggagaaccaggtgctggccgtcattgaggccatgaagatggagacgagcgtagtggcccgcatggcgggtaccgtggagcaggtgctcatcaaagagggcggctctgtcaaagccggcgagctgctcatcaccataaagtaagcgcagggggccggtctgacgaccggccccttttccaccgcctgcaaccgctttttcaaggaggcccaaaccatggaaaccattctccacctgctccccctcaccggcgcacagaaggcggcctttcaggccgccgcgccggagtctgagcatctctttctccccaccaatgaccgcgggggagccagcagcatcccccaggagtggcgggagcgcaccaccattctgctgggctatgtcccccccgaacagctcaagacctttcccaacctgaaatgggtgcagagctggaacgccggggtggacccctatctggtccccggcgttctgccggagggcgtgcgcctcacctccgccgtgggagcctacggcccagccgtgtctgaacacatgctggccatgctcctggccatctataagcgcctgcccgcctactgtgaccagcagagggcccatatctgggcggatcttggacccgttggctccctagcgggcaaaaccgtgctggtggccggtgccggcgatatcggccgccactttgcccggctggtccgcgctctgggggcacagcgggttattgggctgcgccggagcgcgggctgcccggtagagggctttgacgagatttacggtctgggtgcgctggatggcctgctcccccaggccgatgtggtggccctggccctcccccacacccctgagactgcgggcctgatgagcaaggcccggctgctggctatgaggcccggcgcggtactgctcaacgcgggccgtgggagcgccgtggactgcaccgccctggcggaggtgctgtgctccggccgcctgctgggcgcgggactggacgttaccgatccggaacctctgcccccgggacaccccctctgggaggcccccagcctcctcctcaccccccacaccgccgggggctataaccacatggaggccacgctggagcgcatcaaggctattttcctggacaacctgcggcgctatgtggagggccgcacgctccgcaatcaagtgcgctgaccccccttgacatacctcggcgatctaggtaaaatacacctagatcgccgaggtattttgcgtataaggaggcttcccatgaaaaaggcggacaagaacctgctctccggctccaccacccttctggtactctccctgctctcctccggggacaaatatggctatgagatgatcgccgagctggaggcgcggagcgaccacacctttacgctcaaggagggcaccctctaccccatcctccacacactggagaaggacggagcggtgaagtcctacgaaaaagaggcccccacgggccggatgcggaaatactaccgcatcacccgcaagggcctgcgcctgctggacgaaaagaaggaggagtgggtggaatttacccataccgtcaacgccattctggccggaaccagtccggccctggcatgagcgccccggcggcggccccccaccgcaccatcagccagttctgcgaccacgtatgcatgtacgtccgcttccggccggaccacgaggccatcacggcggagctcaccgctcacttggaggaccataaagacgccattctggagatacacccggacatgacgctgtgggaggcggagcgccgggcggtggaggccatggggaatccggaagagctgggccgctggctggactccatccacaatcccctctttggctggctccagatctggttcgtgcgggcggtgtgtattctggcggcctcggtgctggtgctggctctg

SEQ ID NO: 4296 - DNA, 1059 bp, Unknown
  gut microbiota DNA sequence
ctccacgccccgctccttgcagtagcccaggatataggcggacttctcgtcggtgaggccgtccacgtcgatgtggctcaccccggcgtagcggcgctcggccttgccggagggccagcaggccgcctccacgcaggagaagcccaggtcgcgggcggtgtcgatcatctcctcaaagctccagccgtccaggatggcgctgacaaaaccaagtttcatattgtgaaaactcctttcgttaatcctgggcgacggacaccgccctgcctgtccgggaggactccagacaggcaaacacggcccgcatggcggtgagcaccgactctccggagatggcggggggcgtgttgccggtcaggcagtccatgaagcagtcgatgacgccggaggcggtctggttgtcgttggtctggatggcctccagctcgtagagcaccttctccccgccggcggtgatgagcttgagggagtaggccgggtcgtcgtagatgcgcaggatgccctttgtgccgtagagcacggtggagttgtcctccgcgccgtagtaggtccagctggcggtcatgttgccgatggcgccgccgctcatgcggtagatgcagatggcgttgtcgtccacgccgatgagctgcccgtcggccccccgcttgtccagggtggtcaccttggcggtggcctccaccacggtctggcccagcaggtactggatgaggtcagtcttgtggatgcccaggtcggccatggcgcccatggcggccttactcttgtcgaagaaccaggtgttcttgcccggatccacgctccaggtctcggggccgccgtggccgaaggtggtgcggaaggtgagaatgtcccccagcaccccgtccgccaccaactggcgggccttctggtgggcctttgtcaggcgctggttctggccgatcatgaggaacctgccgctctcccgggcggcggcggccatggcctcgcagtcggccaaggtggtggccatgggcttctcgcagagcacatgcttgcccgccctcagggcggcgatggtcagctccgcgtgggcgg

SEQ ID NO: 4297 - DNA, 14225 bp, Unknown
  gut microbiota DNA sequence
ggcggcgtactcggggatgtggcgcacctgggcaatcttgccgcagccgatgatgccgatgttgaacatggatgaaggctcctttctcttacgcgtcggcttccttcttctggagtagcacggcgacgatcacgatgacgcccttgcaggcctcccgcaggaaggggggcacgccaaagagggtcagcaggttgttcatcacgccgatgatgagcatgcccaatacggtgcccacgatggaacccttgccgccggacatgctggtgccgcccacgatgacggcggcgatggcgtccatctcatagccgctgccggcgctggcgtagtccatggagccgatgcgggagacctggatgatggcggcgatggccaccagcatgccggtgagcatgtagatgcggcgcttgaccttgttgacgttgatgccggacaggcgggcggtgcggatgttggagcccacggcgaacacatggcggccgaaggtggtgcgcttggacaccacatagaggacggcggcgatggccagccagtagaggatgggcatgatgtagaagctgccgattttcagattggcgatctggagaaagcccttgggcacggaggggttggcgtgctgggtcaggtgctgggtgacggagcggaagatctgcatggtgcccagggtggcgatgaaggggggcagcttgccgtgggcgatgagcacgccgttgagccagcccagcagcgcgccgaagaccaggcccacggcgatggcgatgatgtaggcgggcacgccggtgatgcccatgccggccagcaggccggtggcgctgccgtccaccaccatcatgaccatggcgcccacggccaccagggtggagccgacggacagatcaatgccgccggagatgatgacgaaggtcatgcccagggcaatgatgcccacgggggcgttgttgcgcaggatgttgagccagttggtcagcagggagagcagcagctcgcccacgctgccctcgccgaagttgtagatcatgatggcggtctggacgacgatcatcaggatcagcaccaggccggtgctgaccagggggttctgcttccaggcggcgaccagtccgccgccggaggatttcttttccagttctttcgttcccatagccgttactcctctgtatgaattgcctgtgcggaaggcgccgcgccgccggtggccaggtgcatgatggtctgctcgttcatgtccgccccggagacctcaccctggagggcgccgtggtacagaaccagggcgcggtcgcacacgcggatgatctcctgggcctcgctggacagcaccaccacggccacgccctcccgggccagccgcaggatgatgtcgtagatctcctccttggcgcccacgtccacgccctgggtggggttgtccagaatcagcaccttggggtgggcggacagccatttggccagcaccaccttctgctggttgccgccggacaggctggtgatgaggtcggtctttttgcccatcttgatgtgcagctcgcccacctggcggtcaaactccgcgtcccggcggcgctggtcgatgaggccccggcgggccagccgggggagggtgaccatggagccgttctccacgatatccatgtccttgatgatgccgttctccttgcggttgcgggggacatagccgatgcccagccggatggcctggggggtggaggtcaccttgacgggccggccctccacaaagagctgcccggtgtagggcaggtcgccgaagacggcctggaacagctcgctgcggccgtcgcccagcaggccggtgacgcccagcacctcgccggcgtggacggtgaaggagatatcccggaagtgggcgccgtcgcccagaccctccccacggaggatttcgccgcccagctccttgtcctggtgcaggttctcggtgcgcacgtcgtggcccaccatgaaccgggccagatcggcggtggtcacctcggccaccggcccggcggccaccatgttgccgtcccgcagcacggtgtaccggttgcagacctccatgacctccttgagcttgtgggagatgaagacgatggccacgttctgcttttgaagcatacgcatcatatcaaacacgcgctcaatctccgggtcggtcagggaggtggtgggctcgtccatgataatcagggaggcctccatcatcatggcgcgtgaaatttccacaatctgtttgtaggacgcatccagctcccgcaccatggtgcgggggtccaggtggagctccagacggtcaaagacctcctgggtcttttgaatcatggttttggcgtccaacaggccgtatttggttttcagttcccggccgataaacatgttctcgtagatggccagatcgttgatcaggctgagctcctggtggataaaggcgactcccgcgctgagggagtccgagggggtgcggaagtggacgggggtgccatcgatgacgatctcaccgcggtcggcgggcagcacgccgcccagaatgttcatcagcgtggacttgcccgcgccgttctcgcccagcagggcgcagatctccccgccctgaatggagaagtccacgtgcttgagcacgtcgttggaaccgaaggatttgcagatgccgcgcatctccagtgtcatgggatcacatccatttctgttctttcgggaaaggggctatggctggtgccatagcccctttatcagcgggaaatctgattagtagggagaattctcgtccaggtgggactccacggtgtcgcggtccagaatggtggtggggatgatcttcacggggtcctcgggggcgttgccgttcagaatatccagcgccatgtccacggcgtcctccaccatgtcgggggagtacagggcggactgcagccagatgtcctggttctcgtcggccagcatcatgttgaaccactcctgggcaccgccgccgccggtgatgaccttgatgtcggtgcggccggcatcacggatggcctgcaggacgccgatggaggtctcgtcgtccatggagaagacggcgtcaatctgggaattggcggtcagaatgtccgccatgtccgcgaggccggcctcgcgggtgaattccgttgcgtactcgatgaggttcatgtcgggggccagctcagccatgtgctcggtgaagccctgcttgcgcagctcggccacggagccggaggtgggcacgtccaggatgaccacggtgccctcggtgccgatcttgtccacgatgtactgggcgctctgatagcccatgtcgtagttgtcgccggacacgcggtacacgccgtcggcgtcgatggcgatgtcgaagttcaccacagtgatgccctcgtcaatggcctgctggatgggcacctccatgccctcccactgggggaaggccacgatggcgtcagcgccccaggtcttcagctcgtcgagctgggtggtcatctcggcggcgtcgccgctgatcaaaatcttcttctcaatcttgccctcggcctccagctcatcgcagcgcttttcggcgtagtaggccacgccggcggaccagccgtgggtcacctcgggggccaggacgccgatcttgtagacctcgccctcaggcgcgggggtgtcggtggcggcggagggggacccggtgttgggggcaggggaggcggtgtcaccgccgccgccgcaggcggccagagacagggacatggctccggccagggtgagcgcagccagtttcttgaacttcatgcttgtttcctccttaatattgagatccgtttcctttatgatccaacggcacaccgtgccgtagaatcccgctcaatgagggtgtgggggaggtagaccgcccgtccacggggcccgccctgaatctgggtgagcagaagctcccctgccgtccggcccagctcgtagcagggctggcgaacggtggtcagcctggggtggcccatcacggcgtactccacatcgtcaaaccccaccaccgacaagtcctccggcacccggaggcccagctcccgggcggcctgcacggcgcccagggccaacacgtcggagatgcagaacagggccgtggggcgctccggccgggccagcagccgccgggcggcctccacgccggaggaaaagctgtaatcccgtccggcaaaggtctggtcgtcctcccgcggggggatgttcagaacgcgcagcccgtccagatagccctgccggcgggcgatggtggacatgaagtcgttgtccgcgccgacaaagccgatgcgccggtggcccagcccggccagggtgagcaccacctcccgggcggcggccagattgtccaccgacacatggctcaccgcctggttgtcgcagtattcgctgcactgtaccaggtggtagtggcgggccatgccggtcacatgggggtcgtcccgggccggctccatcagaatggcgccgtcggcccggccgtccttcaaaaattccaggtaaagcgcccggcgccccgcctcggcattggtgatgcacagcatgccgctgtagccgtcctcgtggagccggtcctccgtcccggcgatgatgggggcgtagtaggggttgcttacgtttggtacgatgatcagcaccacccggctctcgccccgccggaggctccggccccacacgttgggctggtagcccagccgctcaatggcctcctgcacccgcgcctgggtctcatgggacaccgagggactgccgttgaccactctggaaacagtagcgacagagacgcccgcggttttggcgacctccgaaatcgttggggcacgcatcctgtttcacctctgatgtaatcgtttacatttgacgaggtgagtataacattttgaccaaatacagtcaagacactttgcagactttttgtgatattccttaaaattgtaaataatatacaaaatttgagtcacttttttgacttgcagagcgggaggactcctgttgagcgggacggtccgacaggtgggagaagaggctatgcaccccggaacggaggggagaaaagtagttattttttttgtgcactttgagaaagaaattttgtatatagaataaataaaacgaaagggcgtccctcatatcgcatatgatttccatatttgaaatgttgcaaaaaaagctggtttttggaaaatattgaccaatttttgtgccttgaaatggcgaaaaaaaggagttaatatacaaacgaaaatcaaatataaattagtttttctatatatagaatgtttgggagatcgctatgcatcacaaaaaagaattgcaggaattgatgcggacctacagctccatgaaggccctgcagctcctggtggcgctggccgactgcgagggggagatttcgctggcccagctctccgctgccacggggattccgcccagctccacccaccggattctccaggagatgcagcactgcgggtttgtcatcaaggatgaggtaaaaaagtgctaccgggcaggatttgaggcgcgcctgctggccatacagctccaaaagacaaactttctctatgaggccgccagaggagagatggcctatctgaacgatctgagcctggagaccatccacctcatcggggaggaggatatggaggccatctatctggcaaagctgggggcaaagagctccgtagggcttcactcggcggtgggcaaacggattccgctccactgtacagggggtgggaaggcgatcctggcgtggaaatccgagagctggctggagaactacctggcccatgtgaaacgggagcgcttcaccggcaagaccctgaccgacgcggaggatctgcggcgggagctggaggtgatccggattcagggctacgcagtggataaccacgagcaccatacggacgtggtgtgcatcgcggcgccggtgtttgatgtggataaccaggtgctggcggccatcggaattgccgcgccggactatcgcttctccttggaaaaggcgctgtcctactctggggaaatattgcggtgtgcggcccgcattacagagaagctgggctggcactatcccattcgggtatcgaaaaagagagatgagggaggcagatttgcatgagtgaaccgatggatctgatttataaggacccaaagtacccaagctccaaggtagtgaacggcctgagcatggcgggcccccgggcccatctgcggggcatgggtctggtcaacgaggagttggccaagccgtttatcggcgtcatcaatacctataacgagatgcatcccgggcacatccacctcaaccgcatcggccagttggtcaaggacggcgtgcgggaggcgggaggcgtcccctttgaggtgaacaccatctccctctgcgacggcttttcccagggccatgtgggaatgtgcagcgtgctgcccagccgcgaggtgatcgccgactccatcgaggtctatgccggcggccaccagttggacggcctggtgctcatcggcggctgcgataagattgtgccggccatgattatggcggcactgcgcatcaacctccccaccgtgctcgtcaccggcggccccatgatgccggccgtatacaaggggaagcagtacggcacctatgagctgaaggagatggcgggaaagctgacccgcggagagatctccagggaggagtatgagtacatggaggggctgatgtcccctacccccggctcctgcgctatgatgggaacggccaataccatgtccatcatcgcggaggccatgggcctgacgatgccgggcagcgcctgcgcccacgcggtcagcggcaagaagaaccgggtggccaaggagagcggcatggcggtggttcgcctggtggaggaagacatccggccccgggacatcgtcacccaggagatgctggagctggcggtccgggtgggactgagcgtgggcggctccaccaacatgacgctgcacatgccggccatcgcccacgaggcaaagctgcacatgtctctggaggagatcggccgtctgtcggcggagacaccctatctggccaaaatcaagccctccggcagccatacgatgctcgatctggatcaggccggcggcgtgggcgccgtgatgcgcgagctggacggactcatcaacctggatcagatgaccgttaacggaaaaacccaccgccagaatgtggagcgggtggttgaacacaacccggaggtgatccgccccgtgtccgacgcctacagcgaccacggctccatcacggtactcaagggcaatctggcccccgacggcgcagtgatcaagcagtcggccgtggcggccgccatgcgcaggcacagcggtcctgcccgctgctttgagtgtgaggaggatgccgtcaaggccatctacggcggcgtggtacagcatggcgaagtgctggtgatccggaacgaaggcccccagggcggccccggcatgcgggagatgctgaccgccaccgcggcactggtgggcatgggcttttctgagtcggtggcgctggtgaccgacggccgcttctccggcgcgacccgcggcccctgcatcggccacgtctccccggagacctcccgccgcggccccatcgccattgtgcaagacggcgaccgcattgacatcgacatcgatgccgggaccctgcacgtggacctctccgacggggagatcgcccggcggctggccgagctgccgccctaccagcccaaggttactgagggctatctggcccgctacgcccgcaatgtggagccggcggccagaggcgctattttggactgacaaagcgtcagtcaggaaaggagagggactccatgtccaaaatatgcagtctgcgcggtatttccgccccccaattgaccccctttcgggaggacgggagcatcaactacggggaatacacgcggctgacccaatttattacggatgcaggagtacacggcgtcttcgtctgcggcaccaccggagagtttgtcaatctgacgttggaggagcggaaaaggctcctgacggcggcggtggagggagcagggccggagagctgtattctgttcaacaccacggccatgaatctggcggacatgaaggagctgtttgactgggccaggcatgagggcgcccacgcggcgtcggtcaccgcgccctattaccacagctatgacgccgagactctgaccgcttacttccgcaaggccgcggagctggcggaggggatgcccctgtatctgtataacatgccggggatgacccataaccccatcacgcccaaggtggtacaggaggtgtgcgacacctgccccaacgtggcgggcctgaaggacagcagcatggatttcctgacgtttcaggagttccagtgcctggaacttccggagggcttcgagctgattaccggaaacgacgcccaggtgctccccgtccttcagtccggaggagacggcgcgattatcgccatggccagcgtgtttccaaagcagtgccagcagctctgggattgctactatgccggtgagctggagcaggcccgtcggatacagcggatgcttctgaagctgcgcgggctggtgcggagcgttatgcccgtcatggcccacaaaaagatgctggagctgcagggcttccacatggggccggcccggttccccttccgtgatctgagcggggaggagagccggacaattgaggagggcctggaaaagcttctgggccaagtgggatgacggccttcggcttccgctggtacgggcccgaggacgcagtcacgctggaacatatccgccagatcccgccggtgacggagcttgtcacctcgctctatcacatcccgaccggagcgctgtggccggaggaggacatcgcggcccaggccgcccaggccgcggcggcaggcctgcacttctcggtagcggagggactgccggttcatgagtccatcaaactgggcggcccggagcgggagcggtacatcggacagttcgtggaaaacctggagcggctggctcgccatggggtgcataccgtctgctataacttcatgcccctgttcggctggattcgtacagagctggagcaacccctgccggacggctccgccaccctggcctttcaccaggctgcgctggagcgcatgaacccggagcgggatgtctggacgctgcccggctggaacttttccacccggcagggggaaatccggacgctgctgggccagtaccgggccttgggagaggcggggctgtggaacaacctgtgctatttcctacaggctgtggccccagaggcggagcggctgggaatacgcctggccatccacccggacgacccgcctcttccggtatttggcctgccccgggtggtatccacgctggaggatctgctccgcctgaccggcgcggtggatctgccatccaacggtgtgacgctgtgcaccggctccctgggcagcagcagggccaacgatgtggtcaagattgcagaccgcctctgtgcggagggcaaaattccctttgtccacgggcggaatgtccgctgggagggggaggaggacttctgtgagagcggacatctgaccgcctcgggaagcctgaatatggcggccattctggcggccctgcaccggaggggctttgacggcgtgatacgcgccgaccacggccggatggtgtggggcgagcggggccgccctggttacggcctctacgaccgggcgatgggtgtatgctatctggccggcctgtgggaagcgctctgttattcctgttaacccgccgcctgtgcggcaaaaatcataagaagaaaagaggtattcctatgaaaaacctgaagaaagtccttgcactgtccctgtccctgtcgctggcgctgcctctggcggcctgcggagatcagggcgaaaccggaaagggaggcggtagcaccggcagctatccaagcagcactatcacggtggtatgcccctgggatgctggcggaacctccgacggcctgtgccgcattgtctccgagatcggcgcccgtgacgggtacttcggcgtcaatatggtggtgcagaacagcggcggcgcgggcggcaccgtggctaccacggagttcaagaacgcagcccccgacggctacaccctctgtcaggaggccatcggcgtgtttacccttcagcccttcgtccgcgaggtcagttacaccattgacgactttatccctgtggcggccctgtccaatgagcccatcattatgattgcgggcaaggactccggcatcaccagcgttgacgatttgctggagatggactccgtgacctacggcttctccggcagcggcagcctgatggagctgtcccagaagcagttcttcggcatggccggcgtggaggcaaccggcatctcctatgacggcagctctcccaccatcgcggccctgctgggcggccacattgacgtctgcaccggacatcccggcgaggtcatgcagtatgtggagtccggtgacgccgtggccatcggcatcttcaacgacgagcgggacccacgtgagaacctgaaggatatcgccaccttcaaggaaatgggctatgacgtgacgatgagcgtctggaagttcctgatgctgcccgccggtacccccgaggacgtggtgaccaaggtgaccgagaccctgactgccatcaccgagaccgacgagtacaaggagttctgcgacgccaaccagctcctgcccctgaccatgaccaccgaggagatggtggaacgtattaacgaggaggcggccgtgaaccaggagctgctggccggctgatccctctgccaaaaacacatagcaagcgctctccgggccatggaccgacggcggcccgcggcccggagaacaataccttaacaaaggagggagcttatgagtcaatacaaaaaggatatgattgcttcctttttctttctgatactgggagcgctggtattgatctcggttccgctgaccattcaagatccgggcgtgtccgtcatgggcccgcgcgtattcccctattttatcggggcctgcatggtgattctcagcctggcgctgatgctcaccaccattgtgaagcaccgcaaggcgggcggcgccgacagcacgggaacctttgcctccgaggaggagagaaagcgggccctgcgggacgagctgcgggcgcttctgctggccgctgtgattctggcctatgcggcactgtttcagattctggggtattttatctccacgcttctggcagccaccgttattctgcttattttccgcgtgaaaaagatctgggcctacccggtggtctatgccgcggcggtagccatctgggcgggatttaccttcctgctctccgtgagactgccttaagaggaggagaggagcatgattgaatccgttttgagcagcctttttaccctggagaacctgctctggatcaacgtcggcctggccggcggaattatggttggcgcgctgcccggcctgactggcaccatggccatggcgctgctgctgccgcttacatacggcctggcgtccatcccgggggttatgctgctgctgggcgtctactgcggtagtatctacggcggttccatcaccgccatcctgatcaacacgccgggcacgccggcctcggctgccacctcgctggacggctacccgatggctcagaaggggcacgggctgaaagcgctccatgtggcgctgtctgcctccaccatcggcggcctgttcagctgtgcggttctgctgtttgccgcgccgcccattgccagctttgcgctgaagttcggcccggccgagtatttcgccctggctctctttggactgacgattattgccagcgtgggcggaaagtcccagatcaaggggctgctgatgggctttgtagggctgctgatctcctgcatcggcatcgatcccatggatggcgtcagccgcttcaccttcggtatcaatcgcatggagggcggtattgataccattcccgtgctcatcggcctgttcgccatcacggagatcatggccaaggcccgggacatgaacaaggccaccggaacggcggtcaaggtggaaaaggagaagacccgcttccgcgacgtactgaaatacaagatggtgctgctcaagtccagcattctgggcgtgtttatcggcgcggtgcccggcaccggcgcggccatctcctctttcttggcgtacaatgaggccaagcggacctccaagcatcccgaggaatacgggcacggttccgaggaggcggttgtggcctccgagtcggccaacaacgccgttacaggcgccaccctgatccccctgctgaccctgggcattcccggcgacaccaacacggccgtgcttctgggcgctcttaccatgcagggtatcgccgccggcccccaactgttcacccagcacggggagtgggtctacaccattatgctgggcctgatcgccgtcaatatctttatgtacctccagggccgggtattcatccggggcttcgtcaacatcacccgcgtccccaccagcaccctggtccccattctggtcatgctgtgcgtgattggcgcctatgccatcgactactccgtgttcaacgccatctttatggtgggcgtgggtatcttcggctacttcatgagcaagctggacatgcccatgacgcccatggtcatcggcctggtgctgggcaagctgtgcgaatccaacctgcgccgtgcgctcatcgtgtccaagggaagctgggcgacgttctttacctcccccatcagcctgttctttattcttctgtcgctgtttatgttgttcttcccctatattaagaagaagctggcggcccgcagggctgcggcttgatcagaggcgtacatatgagaaatgggaatttgattcagctctgttcaggaagatactatcaaggcagcggcgtcctctctcatctgggaggggacgccgtactgctggggcggcgcgcgctggtggtggcggatgccgccgtgtggcccaaggtggaggcacgtgtgctccgcagcctggagcaaagcggtgtggatacaaagatctggctcttttccggccactgctgccccggcaatgttcgaagtgcggcccaggccggacaggcatacggggcggagctggtggtgggcgtgggcggcggccgcgcgctggatacggctaaaatagcggctgaccatatgggggtgcgggcgatcaccgtccccacctctgcggctacctgcgccgcctcagcgtggctggcggtagagtacaccgacgatggcgcgttcgtggggaacaactggacccggtacccgccctttgccgtgatagccgagctggactttatcgtcagggactgtccggcccgtctctacgcggcaggcatagtggatgccatggcgaaatacccggagatcagctacaacattcaattctccaatcagtgggaaaagaacctcttctcccagagcgcccagctcctgtctgaaaacacctaccggctcttgctggagcatgggtgtgagacaattgagcagcttcgggccggaaagatcacaccggcgctggaggactgtgtctgcgcggccctccaggtgacaggggtgatttccgccatggcctgcggcggcaagcaggccgccgtgagccacaccctctacagctacttctgctgtgtgcacccggaactggccgccggattcctccacggggagctggtgggcagtacgctggtctaccaactggcggtaaacggggccccaaaggaagcgcaggaggcgctgaaccgggtgctgcgggcgctgggtatgcccacctgtctggaggagctgggcctgaaggagactccggaggaagccgaccggattttcgccttcctggcggaacgcatgccggtggagacgccgaaagaactccagcgcctgcgtggggagagcgatgttttgttccacggcctgcgggacagcgccgggaaactgcaaacgaaaagaggagaagcccatgaaactggaatttgagtatgggcagggcctgctgggcgcggagctgcccgacagcacggacatcttcatccccggggagacggtagcggatcccccctgtctgccccaggactgggacagcctgtacgccgccaccctggcgtccatccgcaaccccatcggcatgcccccgctgaaggagctggccgggccgggcaagtcggtggt

SEQ ID NO: 4298 - DNA, 390 bp, Unknown
  gut microbiota DNA sequence
gaggacgggaaaatcaactgcgttgttacgaaggatttatcccgcttaggcagaaactacattctgaccggccagtacacggaaatctactttcccagcaaaggcgtccgctatatcgctgtcaatgacaatgtggacaccatcaacggagagaatgagcttgccccattcctcaacattctgaatgaaatgcacgcccgccagaccagcaaaaaggtaaaggcggccatgcggacacggttcgcaaatggcgcacactatggagcctatgctccgcttggctatgtcaaagacccagataagaaaggccatcttctgattgacccggaaacaaggtggattatcgaaaagatttttgaccttgccgttcatggccggggagccgccagc

SEQ ID NO: 4299 - DNA, 13673 bp, Unknown
  gut microbiota DNA sequence
cgtccgggctgatcccgccgccatggcccgcgctggcctcaatggtgtaccgggccgtgccggtgctgccgccgccgttatagctccactgcgcatagaggacggcatcctggccggtgagctggaaggcgtcgccggcggcataatcctcaccgctgccgtccgcctgggtgttccacccggcaaagctgtaaccggagcgggtgaaggtgttttccgccacggtgacggtgctccacttgtcggcgctctggtcggcaggggccgagccctcgccgccgttggcgttataggtcagggtgacggtgccctcgttggcgtcggggacgttgttattgttggtatcctcaccgaaggtcacggaaatggtgtgatcttcccggacatcggcgaaggtgtaggattcccacttttcccaggtgtccatgccgggcagcaggttgaccccgttgttcacataggcattgccgtcgatggtgacccggtccacggcatagccggtgtccggagtaaaatcaaacttctggctgttcccggccgggacatagaccttgccctccggggcgatggagccgttctcacccgcggaggaggtgatggagggattctgagtgatgtcgggcttgccgtcgtcattggtatcccagccccagacggcgtaaacagtgatatcagagttggtgaaggtcacctgctccacaacaccggcgggcatggtgtcaccctgcgagagaatgcggtcaatctgtgtcttggaccagcccacgaaacgggccgttcccttgtcgctggttgtagttccggtgaggctgaggccgcttccatcggccagggcaaccgtattgcccttgacataagtgccgctgtcggtgggcagaaccccctgcaaggtgccgctctccagctcgttttcggcgtaggtcagcgtgtacttgccggtctcgttcacgtccggcacgccgtcgccattggtatccacgccccaggcggcgtaaaccgtcgtgtcgccgttgatgtctacgttggcaacagtggtgggcgctgtatcgctggcggtgtagatcttgtttccagtggtgtccgctgtccatccaataaacaacacatccacgccgtcctgctgatcgtgagtgggggcgggggactgcttcaaggggtagccggtctgggtgtccagcagctccgttccggggccgccgctgccgccgttgggatcataggtcagaacatggagatttttgctgttgaccgtaatggtgccggtgaagtcttcgtagttggtgctggaaattgtaattgctatgtctgcaacctttgtttcttcatcagactccacggcgttgacgggcaggcgcaggacaccggcatttaccttgacagcgtcagtggtaaagtatccctctttggctattgtaatattacccaacttataggagatgtttcccaagccatccagtccagcagtcaactgggagagggaataggtatacgtcctggctgcccggttggcgatggtcaaggcgccgggattggcagaaatctgattctggccgggatcagctttggcaacgaccaccggcttacttgcttgggctggacgcagaacgtagtgcatggcccggtcgccggtcagctcgtaagaaagggtgaccgaccgattgccggcgtttgcattgctcagtgttccggtggcggtcacatccacatcatcgctgcctacaatgtcagcttgggtcagttcggcatcgactgtaaccgacgcatgtccatcatagggccacgtatacggactggagtgaccgttcagcttcacggtgctgtcatccacggaaatcggcttttgagccacagatacggtgacggtaccgctggcggcggcatagccatcgtctccgcctttttccgccacgctggcggtaatgacagcggttccgctgccggtgatggtaacctcaccattctgggctaccgttaccacatcttcattgttgctagtaaaggtaactagactatcaggagaaataggactatcatccttttgaagttcgacagttagagtgaagttttcatccccataggtcttgttgatggtaccatttgtaacaacctcatctccctgccggatcacaaccggataaatgggcagattggtaatcgtgatggtcagtgtcccggacttggactctggcgcaaaattggaatcactgtggctgaaaacccaatagaggggtacctcttcgccggcggatgtattctgaagggaggtatcggtcaccgcttgcgaatgttgctcatccatataccaagtcaggttcccagccctcaggccggtcaggtcatcttgaatcgacgggtcaatggaaatggtggcagggggcagcttggacaggagctgcgtttcaccatgcgccactgtccaattcccgtcggacacgttaatggtataatcggcgggttgaatggtaaaggtcctggaggcgctgccctccagcaggtcgccggcaccagtggaggtaacaacggccttggcggtctctccggcgtttgtggcatctgtgtaagttacggtatagtccgccggattcccataggtatgggaatagccccacagatttaatgtaacgcttacctcgggcctctgctccgtgccgttgtaggtcaggtcctccgcgccggacagggcaatcagcttatcctccgggggcagtttgacggtgccggtgcattccagtgtaccgctgccatctgtctggtcaagaccttcccgcagaatcagggtgcttccctcgtctacggtgacggtgccgttattggtcagtttgccgtcctggccgatttccagggtggcgtaggcgtagtttcggtcattctggacgacccgcagctcggtgccgctttccaccacaagcggatagtcaatcaccggttcaccccagacctggatattggcctctgtgtcattcaggtgaaccgtaccgtcctcacccaccgtcgcgctcgtattattgccctcatagctgataaaaataccgtcccagtcagcgaagccggaggggtccccaatgccgtccggggccacgatgacggcgtttccgcccgtgccggtggtgaaggctccgttgtcgcttgtaccgatagcacggttgccgctgccgatgctggtggagtccgcaccgccctcggcgtataccacaccgccgttgatggtgacggttccgctatagtttgcgttctcaccggagccgatgcccgcgccgccggtactgccgcttgacccaccgatggccgtgacgtatccgccgttgatggtaacattgccggttacagtcccgctgccgacctcgtagccgccgccgatgcccgcgccgcctccggagcctcgggcaatgatggtaccaccgttgatggtgatattgccaaaattactgctggcgccatatccaccgccgattccggccgcccccaaaccgatggatgcccccccggcggaggcctcgagtaatccgtttccttcaaaggtaacggaggaaccggactccacccagatggcaggatgattccggtaacctctgagagtgttgttgccctccaatataaaggtgacatctgcgttaccagttatatcaatagcagatttctcaacgcccggtgagtcaatagtaagattactaagcgtaattgtatgggttccgccatcaatggtctgattcctcctgttcccactccaggtctcttcgctttcactaaaagctagagaagttgaaggaataatagatagtaacatacataaggataataatgcggcaaaccaccgttttttttgatgtctcatggtgtatcctcctttttgtaaatgtctacctttttaaacgaggatacaacattttgcgataggaagatttaggaaataaatttgtaaaatatattaatagcctgttgcaattttcctgcaaaaatgatatatttactaaacatccacatgtttgataatgtagacatttaaaaacacgatgtccgcttctgcgggcattttttatgcgcggccggtcggggcggggacggctggagcaaaatgaagccagttggcacttccgtgcgcccaaagtggcgaaaattgagcaaaagagaaagaaaaccgacgggtatctcttgcaatcttttggcaaaatggtataatgtctccggttactgtatttgagtatagtagtgcaacgtaaatctaggaggaatgacaaatggccaacacgcataagtatgtctatttgttctcagagggcaacggctccatgcgggagctgctgggcggcaagggcgccaacctggctgagatgaccaatctgggtatgcccgtgccccagggcttcaccgtcaccaccgaggcctgcacccagtattataacgacggccgccagatcaacgcggacatccaggcccagatctacgagtacctgggcaagatggaggccatctgtggcaagaagttcgccgatcccgagaaccccctgctggtttccgtgcgctccggcgcccgcgcctccatgcccggcatgatggacaccatcctcaacctgggcctcaacgacaccgtggtggagggcctggccaagttcaccaacaacccccgcttcgcctacgactcctaccgccggttcatccagatgttctccgacgtggtgatggagctgagcaagaagcgctttgaggagattatcgacgacgtcaaggccaagaagggcgtcaagcaggacgtggagctggataccgaggacatgaagaacctggtggttctgttcaaggagttctacaagaaggagaagggcgaggacttcccccaggatcccaaggtccagctcatggaggccgtcaaggccgtgttccgctcctgggacaacccccgcgccaacgtctaccgccgcatgaacgagatcccctacgactggggcaccgccgtcaacgtccagtccatggtgttcggcaactccggcgacaactccggcaccggcgtggccttcacccgcaaccccgccaccggcgagaaggccctgttcggcgagtacctgatcaacgcccagggcgaggacgtggtggccggcgtgcgcaccccttcccccatctccaagctgcatgaggagatgcccgcggtgtacgagcagttcgccgccatcgccgaccgcctggagaagcactacaaggacatgcaggacatggagttcaccatcgagaatggcaagctctatatgctgcagacccgcaacggcaagcgcaccgccgccgccgccctgaaggtggccgtggatctggtggacgagggtatgatcgacgagaaggaggctgtgtgccgcgtcgatcccaagcagctcgacgccctgctgcaccccacctttgacgccgaggccctgaagaaggcccaggtcgttggcaagggcctggccgcctcccccggtgccgcctgcggccgcgtggtgttcaccgccgaggaggccaaggagtggcacgagcggggcgagaaggtcatcctggtccgcctggagacctctcccgaggacatcgagggcatgcaggtctcccagggcatcctgaccgtccgcggcggcatgacctctcacgccgccgtggtggcccgcggcatgggcacctgctgcgtgtccggctgcggcgacatcgtggtggactatgagaacaagaagttcaccctggccggcaaggagtaccacgagggcgactggatctccctggacggctccaccggcaacatctacggcgaggccgtggccaccgtgcccgccgaccccggctccggctacttcggccgcctgatgggctgggcggacaagtaccgtcagctcatggtctacaccaacgccgacaccccccgcgacgccgcccagggccgcgctttcggcgcccagggcattggcctgtgccgcaccgagcatatgttctttgagggcgagcgcatcaaggccatgcgcgagatgatcgtcgccgacaacaccgaggaccgcaagaaggccctggccaagatcatgccctaccagcagggcgacttcgagggcctgtacgaggccatggagggctgcccggttgtcattcgcttcctggatcccccgctgcacgagttcctgcccaccaaggaggaggacatcaaggagatcgccggcgagatcggcgtcaccgtagagcgcctgcacgaggttatcgcctccctgcacgagtttaaccccatgatgggccaccgcggctgccgtctggccgtctcctacccggagatcgccgagatgcagaccaccgccgtcatcaacgccgccatcaacgtccagaagaagcaccccgactggaagatggtgcccgagatcatgatccccctggtgggcgaggtcaaggagctcaagtacgtcaaggacgtggtggtcgccaccgccgacaagatcatcaaggacgccggtatcgacatgaagtatgaggtcggcaccatgatcgagatcccccgcgccgccctgactgccgacgagatcgccaaggaggccgagttcttctccttcggcaccaacgacctgacccagatgaccttcggcttctcccgcgacgacgccggcaagttcctgagctactactacgacaagaagatctatgagtccgatcccttcgcccacctggatcagaacggcgtgggcaagctggtcgccatggccgccaagctgggcaaggagacccgccccgacatccacctgggtatctgcggcgagcacggcggcgatcccacctccgtggagttctgccacaaggttggcctgaactacgtgtcctgctccccctaccgcgtgcctatcgcccgtctggctgccgcccaggccgccatcaagaacccccgctaagggcgagcatttataaagtaaacaggagcgccgcccatttgggcggcgctcctgctgttaggaggaaagtttttgcgtcggaaggcggttaggccccaaagagacgcagtttacaatctataataaaggaagaagggcaatccaggtttgctgccctccttaaatttcaataacagacctggcctacgtaaaaaattatagatgaagtgtaatattttgatcctccagactgatatagagacaaagagatccaacaggaagctattcttgaaatgtgcgtgcataaaacacatagaaggggtgagcccaatgggaatgatttaagcgcctgctatgagcaaagtacacgaccagcggcaaagaacccatcatccagtccccgatagggaaatgaaaatgggaggattcaaaatgatgctgaagaaaaaaaggggttatattggaataccaacggttttggtgcttgcagtgctcctgtcgcttctgtcgccaatggcactggcaaccagtctgacagataccatttctgaaacgggcattaccgctgtagtggaatatgaacccggcacggaagtctcgcagatgccgttttttaatgggctggctacaagaggagaagacgcgccaaatgtgaccgcagaatttagctataatttagttttgaatgaaactgcggaaaacattaaggcgtccgtggaactccaattctacagtggagacacgacgtatgagactcatctggagggccaactggagcaagtagaactttctgatgacattactctaattgaaggggggccgctggagggcgagatctccataggcacagaaacctaccatattatgtcttcgttccagaaacggataggtacggaaggggcctgtttaggtatttcaatgaaaaaacaagatagtgaggagttccctgtatttcttagagtcggtgaatccgtttatacagacgagataaaagcactgcatcctctatattccgaagatacgaatgatttagatggtcagttagcgctggcaagtacccctacgacgccaaaaggatataaaaaagtggaagtgtttaccctgccggtgccaaaaaataactacggactcagtgggccgggaatggatttttacgcatactttaaaccggaaggggctatttctgaggcagggaatgacactagatatagtcttttgctacttgcgccatatacttactgtgaagaattatcggatcaagtagatttagcaaatgtttatttgagtcaggttaaaattatcggtactaccacaaaggattgtgcttttctcagattttatgaagccccgccgggggtggatactggtgaatcggatacagtattttctctcttatcagctgctttatccattttgggcatttttaaagatgccgcagggtatgttggtgtagtactagaaaccttaaatacgatactgccacaagcaagtaaaatggaaatcgacccatttggaacagaggctatttttaaaatgggacttagtgtcgcagaccagggcataaattttgatgtagttccggcagcagtatgcttccgaatggatcctggagagcacaagacttacgaagtagagatcgaacctacggtggaatatatatatcgatcctatgaaacgctatactattttgacgtaaatacagtaactacattagagcttgactgttaacaccaaggtaaatatgaaattaaagagcgtgcatagcacacgagtaggtttttttacttcattaggttgtttgatatttctcttgattgcatctctgatatcaggcgaggtgttctttggatcggccatagtcacagtgaattgtgtatggctgggacgatatgctcgtcctaaatgtccttactgtgaaaagcgatttccaatgtgggggcgaaatatcacagtgtgccctcattgcggcaaacattttaaggaagaggaaacagacgagttctaataaaccggctgatggaatgcgaagtcattccatcagccggttataatacaaataaacgatcattacaaaatagaaaaaatatagttggtaatagagctatttatctttttgccgtaaccgcggaggaggtgggagtggtacggctgtcgatgccgttggcgtctctggcaaagacatccgccgttacccggtattgatgtccgatggttccctgatacgaaagggtcctgctgtagctggagcggttttcggcggtcatccagctttcgccctcgtactctttggcggtgctccaggtccttccgccatcgtcggactcctccaacaaaatgtagctggcgcccagttctgaaacacgttgatttgcgacgacggaaatcgttatttcaacggcgccgcggtcacccgcgaaaagcgtggcagaatatctcgtaagataggaacttgcccgctcaaccgccgaagcatggatgacgaagcctgtgcagaaggccagcgcaaaaattgctgcacagatgcagcgcagagattttttcatagttgactgctcctctcttatgtataaatagaatcaatgattgtgatcatttcctgttcggtcaacggtcccgtaatagagcactcacaggtaccgttcacccaggcagccacccgtacattcacattcgacatgatgtagtggacaatgccgtttttggtgtactcgatcacagaggaaccatctttttcaaagatggatgaggaaaaggtgccgtccattcgataggaatacataaggttcaggatgctctgaccgctgctgtaggaggcagtgaatacgacctgtccggttgaagggctggcctccacatagtccagcacatacccctccggaatccaggacggggccagcggttcagaaatggagtgggcgtcaaaagcatcctgaagcgtggggtattgctccacttcgtagatcagaaccccatcaatgtcaacaggaactgcggaaaccgcggaagttgcagggcctgccggggcagcaaagcggaatgtctcctccgtccatcgcccgattgcaccgaacacgtcgatgccagcggcctgcgcacaaaacatagtgaatacggcgacgatggccgcaacaacgacaactcttgcgaaggctctgcggaaacggaatccatgagatcctctttggggaacctccggtttgggcaaaatgtcctcgtcgaataaaatcgcatgctgtgaacggaacttttcccatgaccgttccacatcaaaatctttttcgagaggagcttttttgtccagggcggccagataggagtcaatcacatcctcatcataggtaaggtctgtcatttcatccatcctggcttccagctctgtcaacagctcgtccgctgttttgtcgcacagatgtccttggatttgagagacgttgcccttccctctgcccgactggtgtggggctcgtttcttctcgggcatcatgacacctccttcttaggaatatcagaaagactgatagaaacattacatcaattctgaaaaatctgtttctttttccgccagctttttatagtgttgctttgcccggaacatctgagtccggcaggtcaggatcggaatcttcagccgtgcagaaatctccccgtaggacagcccttcctcatagaaccagaccaacagatcctgttcccgctgggtgaggcccggcggcagtatatcgcgcagagaaaaaaactgttttggaggggcgctgatttgagtgatttgttcctctatggaaatttcatggctagattgcttctggttcctgtccatagaatggcggattaggttttgaacgactttcatcagccacccggaggggtttggatgaactcttacggtatcaaaccgagccaggagcaataagaatgcctcctgtacgacattctcagcctcgtctttatcgcccagccggcggaaagcgaccttatacagtttgagggcattggcttcataaagttccttcacccatgcttcatctgctggactcataagcatctctcctcccggttggctggtaccggctccattttaccgaagcaggctggaaaatgcaatcccgcccccggtttccagccaaaaccgggagcgggcgtttttacggcagaaagggcttgaggtactcggccatggagcgggacatctcgcgggagaaatcggagttgtacttgcgcttgcagaaggcgtccagccacgcaccgtagggccgggctccggcgttgtcggccagcatagcctccagctcggccggctccatgcggcggtaggcgttctcgtggacgatgtgctccaaggcgcggcggcggggcttttcccgctcctgctgctgctgcgtggggtagccaaacaccagcagggcggcgggcaccacgtactccggcaggcggagcagggtccggtgggtctccacctgctccagaatgtcgccgatgtagcaggagccgatgcccaggctccatgcggcggtgacggcgttctgggcggcgatattggcgtcggacagggccagccacaggtcgcccggcccggggcggcggggggaacagcccccggcggcaaaggcgtcgtaccacttctggcagtcggcgcagaaaaggagcaccagcggggcctgggcgatgaagggctggtggtcgcaggtgtcggccaacgtgtccttgacggcctggtcggtaatgtctaaaatggtatagagctgctggttccccgccgtgggggcggcgcaggccgcctccaggatggcccgtcgggcctccggggaaatgggccggtccagaaaggcccgcaccgacttgcgggcgtggagctgggacagaacttcgttcataaaaatccctcctaggatgtgatggtgtgaaagagatgcagtttaccgtggagcggggcggcccgctgctgcccttcctgctggagcacgtgaaggggagccgcaaccatgtcaagtcgctgctcgcccggggacaggtgcaggtggacgggacggccgtccgccgccacgaccaccccctcgcccccggccagcgggtgagcgtgctcgcccagggggcggaggcgcggcgggcccccttcccggtgctctatgaggacgggcgcatcctggtcattgacaagccctccggcctgctgagcatggccagcgaccgggagaaggtgcgcaccgcctaccgcatggcgggggagtacgtgcgccgcaccaggcccggagggcgggtgttcatcgtccaccggctggaccgcgacacctccggcgtgctcctgttcgccaaagacgaggaggccaagcgggcctaccaggagcactgggatgcgctggtgcgccgccggggctatctggcggtggtggagggccggccccccagggaggaggacaccatccgcacccttctgcgggagaacgccgcccacaaggtgtactccgtccgctccggcggcagggaggcggtgacccactaccgcaccatccaggcggggcgggagtacaccctgctggaggtggacatcgacaccgggcgcaagaaccagatccgcgcccacctgagcgagctgggctgccccgtggcgggagaccgggactacggcgcggccgccagcccgctgggccgcctgtgcctccacgcccacgagctggccctgaccgaccccttcaccggggaggagcggaggttccgctccggggccccccggggcttccgcgcgctggtctgctagagacccagccgggcccgggcctgggtgcggaactccaccagctcgggatagcggtagaaaaagctcagcttctcctcccagacggcatccccctccggggcgtcccacaggacaaagtaggtgaagctctccgcaatgtcctccgacgggtcggtggaggcgtagtcggtgacgaaatccgcctggtgccggagataaaagccatagctgtccggattggccaggcggtcatgcaggtagtccgtccagaaggcgtggtagaagtcatccagataggagccggaccgggcgaccatgccctcctcgcagtaccgggcgccgctctccggagcgccgtagtccgcctgggtgtcgttgagggtgaggtagtgggtatactcgtggaggatggtttcggtaaaccagtccaactccccggcatccgccgggtccactgccagttcccaccgcgtccctgtgtcatccaggggggacacataggccagggtttcatccagaccgtcggtaaagacagtgaagcgggaaaagccgtccagggcaccctcgggcagaagggcgttcacctgtgcccacaggggacggtagacatcctccccagaggtcagccggaggccgccgtccgactccacggcatagtcggccagcgggcgctcggcgggagaggcatagccccaggacccgccgccccccaggtatttgagcgtgtaccgctcatagagccggttgaggcggtccaccagattggcctcctcagtggacaactgccaccgtgcttccgcctcccgtgtctggcgcagggggaggagctgttccacaagggtatgtacatgggccagctccgcctcggagagcaggccgtccagctccccaagctgggcggaggccagcgcatcggcggcgggattttccacagatacaccagaggatgtggaaaacttctccggttgtttgcagccagccaggagaagcagggggagcagcgccaggagggcgcggcgcttgaccatgggatcacctccgtgtcggattatttccgccattgtaccacaggagagtgaaaaagagaa

SEQ ID NO: 4300 - DNA, 200 bp, Unknown
  gut microbiota DNA sequence
agggcgtgctgcatgcggttggcgatgaagccgggcacgtcctttttgcacagcacgggcttcttgcccacggagcgcagcacctccatcaccgtctgggccacctcgtcgctggaggcgtcggacttgaccacctccaccagggggatcaggtggccggggttccagaagtgagtgcccacaaagcgctcacggtgctg

SEQ ID NO: 4301 - DNA, 21585 bp, Unknown
  gut microbiota DNA sequence
aagatctccgtctacgtgcaacaatggctgtcagcggaaaaaggcatgtcctccgaccgttaccgcatctcggtgtttaccccagtggtagagcagctcggcataccagaggccaccccgcactggtgccgccataccttcgccacccttctaagccgtgccggagtggacgagatcaaggtgaagctgctcctgggacattccctcaagggaaatgtcaccgccacctacattcatcccacccccgccgatctcgccaaagaggtgaaaaagctggcctgacaaaatcaccaggaatccgccgttagtaacgtattagtaacgagctagtatcattttttgcctacacgcctagagttccagtcactccagagccgcacctggttaaaattttcttaaatcgccgttctcttaatacaccctgcaccccgtggaaggtcaagggaaatttttttgttttccatgtatatccaagcccaggcctgtccacaataggctcggaggtgctaaacagcatgaaaaaaccattcttgaaacgaatgggcgactttctggagggcaagggcttctacatagtcctgttcctctgcgtcgccgcaataggaatttcgggctattatctcttttcctctctcaccccggatgagccggacgcccccgtggcgggcaccgcccagatcaccgtcaccccctctccccggcccacgccggtggacgcgggcctcatgaaccgcccggcggccacccctgcgccggagcacaccgtccctgcgtccccggctgtaccggcggccacgccctcggcgatgccgtcggccacgccccagcccactccacaggctgcccccaccgtctttacctggccggtacagggagatattctgacggactacagcctggaggtgctctcctacaatcccaccatggacgactggcgcacccacgacggtctggacatcgcctccgccgccggtactgaggtcaaggcggccgccgcggggacggtcaccgccgtcctccaggacgccatgatgggcaccaccgttgtggtggagcacggcggcggactgaccagcacttacgccaacctggcctccgtacccacggtggcggtgggcgacacggttggcgccggctccgtgctgggctcggtgggcggcaccgccatcgccgagagcgccctggccagccatctgcacttcagcatgtcgctggacggctccactgttgaccccctggaatacctgcccaactaaattctttcccttcctttcctccctgatatgcagacggcgcatggcctcagccatgcgccgtctgcactgtattactccacgtcctccgggaaaaaggcccggtagggcagcacgcccgccagctcgatgagcgtgtcggaaaatccgccgctgccgtcaaaccccatccggggcgttttcagcagctcgcccggctccggcggccggaggggcagggacacgatcgcccgggagccccgctcctcccgctgctcaaagacgatgctccccccgtggagggcggcgatgcggcgggccaccttcagtccaagacccaggctgcccggccgctgaagcagctcccgctcatcggtttccgggagaaaacccggtccgttgtcccacacggtgaggatcgcccgcccgccccggcgggccaggcgcaggccggactctccgccctctcccgccgcgcggacggcgttggcgatcaggttgagcagcagccgccggagctgggccccgtctccatgggtgaggaggctccctatctcctcctcataggaaaagcggatgccagccagcgccgtcaggggagacacctgctcccccagctcccggcacagcccggccagatccagcgtgccctcccgcagggggagctctccctcaggcagttccagatactcaagattgcccaccatacgaatcaaccggtacaggctctggtgcagaatggccaaataggggtcgtactgcggccccgccttctcccgcaccaccggcgtgagcaactgaatcgctgcggacaggttgttcatctgctgacggaactgctctaccaggagcggtcccagatcctctctcttctcatccaaatgccgccgacctcctttccagtcctgccatagcttgcgcaggaattccgtaaagttgtaagggtatgataacgtcagtatagcaaaatccgacccgccgctcaagcagaaatgtcgaatcatgtcgaaaccaccgcgtttaccgatagtgccggtgtaaatttatacagtttccccagtaagttttctgttttcccccttttcattcggcgcggattcgtttataatggaggcgcgcaattggaaatcatttaagaatcaaattagaacgaaggagcgattcattatgagcattaaagttggcattaatggctttggccggatcggccgtctggtgttccgcgcgggtatctcccgttccgacatcgagttcgtgggtatcaacgatcccttcatgacccccgattacatggcctacatgctgcgttatgataccatgcacggccagtttgacggcaccattgagtacaccgacgacgccatcatcgtcaacggcaagactgtgaagttcttcgcctgcatggatcccaaggacatcccctggggcaaggtgggcgccgagtatgtagtggagtccaccggcatgttcctgaccaaggagaaggcccaggcccacatcgacgccggcgccaagaaggtggtcatgtccgccccctccaaggacgatacccccatgttcgtcatgggcgtcaaccacgagacctatgactccagcatgaactttgtctccaatgcctcctgcaccaccaactgcctggcccccatcgccaaggtgctgcacgacaactggggcattaccgacggcctgatgaccaccgtccactccaccaccgccacccagaagactgtggacggcccctccaagaaggactggcgcggcggccgcgccgcctccggcaacatcatcccctcctccaccggcgccgccaaggccgtgggcaaggtcatcccctccctcaacggcaagctgaccggcatgtccatgcgcgtgcccaccctggatgtctccgtggtggacctgaccgtcaacctggccaagcccgccaagtacgacgagatctgcgccgccatgaagaaggccagcgagggtgagctgaagggcatcctgggctacaccgaggacgccgtggtgtcctccgacttcctgggcgacacccgcacctccatcttcgacgccaccgccggcatcgccctgaccgacaccttcgtgaaggtcgtgtcctggtacgacaatgagatcggctactccaacaaggtgctggacctcatcacccatatgtattccgtggaccacaagtaagtgaatccaaccaaagagagcggaagccggacggcttccgctttctttgaccgtcgaaaaagcggtttcgccgctttttcgagccggatgcagcccaccgcgcgcgggctgagaagtgctttctccggcgtacatgccgctggagaaaacggcttttatttgcttcgcgcctgcgggtgcgaactctgcgaggctttttcgacaaagtgaacgagagcggaggccatccggcttccgctctcgttttcgttctgcccacggaggaggccgttcacacctcccgcacgtccacataggcggaggtggtggcgtccagcaccgccatatagccgcagcggaagtccagccagtcccccacccttacccggcctccgcacccctccacgtctacaatcaggtggtcggagctggcgccgatcatctccgcccccggcagggtgggggtgagggcggcccaggccacatcctgcttgcctgcggcgcagatggcccgcaggtggaccccccggtcggggtattcgggcagctcccccttgccgtcccggccgtgctccccgatgggcaccgacggcttgcggcgcagctccaccacctgggccttgaagtggaaggcgtcggtatggtacccctccagaaagcgcatgccggtggtgtcttcgccgtagagtagcccctcgcccacccgcaggtgattgatgcccgcagggagccgcccctcctccagcagcttgagtgtacaggtggagccgccggacagggttttgatatggaagccgtacttctcattgaggaagtccctcaactccaccaggatctgtgtgttctccaccgaggggaggatgcttccgtaacaccccacgttggtgcccaggcccaccagctccacaccggtacagtccagaatctgccccgcaatctcctccaactgctcccggccgaataccccctcccggagatcccccacgtccaccatgagcataatggggtgaatcttcccctgccggacggccgcatcggacacggcgcggatgacctcaatctggctctggaggctacagtcagcccagcgcaccacctcctcggcctcgtcaatggcgggtatgcggatgagcaggtagtgcaggccgggtatggcggtcttggcggcgatgatgtttttcaggcggctgtccgcgaagcgggtgacgccgccggcccgggccgcccggatcaccccggggcgggcggagaagcccttggtgacaaaggccagctccaccccccgccgggcgcagaaggtgtggagctttcgggcgttctcctcgattttcctggtgtcaatctccagtatgggtgcgtacatgctttccacccccctttgtagctaccaacagtgtaaccctcattttccctcttgacaaggggaattccatatgtcatactgtgtatgctgaatatatacagtatgacatcaagaaggtgtaccatggacatcatcatccgcaattccggcggcgtacccatctatgaccagatcacccggcagatgaagggcctcattctccggggagagctgaaggagggcgaggccctgccctccatgcggctgctggccaaggagctgcgcatttccgtcatcaccaccaagcgggcctatgaggagctggagcgggagggctttctcaccaccgtgccgggcaaggggtgctttgtggcgccccagaacccggagctggtgcgggaggacaccctccgccgggccgaggagcacctgtcccatgcggtggacgtcgccaaggccggcggcgtcaccctggccgagctcaccgagaccctcaaccttctgtatggagacgaaacactatgaaaaacgcattggaagtgtcccatctcaccaaggactacggctccttcaagctggacgacgtgtccttcaccgtacccggcggcaccatcatgggcctgatcggggagaacggcgcgggcaagtccaccaccatcaagtgcatcctcaacctgatccgccgggacggcggggagatccaggtgctgggcctggacaacctggcggacgagcgggcggtcaaggcccaggtgggggtggtgctggacgagaccaccttccacgacggcctctccgccccccaagtggggaacattctcgcccgcctctaccccggctgggatggagccctgtaccagcattacctggagaaatttggcctcaccagcaaaaagctggtcaagaccttctccaagggcatgaagatgaagctgtccctcgcggcggcctttgccgcccggcccaagctgctgatcctggacgaggccacctccggcctcgacccggtggtgcgggacgaaattttggacgagttcctggcgttcattcaggacgaggagcacgccattctcctgtccagccacatcaccagcgatctggagaaggtggccgactatgtgacctacctccacagggggcgggtggcggtgtcgggggccaaggatgagctgctggacacctacggcaagctggtgtgcggccgctccgagctggagcgggtggaccccgccctgctggtgggggtgcgctccggccagttcggctgtgaggccctggtgaaaaaccggcgggctttcgcccggttccaccccgagctggcggtggagccggtgtcgctggaggatattatggtctttaccgtaaagggggatgcccgatgaccggcctcatctacaaggattttctggcccttaagggccatctgactacctacctggtctttttcctggtctacggcggcctgtgcttgtcgggagtgttcaccgcctcggtgctgtgcggcatggtggtgctcatgtccctgatcacccctatgaccaccgtcacctccgacgacgtgagccgctggaaccgcttcgccatcgccaccccggcctgccgccggggggtggtgacaggcaagtacctgttcaccctgctggtgaccctggccagcaccgtgtttgtctccctgctgctggtcgtgctggccctggccggcgggctggaggagtccctgtccgagctgctgctgtccgccctggcctgtgcggggatcgccctgatcatgaacgcggtggcgctccccctgctgctcaagtttggggcggagaaggcccgcatggtgagcatggcgctctttttactggtcttcgccggctttgccctgctgggcctggcggccgaccggggcctcgccctccccgcgcccccggcgtgggtgctcaccgccctgcccggcctgcttgccatcctggccgtgggcggcttcgccctctcctactgtattgcccaggccatctatgcccgaaaggagttctaagcatggccggactgctctgcaaggactggctgctgctccggcggcagctttggtactatgccctcctgctggggctttatctggcgctcactgccgccggagtgctggacgcctcttttctgtgcggcctggcggttctctacggcacccttctccccaccacctgcttcagctatgacgaggctgtgcactgggagcggtacgccgccgccacccccgccggacggcgcgggacggtggacggcaagtacctgctggccctgttgctggccgccctcagcggcgggatttccctcttcctcaccgtcctgatggaggggccggagagcgctctggccctggcggtgctggtctgtaccggcctggccctggcggtcaacgccgtcaacctgccccttctcctgctcttgggggtgagccgcagccgggcggccctctactttgtgttcatcctcttcttcggcggcggcatggccctgcttttgctcttccagcggggccttcttcccccgcccacccccggcctggccgccgccctgccctggctggtgaccgtcctgtgcgcggcggcctacgccgcctcctggtgcatcgcccggaagatttactgtaaaaaggaactgtaggggcgtggcctgtccccgcccgccgggtgtgccacgctacggtcggacgaggaactgcgtgcggccgccaagggacacccccctgtaagcccctgtctgtcccgtatccaaaaacgtccccggagggaattccctccggggacgtttctgcgtggttcagggcagctcgataacccagtcgagactttcatacaggtggtcggccctgccgccggcatcctgaattctctccacagccactccgccgatacacactgcgtccaccggttcctccatgccctccggcttgatggcctcgaaccgctcggtgccgtccagctcataggcgcctgtgatgtcgtggcagggatagcgctctcccgatgcgccgataaaggagatgtcgaagggccagccccaccactctgtgctgtcgaagctggcggatatggccgagccgtcctccgccacccagatggtcatatccccctgggggagcgtccaagtcttctgtaccgtggggggcgtctccgccggcaccagtcggagggagaacactcccccctggacgcccagaccgctgacatggagggcgcagtcctccggcggcggggcggccatcgtacagcgaaggcgggtggatgcagtggtctgatagccctgctccaggcggtagcgggggtagccgctcccctccccggcatccgccacgctgtagggagtgatggtgtggacggcattgtgcagcggctccccgtccgccgacaggcccagccgcagctccaccggagagggcaactgatcggcaggtaaacggctgctcatggtgagttccagttccagcaccccgctgcgcagggtagcatccgcctcgtaggtccagtccccctccgtccaggtgaccggctcctccagcacccagagctccgccttgtcatccgccgtggcgccgatgcctgcgaaatagcggcagagctcccccaccccggcggccacggcccggtagttcatcagtcccagcaccagccccgcgcaggccgccgcggccgccagccgcctcaggggtgcccggctccgcctgggaggcgtcagcgcctcctccgtgagtatcagcagaccatcccggtccagtacctcgtcccaatcacagtatctcatttggttccctcccgttcccacaggcccagcccctgccgggccagcagccgcttcagcttcttccgcaggcggctcacccgggcgtccaccccgttgggcgacagccccagtacgccacccagctccgcagaagagagcccgtagacaaaccgcagggtgaacagcctccgttcctcccggctcagcccctccagcacccggcgcagtccgtcccgcaccgcagctctctccgcgtgatccgccgccgccaggccagagtgttcctccagtggctcctccatccgggcggccagggcgcggcggcggtcctttgcccggctgcgcaccagcacgcaaagccaggtctgcttactcccctgcgcgggatcccacggcgccctgccctctacaaaggcccagacggcgtcctggacgcactcctccgcgtcctccgggcggccggggagctgagcggcggccaccagctccagcagcctgccgtactgccggaaaatctgctccgcctcctggttatgatccaaaacctcctccattggttcgccccctttcaccttacagtacggccgggaacgcggaaacctgacgcacgccgaagaaaaaaacgcggaggaaccggtgttcctccgcgttttttgcggctgtttagtgattgagcaggcgcacccgcagcaccacgtccagggcgcggatggtgtcggccacggactcgccgatgcggctgtccacgtccaccacggtataggcatagtccttcttggacttgttcgtcatgttagccacatttaccccgtccttggagagcactccagtgatgctggcgatggcgccgggggcgttgcggtggatgatgcacaggcgggacacgccgctccacggctgcaccagtgtgggcaggttcaccgagttctgaatgttgccgttctccagatagtccttcagctcctgggccgccatgacggcgcagttctcctcgctctccggcgtggaggcccccagatgggggatggccaccacgttcttgccccgcaggattttgccgttggggaagtcggtgacgtagcaggccaccttgccgctgtccagggcggccagcatgtcgtcgtcgttgaccagggtgccccgcgccaggttgaggatgcgcacgccgcccttcatcatatggaatgcgtcctcgttgaacattcccttggtctcgggggtctggggcacgtggagggtgatgtagtcgcagttcttataaatggtctccagatccatggcccggtggaccagccgggacagggacagagctccgtccaccgacaggaaggggtcgtagccgaacacggtcatgcccagcttggtggcgatgttggccacctgcacgccgatggcccccaggccgatgacgcccagcatcttgccggacagctccgggcccacaaactggctcttgcccttctccaccgcctgctccacgtccgccccggcggcggcctgctccttcacccaggccacgccgtcactgatctttcgggaggccaacagcagggcgcacaccgccagctccttcaccgcattggcgttggcgccgggggtattgaataccacgatgcccgcctcggagcagcggtcgatggggatgttattagtgcccgcgcccgcccgggccacggcccgcagggcatcggggaatgcatagtcgtgcatgtccgccgagcggaccaaaataccgtcctcgttttccacatcggtgctgatggtgtagcgggtctggtccagtacggacagcccggcgggggaaatcttattcagtgtcttgatgcgatacatatagccctctccccttcattgtttttatcagatgcctggatgaaactacacgccttccatgggagcccttgattttacttccccggacggagtgaatccgccctgcggcaagattttgtccgctggccaaaatgcctgtacgcggcgtaagccgcgccccactttgcagggccccagggtaagccgaacgctcagttgttcttatcgaatgcccggatgaagtcgcacagcttttccacgccctcggtgggcatggcgttatagatgcttgcccgcatgccgcccacggagcggtggcccttcaggttggtgaaaccggcggccacgctctcctgcacaaacttggcgtccagctcgtcgctgccggtacggaacaccacgttcatatcggagcgggagccgggctccacggcgcaggtgaagagccgggaggagtcgatcacgtcatagagcatctgcgcctttttgtgcttgatggcctccatgccgggtatgcccccctgctcctccagccagtccaggaccagccccagcatatagatgcaccagcagggcggggtgttgtacatggagtccttgtcgatcatggtcttgtagttcatcatcaggggggtgaagggcagctcatgcccggccagctcctccttgatgatcactaccgtcaggccggcaggggccatgttcttctgggcgccggcgaagatgacgccgtacttggacacgtccacggggcgggagaggatgtcggaggacatgtcgcacacgatgggcacgccgcccgtctccgggacatactgccactcggtgccgtagatggtgttgttggcgcagtagtagaaatagctggcctcagggtccagctccagttgactctgctggggaatgtaggtgtggtttttgtcggcggaggatgcggccagatggatctggccgtacttctgcgcctccttgtaggcgatgttggagaagttgccggtcacggcgtagtcggccttgccggtggccccgatgaggttcaggggcgccatggagaactgggtggaggcgccgccctggaggaagaggatctggtatccctccggcacgttgagcagggcgcgcagcttggccttggtgtcgtcaaagatcttctggaacaccttggagcggtgactcatctccatgacggacatgccggagccctggtagtttgtgatctcggctcctgcccgctccaatacctccagcggcagcatggaagggccggcggaaaagttgtaaacacgttcgtttcccatgacagatggcctcctcgatattccaatttgaaatagaacggggcttcgcaccgggttatcgctttactccgttaaagtatattatatcggatgccctatccaactgtcaactgcacggattgactaaaaccaagccgttcaatctcaaaactttgtgaatatttcaacgaaccctttgcactttgcgccggtttgtggtacaataccattgaacttacagtttagttttcccttccgggaggaggagtggccaatgaggctgtctgatatcaagacgattctgcacgccgaggtgctgtggggggaggagcatctggaccgggaggttttttccgcctgcggcagcgacttcatgagcgatgtgctggcctttgtcaagaaccaggcgctgctgctcaccggcctggtcaacccccaggtggtgcgcaccgcagatatggtggagatgaaatgtattgtctttgtgcggggtaaggtgccggggccggacattctgtctctggcggaggagcgtgacattgtagttatgacctgccccaagcgtatgtacgaggcgtgcggcctgttatattccaatggattgcgagggaattgtgatggagacaattagactggtttaccctgtggagggcggcgatctgatcgaggccggcgaggcttccagcaaaatgaagctgacgctgaagaagctgggactgccccaggacgtgatccgccgtgcgtccatctgcatgtatgagggcgagatcaatatggtgatccacgccgacggcggccaggccgaggtggaggtggacgccaatcagattgttatccgcatgaccgataccgggccgggcatcccggacgtggagcaggccatgcaggagggctactccaccgccgggcagaccgcccgggagctgggcttcggcgctggcatgggcctgcccaatatgaagcgctactccgacgagatgaccattgacaccgaggtgggcaagggtaccaccgttacggttaaaatcaaggtttcctgagcgcgatgagcttggaaaagcgaggtgacgcggctccatgtccatgagacattcggtggtcctggagctgaagcgctgccggggctgcaccacctgcatcaagtgctgccccaccgaggccatccgggtccgcggccgcaaggccaccattctgcccgaccggtgcatcgactgcggaagctgtatccgcatctgtccccacaaggccatcaagtcggtgggcgacagtctggacattctgaagcagtaccaatactgcgtggccctgccggagcccgccctgtatgggcagttccagcacctggacagcgtggatattgtgctcaacggcctgttgaagatcggctttcacaaggtctatgaggtggctaaggccgccgagatgatctccgactttgagcggcagagcatcagcggcggcccgtccaaggtgacgccccagatctcctcctcctgtcccacagtgctccgcctcatccgcatgcgcttccccaagctcatgggccatgtggcctgtaccattctgcccatggagctggccgccattctggcccggcgggaggcagccgaggagaccggcctgccgccggaggccatcggcgtattcgccatcgtgccctgctcctccaaggtgacggccgcccgggtctccgaggggctcagccgcccggtgctggacggggccttcgccatccgggacatctacctgcgcctgctcaatcccatgcgggagctggaggagatcacccccatggcctccgccggtatcctaggcctgggctgggcctcctgcggcggcgagagcgccgcccgcctgggggagcgctgcgtggcggtggacggtattcagaacgtcatccgcatgctggaggagatcgaagacggccgtctgccggaggccgattttctggagctgtcagcctgcacccaggggtgcgtggggggctgcttcaatgtggagaatccctacgcggccaagcttcgcatcaagggcctgctcaagggtctgccggtctcccgcaaccgtttcctctttcatggagaggcgcgggatatcgtgcggagggacaaggagctacagtacttacctaccttcgtgctggatcaggaccgggagatggccatcagcaaacagttgcgtatccaggagctggagtcccacctgcccggcctccactgcggctcctgcggagcgccctcctgccgggccttcgcggaggacgtggtactgggccgcgcctcggaggacgactgcattttcaaggtgcgggagcgcatgcgctccatggcgggcagcaaggaggaggcggacgactacctgcccccgcccttccgccgccgccaggagccgtccgaatagaccctaccgccgccgtgaagcgccctgcgtctcacggcggcctctttatacaacaaggaggagttttttatgacggtacgcgaactgaccgaagccctctccctgacccccttccatctggcccagcccgaccgcccggtttccggcggctacgccggagacctgctgagctgggtgctgggccgggccggacaggacgccgcctggctcacgatcatgtccaaccagaatgtggccgccgtggccctcatggctgaggtctcctgcgtcattctcaccgagggggtcgcccccgacggcgacctgctccgccgcgctcaggagaagggcgtcaatctgctgggggccggacaggatacctttgacaccgccgcccgtttgtccggggcgctggctgccgggtaatgcctcctcactcgatatcattttgttattttaaaagcaaattctacacaaagtatttccgcgatttttacctacactcctgcctgtcgccccacccggcaacgccgggcggggacccccttttgcttcctcgggcggagtgaatccgccctgcggcgaggttttcgcctccgcgaaaaccctcggcgcgccttgtggcgcgcttcgggcgataggcacgatgccgttttgttatcctgaaaaggagttttacatgaagtattactacgatctccaccttcactcctgcctgtcaccccacccggctcagccgggcgggggccccttttttctccctcgggcggagtgaatccgccctgcggcgaggttttcgctccggcgaaaacgctcgggcgcgccttccggcgcgtttcgggcgacaggcacgacgccttcccgttatctcgaaaaggagttctacatgaagtattactacgatctccacctccattcctgcctgtcgccctgcggcagtgaggacatgacccccgccaacctggcggccatgtgcgcgctggcggggctggatattgtggcccttaccgaccacaacacctgcggcaactgcgccgccttctgccgggcggcggaggagcgggacctgctggctctggcggggatggagctgtgcacccgggaggagatccacgtagtctgtctcttccccaccccccatcacggggaggagttcgaggcgtatgtatcccgccgcctgcccccgttgtccaatcaccccgccgtctttggccatcaaatctatatggacgcgggaaatctggtgttgggagaggacccccgcttcctcgccggacacaccgacatcggcctggaggaggtatcccggctggccgccgcctttggtggagctgcctttcctgcacacatcgaccgcccctccttctctcttctgggggtgcttggcctgtggatgccggagctgggattcccgctggcggaagtatcccgccaatgcccgccggagttccgcctccgcccggatctggccgggcttcggctcatcaccaactctgacgcccactacctggatcaggtctgggaggcggagcacaccatggagctgccggagcggacggctgccgccgttctctattggctgcagggtacaaggtaaatttttctctttacaaacatagttagatgtgttatactcgttttcgttaaagatttaacaataaagaaccgctttcctgtgcatggtctgtattcgacgccactccgatacgcccgccctgcccaacggagcggtttttttctacccttcattttttcttgggctaatttttgaacttaatagttcatatttcgccattttggacagtctttacaagaaatgatttggcgatataatagaaaaagcgaaactaaactaaccagtttcagaaaggaaggacgcatccatgccaaactgcaaaaccgtcgtcccctaccgcggaagcccggaacaggaggagcgcctgcggcaggtgatcgccgagcacaggggacagccaggtgccaccatgccggtgctccaagccgctcaggaaatcttcggctatctgcccgaggaggttcagatcatggtggccgaaggattggacatccccctgtccgaggtgtacggggttgcctcgttctacgcccagttctccatgaaccccaagggaaagtatcagatctccgtctgtctcggcaccgcctgctatgtcaagggcgcggccgccgtgctcaacgccgtggaacagaagctgggcattgtccccggcgccatcaccccggacggcaagttctccctggactcctgccgctgcgtgggcgcctgcggtctggccccggtcatgatgatcaataatgacgtctatggccgcctcacccccgaccaggtcggcccgattttggatatgtataagtagaagcgcggagcgcccgggagcagggcaacagcgaactgcgcagatcaaaaaacaggctggccgcaggccagcggcatttttggcggagcagtgagtagttgcccgctgcggagggcgcgcagcgtgacaggaagcgcggagggtaggcgcataggggagctaagaggacatggaggcgaaaaaacaggctgggcgaagcccagcggcatttttcgcggaatggccgcttagcgacccggccatgcgcccaacccgcagcgtgacagcgtcggcctaagctttggatcattcgcttccgggcaggcccgaacgctcactcccgccgctgggcctcctttccccacgcgaaccgcttcgctgggttcgtgcggggccccgagcgcagggcgtaccccgcgtcgggaggtagggcgggtgcccacacccgcccgcgggccggcggcgcgttcaggaaaacgctgcggcaggccggagaggacgggcggccacaagggccgcccctacggcgagggtggaggatagctgccgcgggccgatgagggcagaaggcgaattgccccgcaggggcaagagaggccgtcctggggtgtcggcccctacggaggatatcttcaagggctgtaatgtaggggcggggcttgtccccgcccgtggagccggaaggctctggttttgactccaaagcgccgcaagggagggaaccccatgaaagagatcgccctctataccctggatatcgcccagaattccatcaccgcccaggccaggcgcctggacatcaccctgacggaggaggggaagaccatcaccctttccatccgggacgacggcacgggcatggccccggagctgctggcccgggtgagcgaccccttcaccaccacccgcaccacccgatccatggggcttgggctgcccctgctgcgcctggtggcggagcagaccggcggctccctgtcgattgaaagtgcgctgggggttggcaccgccgtcaccgccgtttttgtcgcctcgcacatcgactgccccccggtgggggacatggccggcacgatcaccctgctcatccagggcgcgccggagctggaactgcactatacgcaccggaggggggacgccctggcccgcctggacacgaaggagctgcgcgccctgcttgggccggagctctccctggccgagccggagctgatcctctggatccgggattacctacaggaacaggaagcgctgttacaagagcagaaggggatgtaaaaccatgaaaagtctagcggagctacaggccatccgtgataagatgcgccagcagattgatttgcgggactccggggacgaccgcatccgcgtggtggtgggtatggccacctgcggcatcgcggcaggagcccgcccggtgctcaacgcctttttggaggaggtcgccaagcgggagctgaaaaacgtcaccgtgtcccagacagggtgcatcggcgtgtgccggctggagcccattgtagaggtgtacgtgcccggccaggagaaggtcacctatgtaaagatgaccccggacaaggtggcctccatcgtcagcgagcatctggtcaacggccgcgtggtgaccgagtacaccatcggcgcggcagaatgagggagggcgtgagatgagcttgattcgttcccatattctggtctgcaccggcaccggctgcacctcctccgagagtcccaagatcatcgcggagtttgaaaagcagctggccgcccagggcatggacaaggaggcccaggtggtgcgcacgggctgcttcggcctgtgcgccctggggcccatcgtcaccatctaccccgagggggcgtgctacacccacgtgacggtggacgacgtggaggagattgtctccgagcacatcgtcaagggccgcatcgtcaagcgcctgctcaacaggaacgaggggggcgacggcccggccacctccctagccgagacccggttctacaagcaccagcaccgcatcgccctgcgcaactgcggcgtcatcaacccggagagcatcgacgagtacatcggcgtggacggctacgccgccctgggtaaaatcctcaccgaacacatcccgccccagcaggtcatcgacacggtgctggcctccggcctgcggggccggggcggcgcgggcttccccacgggcaaaaagtggcagttcaccgccgacgcggtcagccccgacggggtcaagtatgtgtgctgcaacgccgacgagggcgatcccggcgcgttcatggaccgctcggtgctggagggcgacccccacaccattctggaggccatgaccatcgcgggctacgccgtgggggcccaccagggctatatctacgtccgggccgagtaccccatcgccgtcaagcggctggagaccgccatccggcaggccaaggagtacggcctgctaggcaagaacatcttcgactccggctttgacttcgatctggaactgcgcctgggcgccggtgcctttgtctgcggcgaggagaccgccctcatgcgctccatcgagggccaccggggcgagcccaagacccgcccccctttcccggcggtgaaaggcctgtttgaccggcccaccctgctcaacaacgtggagacctacgccaacatcacctggattttcaaccacggccccgaggcctacgccgccatcggcaccgagaccagcaagggcaccaaggtcttcgccctgggcggcaagatcaccaacaccggtctggtggaggttcccatgggcaccaccctgcgcacggtggtggaggacatcggcggcggcgtgccgggcggcaagaagttcaaggccgcccagaccggcggcccctccggcggctgcattcctgcctccctcatcgacacccccatcgactatgagtccctcagcgccatcggctccatgatgggctccggcggcctcatcgtcatggacgaggacaactgcatggtggacatcgccaagttctatctggagttcattgtggacgagtcctgcggcaagtgctccccctgccgcatcggcaccaagcggctgctggatctgctgaccaagatcaccgagggcaacggcgagccggaggatctggacaccatcgaggagctgtgccaccacatcaagcagtccgccctgtgcggcctggggcagaccgcccccaaccccgtgctctccaccctcacccatttccgggaggagttcgaggcccacatctacgagaagcgctgccccgccggggtgtgcaaggcgctcatccagtacatcgtggatcccaccaagtgcaagggctgcacccgctgcgcccagggctgccccaccggggccatctccggcgcggtgcgcgcgccccacatcatcaaccagtccaagtgcatcaagtgcggcgcgtgcatggatcactgccgctttgatgccatctacaagcagtaagggagggaacggacatggacgaaaagatggtatctctgcgcatcaacgacatccccgtcaccgttcccgagggctccacggtgctggaggcggcccgctccgcgggcttcaacatcccgtcgctgtgtttcctgaaggacatcaacgagatcggcgcctgccgcatctgcgtggtggaggtgaagggagccaagagcctggtggcctcctgcgtctaccccgtggccgaggggatggaggtctacaccaacacggagcgggtacgcaagtcccgccagctcaccctggagctgatcctctccaaccaccggatggactgcctcacctgctcccgcaacagccactgcgagctgctccagctggccggcgacctgggcatcgacgcggtgcggtacgccaacgacaacatgcccccccagattgaggcctccgccccccacctggtgcgggacaactccaagtgcgtcctctgccgccggtgcaccgccgtgtgccgcaagacccaggaggtgggggtcatcggccccaacgaccggggcttccacacccacatcggctgcgccttcgaccgggatctggccgaggtggactgcgtctcctgcggccagtgcattgtggcctgccccaccggcgctctctccgagaaggacgacaccgcccgcgtgctggccgccctgaacgaccccgccaagcacgtggtggtgggccccgccccctccatccgggtcaccctgggcgagtgcttcggcctgcccatcggcaccaacgtggagggtaagatggtcaccgccctgcgccgcctgggcttcgacaaggtgttcgacgtggacaccgccgccgacttcaccattctggaggagggcaccgagtttttaagccgcctcaacggcggcggcaccctccccctcatcacctcctgctcccccggctgggtgcggtatctggagcagcacgcccccgacatgatccgcaacatctcctcctgcaagtccccccagcagatgttcggctccctggtcaagacctactacgccgagcaggcgggcatcgacccccaggacatcttcgtggtgtccatcatgccctgcaccgccaagaagtacgaggtactgcgggaggagcagcggctgcccaacggctgtatgccggtggacgtgtccctcactaccagggagctgggccgcatgatcacccaggccggcctgctcttcgagcacctgcccgacggggcgttcgatcccatgctgggcgtctccaccggcgcggccgccatcttcggcgcctccggcggcgtcatggaggccgccctgcgcaccgtggtggagcagctcaccggcgcgggcatggcccctctggagtatcaagaggtccgcggcatggagggagtcaaggaggccagttatgagctgcccggcaagaccgtccgggtctgcgtggcctccggcctgcacaacgtcaagcgggtgctggacggcatccgggacggctccctccaatacgactttgtggagttcatggcctgccccggcggctgcatcaacggcggcggccagcccatccagcacgccaacgtgcgcaacttcaccgacatcaaggccctccgggccgccgccctctacaggcaggatgagggcatgacctaccgccgcagccacgagaacccggtagtgcagaaggtctacgccgacttccttggtgagcccggcagccacaaggcccacgccctcctccactgctcctatatcaagcagaaacgctaccgcgtgtgacaaagcgcccgccccccagcccatg

SEQ ID NO: 4302 - DNA, 15418 bp, Unknown
  gut microbiota DNA sequence
gtgccgatctggaagttctgatagctccgctgggtctgcgcgccccagtagcggtccgcaggaacctccatctctcccatcgagtcccgttctatccggtagtccatatgtggctctcctttccttattcgctcattttagattatacgggatgtgtcaaatcccccggcccagaacgagccgggggattcgggtcatcggagaatgggaacggtctggcgcatgagattggcaacggcatcatcctttagcttccagagggtcctgcataacacacacgcctgctcctcacccaataccgggcgggtacagcgcaggaatttctcctccagcgcctgatccgaaatgggatctgtccggtgtcccacgggataaatgcgctctgtatggtactctgtgccatccaatagggtgacggatacgaaggcaggtcctactcccatatccactgggagcgcatcataccgctccccatggcaaagatgagtggcttttataatccgttggatatcgggccggaagataatcttctctgtataattgtccggcatgttgtccaacccgctcaaatagagggccacctgaaacccaacgctgaacttggcctcatctccggttctgggttcgggcgtcaccagctcacgcagagcggccgcactcagttccacccggatggaggcgatgtcctctggttgaaaatgatgtacttgcgccaaatcaacaaaggcatccactgcacggtgggtactgctacaggagggatactgtttaatcgcaaacccgggggtgcagacatcgtatcggtttcccagggtcttgtaccagtctgaaccaaacgggtcaaggcgaagcccggaatactcgtagaggtagccctcccggccgtccagggcggaggaggaggcggtacagccttcccgggccagacaggccgccagaagtccatccgcagccgccttgccgatatgaagcgacttggtgtccgtcccgaagttctcccgcacaccagccgccatggaggcggcaattcccaggcagtttacaagttccttttccttcagtttcaaaagatacgcggcgcccgcggcggctccaacaataccggtaacactgctggcatgccatccccgctcgtggagggcgtgagcgcaaagacgccccagcttgcactccacctcggtggctacggcgaatgcacgtatcagttcttcgccagggctgttcagttcttcccccagtgccagcagagcgggcagcacagccacggtggggtgccccagattggagctggaggtgtcatccagctccagctcgtggccgctgataccgttcaggaacgccgcatctcgcgcggaaaagcctccgccaattcccgccagagtggctttcccggcccgcggaataacccgcgcagctttttctaccaccccggtacggctgccaaggaccatagcccccacagtatccaggatggagcgggtgcagaggtagacctcctcctcgcccagcggtaccggatgttgaataaagtgtgcacaggcttctgacagcgtcatgactcctcctccctaattaatgcatcggtcagctcctccaatcggctggaggcccgcttcagtcgatcccctcgggccttccattgactgtccagctccttcagccgtccccctccccactggatcatttcagccacacgtgcaggactggggcctccgataaggctgcggcgttccacattctggacgggatccagagcggcgcgcagcagttcctccggcatgtccacttctaccccaagcgcctccaggcccgcccggtgcaggaggtcccggccaattgcctcacaggggatatgctcctcatgggccagaagcaccagcctgccgaccagcttcttggcggccgcaaaggacaggccctggctgcgtaccagctcgtctgccagctcggtcatggtggaaaagcctttgcgggtcatatccaaagcgcgctcccgatccacctccaaagtgcgtacaatcccctccaggagataggcgctgtccataactctctgcgcgatttcatagtacaggctgaccacaaagccgggctcccgcccattgcctggcgtataggctttcatggtgttgaacatcgtactcagggcgccatagctccattccccggaatagcgaagtgtttccagggccacggggttgcgtttttggggcatgatggtgctgtaggagcagtacttcaaattcaggcgcgagatgcccacctctcccatgttccacagcagcaggctctccgccattcggcccacattctggataaaaatacacatggcgctggccgcctcataggcgaaatccaggctggacgtggcgttcatagagttcagaagcaggccgtcaaagcccagcagctcggcaacccgctcccggttgatgggaaaaccagtcgtggcgatggccgcgccccccatagggctcaggttggtgtggtcgtaggctgccagcaggcgctccagatcgcgggcaaagttttcgaacgcacacagatagaagtgcccaagtgtaaccggctgcgcatgctgggagtggtgtgtatagcccggtataatggtatttttgtgctcctctgcctttcggagcagggtatccatcaggaaggaaaccgcttcacacatatccagcagtgtctttctggtatacatgcgctcaatggtcaagttcatatcattgcgggaacggccggtgtggaactttccgcctacttctatccccagttcctcaatcagccattcctccagattggagaagagatccgttaggcccggccggcggcctgtagcatccggtcccgcggccaggagcttacgcagagccgcagaaatagctctggcctccttgcgtgtcagtatgccctgctccaaaagcatgcggacgtgggcaaaatggttttccatctgcatggggaaggaaagcttgtcctcctgaatggtgtcctccgtatgacggttcagaatgaccatatcccggccgtcatatttgctgcgctccgcttctgtcatatcgcaatcatactcctttttctcatgcgttgttacttggactccgcggccttcactccccacagcctgcacgagaggaggtaaaatacgatcagcagagccagggcgaccaccagcataatccagatatttgcattggtaaagcccaaaatcaggtaggccacaaaactggccagcgccgcgattcccgcataggggagctgggtacgggtgtgctccagcaggtcacatccggcagccattgcggacatcaccgtcgtatcggaaatgggcgagcagtggtcgccaaacaggcagccggacagcaccgcgccaattgtcatggggatggacaccccaaaaccgacggccatattgatgccgatcggaagcaggatcgccatggccccccacgaagtacctgtggcaaaggagataatgacgcccaccaggaacagcagggcgggtaccacatgcggagtgatcagccccagcgtggaatccacaataaactgagaggttccaagatccttgcagacagagcccacgccccaggccaggaccacgacgaccaggacggagcccatcttttgaataccgccgatgaacacgtcgaaggtttccttaaagctcatcaacttctgggccgtaatcataatcatacatacgatagaggccagcaggtaaccggaggtcagggcaatgcggattttggagccgggaatgttctggaacgggaacccccaactgacaaacatcactaggatggtccccaacaggatcaccaggggcaggatcatattccagggagataccctcttgtcatcggataccaggatggcctcgtcgtccgcgatgttctgcggcagtcccagacgggcctgctcctccgccttggccatgaatccaaagtcatgtctgccgaacgccacgattggaatcaggaagagtgcaagaatggagtagaattgatagggaatcgccgccatgaaggtggaggcgtcagagccgttgatgccgagcgtttcaaactcggtcgcaataatgctcatgatatagacgccccagccggtgatgggaatcagaatacagactggtgaggaggtggagtccaaaatataggacagctttgccctggattccttgaggcggtcaaagatggggcggaacatgggccccagaatgaggctgttgccagagtcggaaaagaagatgaccagcccgcccagccaggccgccaactgcgcttttactttgctgttgacgctgtttgccacggcctttgcaaatgcccgtgccccgccggatttctcgatcagggctacaaagccgcccacggtcgccatcattacgatcgtctggggattgttgtctgtcgccagatcgacaaacagatagtcgctgaacaggtgctgcagggagagccaggggttggcgcccacttggatcatgatgccgaggaacaggctgattgccagggagagcactacgttgcgggtagcaaaggccaacacgactgccacaacagccggaatgagagacagccagccatagttgatgacttcttccataagaacctcctattcttcacgtatgatggttcaggcttccataatgcaccgggttacctccttctttcttttaatagtgcaaaccgtgtgccaaataaatttacattatcagggaaattaacagcatctttttcatattaagatcacaggggagcaaaaaatcaatgttataagagcgacaggcgacgaattttcgtcgcctgtcgctctcaatcatgggttatatacggttcaacgtcgccttattgacaattattcgtcttaaatgacgattttttgtcattcgatcattaacccatacttacgaatcttatactgcagcgtggttctcgggatctgcagaagtgccgccgcctccacaattttgccgccacaggacatcaatgcctgcaaaatcagttttttctcatacaagcccatagtttccggcagtgaaagcgttggctccgtattcttctgatgaatttccggaggctccctcatggtcaaataagcgggcaggtgctccagagagagcacgcttccctctcccaaaacattgagtgccgcttcaatggcatgctccaactcccgcacattgccgtgccatctgcaattgctcagaaaaagaatcgtctcctgggccatctgggggaccggccggcctaacaccctgctgtacttataaaggaaatactcggacagcaacgggatatcgtccggccgctggttcaggggtggaatcgccaatgtcacggtgttgaggcgatacagcagatcgggacgcaattctccattccgcaccaactcatcgggtggacagttggaggaggagacgatacgaacgtcaacggcaataggctgtgtacttcccaacggcatgacctgtttttcctgaagcactctcagcagctttgcctggagattgagcggcatggagttaatctcgtccaaatacagagttcccccatccgcctcctgaaaaaggccttttcggttttccgccccggtaaaggccccctttcgggagccaaaaagcagtccttccaaaatactctcgggcagagcggcgcagtttaccgccacaaaaggcttggccttccgatagctggcattgtggagcgaggacgctaccaactccttgccggttcccgtctctccacaaatcaatacagaggatgtgctgttggctacctttccaatcgtctcctttaaacggagcatccctgaattttgggttatgatatcggtcaagctgtagcgggccgcggcactgcggggggcaggcggagtctgactgggcggtacggggtgaatacgattgtcaatatgtgtgatgtctcgtgaaatttccacggcacctacaattttgccccgaaaaataatcggaaaattcagattgttgcataccgttttcctgccctggagattccatgcctcctgattttcaatgtatataatttttccggtatgaagaacctgcagcagcgtgctgtcttccggacttaaagaggggaagagctccagcaagttcttgcccagcgcccactgattatgagccagattctcttcatccgtatagcgtggattaaacctctgctttgcaataattctccccgtgctgtcaatgacggtgacagaatccacatagttcaaattttcactcagccatcgcatggcgatttccttggtgtccacgccttcagcctcctctgctttgcaaataaacagttctgctcctttcccgctatcatagcatagacccaacacagcggcaagcctcacgcctgcacttctgtcaactttacctattccaccgatggtatgtcagccatgagaccatacaagtaccggtatggttggccgcggaggcgcttttggactccggatgcgtcgcgcatatgtgggaatctgaaaaggaaaagaaaccccgccggaacccaaggattccggcggggttctggtctcaacgaaaacccactcactgacaggcgctattctccagctcgataatggcgccgcggtccgcagagctgacgtgggcggcgtatttggccagagccgggccgcgtggcttgaccagaggcttccagacggcccggcggcgctcaagctcctccggggagaccttcagctcaaggcggcgggccgcgatgtcaatgaaaatttcatcgccgtcctccaccagggcgatggggccgccagcggccgcctccggggagatatgcccgatgcaggggccatgcgtggcgccggagaagcgcccgtcggtgaccagggcgcagtcctcgtccataccccggcccatgatgagggcggtggtggagagcatctcccgcatgccgggcccccccttggggccctcataccggatgaccaggacggtgcccttctcaatggtcccggcgctcaccgccgcgtccgcctcctccatggaattgaacacccgcgcccggccggagaaccggtacatggagggcttgacacccgactgctttaccacagccccgtcgggggccaggcttccgcagagcacggcaatgccgccctccggcttctgggggtgctccatggtgcggatcacgtcgttctccacaggctccacggcgtccagcatctgacccagggtctttcctgcgacggtcatcacgtcccggtggagcttgggctccacgtttttcagcaccgctggaatgccgccgcaggcgtccatggagacgatggggtatttgccggagggctggaggttacatacgaagggcacctcccggctgatgcggtcgaagtcgtccagtgtcagctccacgccggcctcgtgggcgatggccagcaggtggagcaccagattggtggaggagccggtggccatggcccccgccacgccgttgagcaaagcctcccgcgtgaggatttgccggggggtgatgccccggcgcagcagctccatgacctgccggccggactgcttggcgatgcgcttgcggcggttggataccgccggagcggtgccgcagccgggcagggacatgcccagcacctctgtgagcatacacatggagttggcggtacccaggtgggcgcagcttcccacggtgggcaaggcggcctcctcggccttcttcatctcttccacggtgcagctcccctgctccacccggccggggaattcccgcagctcactggagcaaaacagagggttgccgcccacgttgccgggcagcatggggccgccggtgaccacgatggcggggatgtccagccgggcggcggccatgagcatgccgggtatgatcttgtcgcagccggggatgagcaccatggcgtcaaagtggtgggcctgcaccaccatttcgatggagtcggcgatgagatcccggctgggcagagggtagcgcataccgcagtggccctggcacaggccgtcgcagatggcgatggtgccggtctcgcgggggatgccgcccccctccaggatgccgtatttcacctgctcggccagttcccgcatgtgcatgtggccgggaaccatctcgctgaaggagttgatcaccgccacaaagggctttttcatgtcctcctcgtccatgccggtggcgtagagcaacgcccgctggccggtgcgggccaagccgttggtcagctcactgctggccaggccggggttcttgagctgaaagtcccagtcacaatccatatccgcctcccattaagccagcacgccgatgggccagggcacaaactcgttctcgcccacgcccagcagttcgctcttgctcctatcgccagaggccacttggaggatacgctcaaagatgagctgccccatctcgtccagatccttttcaccgtcgatgatgaccccgcagttgatatccatgtccccctccatccgctggtacatgggggtgttgctggccagcttgagcacgggagagggcacaccgccgaagcaggagccgcggccggtggtgaaggccaccatggtggcgccgccagccacctggccggtggtggccacagggtcgtagccgggggtattcataaagaccaggccgtgctcggtgaccttttcggcgtagtcgtacacctcgttcagggcggtctcgccccccttcttggcgccgcccagggatttctccagcacattggccaggccgcccttgttgttgcccgggctgacacggccgttgatctggcagtccttgccctcgttgtacttcagccaccagttgatgtgatccaccagcttctgccccacctccggcgtacgggcccggcgggtgagggtgtgctccacgccgaagatctcagtggtctcggagaggatggcggtgccgccgtttttcaccagcaggtccaccgcccggcccagggcggggttggcggacaggccggagaagccatcgctgccgccgcactccagggccagcaccaggtgctcggcggagacggtctgccgccggcaggcgttgaccacgggcagcagctgctccaccctgcggatgccctcctccacggccttggcggtgccgcccacgtcctggatcaccagcttctggagggtctcactctcctgaagaccggcgtgctcaaacatgccgtcgatgttgttgcgctcacagcccagggccgtcacgatggccgcgcccagattggggttggtggcatagcccatgatggtgcggcggagcagatccatgaagggaccggtcatctccatgccgcagcccaggccggtgacgaagggcaccactccgctgacgttggggtaggcggccagacgctccggggtgaagtggttggcgatcttccgggccacggtggcggcgcagttgctggccaccagaatgccgatgtagttgcgggtggccacccggccgtcggggcggacgaagccctggaaggtggcccgctgctccgggggcaggagctcggtggggtgatagtcccggctgaaggcgtaatccagatccacgtgctcaaagacaatgttgtggctgtgcatcatggtgccggcgggggtgtcctccgctgcaaagccgatgcaggtgttatacttgagaatcggctcccccttccggatgtccctggccgcagccttgtagcccgcgggcacctcggtacgggtggtaaagccctcgctctccactgccatgccggcgggcacgtcccggcgggccaccaccacattgtccttctggttcaggcgaataaaaggagaaatctcccgtttcataccgcatacctcttttacaatcggatgggactgccccgcccacgggcgaggcagtccatgtgttcttgtgggagaggggctcaggctgccgcgttggccgcggcccacagatcctcatactcagtctggatatccgccagctggctctcgtagtcggccggggacaggtaggtaggctcgttgcccagatccaggatggcctgctgcacctcttcgtcctccatcagctctgccactgcggtatcaaaggtgtcctgaatgtccttgggggtgtccttgggcaggaagaagccgaattcatatccattgtagagccaatccacgccctgttccttggctgtgggcacgtcgggatagactgcgctgcgctcctcggccgggaagcccagggccacaaagtcaccggactcgatatagcccttggccgtagagtactggttgggcatgatatcgatatggccgcccagcagcgcggtgcacttgtcggagttggagcccacatctaccaggttaaactgcacgccggtggccgcctcaaaggacttgaccatcatgtaggtaaagccgcccacctcgacgcccatggtgacctctccggggtgctccttgcagtaatcaatcagctccggataggtgctgtagggggcgtcggcgctgacatagaatccagtggcattgtcggtgaccacgtggggccccacagcgaagccctcgtaggagtagtcggacacgccggtgacattgttgatcagcagggcattgtggaagaagaggatggtgttgccgtctggggcggcctcatgaacctggttgatgccgctggagccgccggcgccggtgacattgaccaccacaaaggactgtcccaacttggccgtcagtttctcggccagaacacgggccagcagatcggtaccgcccccggcgctggcagggacaacaatggataccgggccggagggccaccctccgcctgaggcggagcctgtattaccggcggcatcaggggattcggtgttctcgctggtgctgccgcagccggccagcagggttccaaccagagcggctccagtgataagggcaagcagtctctttttcatgggaaaatcctccttagtgaatattgatttcgatctcaatgggctcaagccgcacccgcagtctcctttttgcggttgcgcacctgcttgattaccgtccacaccacgaacagcaccgcggccaccataaacacagcggcgatggggtgggtgaagaaagccaaaaagtcgttctgggtcagcatcaggccccggcgcaggttggtctccagcaggtcgcacagaatgaagctgaggatgaaaggagccacggggatcttaaacttgctcatcaggtagcccagcacgccgaagatcacgatggactgggcatcaaagatacggttgttggtggcgaaggcacccacggtacacagcaccagcaccacagggagcaggatgtactttgggatactcagcagacggacaaaaatccgcatgccgcccagctcaagcaccagcatgaccacgttggccagaatgcaggcaatgaagatggtgtagatgaggtctgcggactccacaaagagcaggggtccgggggtgaggccgtggatcataaaggcccccagcagcatggccgtcacaccgtcgccggggatgcccagggtcagcagggggatgagggcgccgccgatgactgcgttgttggaggtctcggaggccaccacgccgtccatgatcccagtgccgtacttctccgggtgcttggaggtctttttggcggtcatccaggagagaataccggcggtggagcccccgatgccgggcaggataccgatgccggtaccgatgagggcggagcgcagtgcgttccacttctgccccacgaactcattccaggtgaatccgaagccctttattttaaagctctgcttgatctgagtggcctttcccatctttttgacctcttcagcgtaggccagtacctccgcaatggcaaagatgccgatcagggtaggcaggatgtcaaagccggaggacagttcgttgataccgaaggtgaatcgcttggttccatcaatgggcgccatacccaccaaggcaatgatcaggcccaggcagccggagagcagtcccttgatcatgctggtgcccgccagggcggcgatcatagagagggcaaagaggcacacgccgaagtactcgatggcggaaaacttcagggtaatctgcgccacggaaggggccacgaacataagcaccaggaaggagaacaggccgcccaggaaggagaataccactccggtacccagagccttgcccgcctcaccctttttggccatgggggagccatcgaagcaggtggcgatggaggaggaggtgccggggatgttgatgaggatggcagagatcaggccgccggagatcccgccgatgtagagtgccacgagcagggtgaacgcctcatgggcctgcatggcgaaggtgaccggcaggaagagggccaccgccatggcggcggacaggccggggatggagccgaacacaatgcccaccgcgacaccgacgatcagcagcagaatggacatggggttcatcatcccggcaaatgcgtttccaatcagggataaggtttccatcagttgcgcctccttttaacccagtatgccggcgggcagcatgacattcagaccgaaccggaagataaagtaaaccgcgacgcacaccacgacggcgatcaccgcgaacaggatgatccctttgatgccccgcttctctttgggcgccaggatagtgatctgtgcaaacaggtacacgatggagctgaggaggaagcccgccggctcaatgacaaacacatatacggtgaatgccgcgatggtggccagcacccgcaggtactccggcctctcctcctccgctccttcattcggctggaagcttcgcatggtgcggaatccggcacggatttgaaagaaggagaggatgcaggtaatgatggccagaatcttcggcatgaagtcggagccaagtccccccatcaggctgggcggcagtgcgctggccgccaggaagagggcgatggaaagaatcaggaagaatacgcccgcagccagatccccgaactttttcaagaacattgctttgatccctcatttctctgtttgtcgttccacagttgctgtctcatccggataactttattatacacgggcacaccgtatgtgcactgtgacggcaacacaagaatcaggcgctatcttatgtctttaatacattttcacaaatacagcacataagagcgcgcacctctttgggcactattgcgctagtcccccggattcagaaccggctgcaatctaccttttcccgggcagccatagagcatgcctcgccctccaccaccacctcgcccctctgattgacggcggtggccttcataacgatgcggccggggctgaactttaccgtgccgtcgggtttggtgacctcctcgccctttttgaccacctcaaaggtggcggtgatggtgtcccccgcgtagaccggcctgaggaagttcaggctctggcgcacatagaggctgcctgcgcctggcaggtaattgcccgccagggtgctgaacagggcgccggacaggaagccgtgggcgatgcaccggccgaaggggctctgctcgccgaacgccttgtcgatgtggacggggctgtagtcgtccaccaggccggcaaaggcgtagatgtcgcccctggtgatggtcttggtgaccgacgccttctgccccacatagatttcatccagagtaaagctgttcatcgtgttttccctctcaatcctggagcacaagccccattttttccgggcgaaaaatccgcggatccatctccttcagatcggccgccacagcaggccggaagcccatcagtggatagatgtcccgctccagctccgcgccgggggccacctccacgagggtcaggccttggtcggtcaggcggaataccgcccgcgccgtaatgtagagcacctcctggccggtctcccgcgcgtaatcgccggagaaggtgatctgctctacctccgggacaaacttgaccacattggagtccttgacgatgttcagccgtccgttttccaggcggatatcggtgtccttcaccgaggagaaggtgcccataaagcagattttcttggcgttctgcgtgatgttgatgaagccgccggggccggtcatccgcccggcgaacttggacacgtttacattgccgtggcggtcgatctgggccgcgcccagataggcgatgtcgatgctgccaccgtcatagccgtcgaaaatctcggtgtgcttgacaatggcctccacgtcggcggaggcgccgcagccgttgccgggggctggcacgccgcccagtgtgcccgactcgatggacagggtcatctcgccggccaccccctcctcgccggccacggaggccacaccgtcgggcatgccgaagcccaggtttaccaggcagtccctccgcagttccatggcgccccgtcgggcgataatcttgcggatgcccagctccattggctccagggcacccatgggcaccctgacctcgccggtccactccggatggtaggggatggcgtcgaagtagtgctggcggctgtactccggccgccccaccaccacatagtccacgaagcagccgtggaccttcacgctgcgggggtccagggtgttgtcctccaccagggtatccacctgggcgatgacggttccgccgttgttcttggtagcaagggccatctctaactgctccagaaacagcccttccttctccatggacagattgcctcggctgtcgccgtaggtggccttgatgaagcacacatcggggggcgtcagcttgtagtggagcagccggcggccgtcgatctcaatgctctggacgatgcctcggccctcagtgtgggctttcctggccgcgtcgttgaagcagcatgcctccacctccgggtcgcagaaggtcttgaggcccacgtgggtaatgacgccgcacttgtgccccgccatggcccggcacatatgaaccagcaccccctgaggggcgcaaaaggtctcgatctggttgcccgtgatcagagggttgatcttgggagccagacctacgtgggcgcccaccatacgccgcaccagccccgcgtgggccaggtggttggcgccatgttccccgccgtcgccgatggcggaggtgtagaacacgttcagatcccttgggtggccctcggccagaaagcgctcctccagggagaccagcagctcctccggaaccgacagtgtcacgaagcccagcatgcccagcgtcattccgtcctgcaccagggctgcggcctcctgccgggaaatcactttacgcaatgtactcactcctttgtcaattgggcggcccgctccctgcggatgccctcatagagcccctgggcgtaggccgcccccagggcccggtcaaacagaccatagcccgcggcgggccggacgccgtcccatccgtccggccggtgctctctccgccggacgccg

SEQ ID NO: 4303 - DNA, 55188 bp, Unknown
  gut microbiota DNA sequence
gtagaaatcgcccccaggctcccgctggacgttgcggaagtggacaaaggggagcttccccctggaaccgaattcccggatcatggcgggcagatcgttgtccgcgccggagcccagggagccgcagcagaaggtgatggtgttgctggggctgtccaggtcgggggtgaagaggatgcgccggtagtccgcggcgttcttggcgatgcgcggcaggccgaagatgggccgcggcgggtcgtcggggtggagggccagcttgacgccgcactcctccgccaccgggagcaccgcccggaggaaatagcggcagttgtcccacagctcctcctccccgatgccccggtagctgtgcagcagggcctggagctccgccggagtgtggttggtcccccagccgggcagctcaatgcccctctccgggtccacggcccgcaccttttcctcctcaaagctcaggcagtccgagccgtcggggaggacatgggccagatcggtacgggtccagtcaaagaccggcatgaagttgtagcagatgatccggatgccgcactccgccagcatgcggatgtttttccggtagttttcgatgagggcgtccctggaggcatagccccgcttgatgtcctcgtgaatgcggaagctgtccacaagctcaaacttcaggccgtgggcctcgatctgctccttcaggcgcagcacctccgcccggtcccacacctgccccaggggcagatgatagagggaggtgacaatgccgtacaggttgggaatctgcgcgtactggcgcagggagatggggtccttctccccgtgccagcggagaatcaggtgcatgtcctccatgggggcctcctcagtacgcggaggaggcggccaccgccccgcccccgcgtacctggctcaggaagctcctgccgccggacaccatgtactggttgaccgcggtgaccagatagcgggccccccactcctcggcctgtctggccgcctcaggcgtgcccacgtagtagccggcggtctttcccgcggccacgatacggcggatcatccgctcggtcagctccagcattttggggctgccggcgggctccccgtaggaggcggccaggtcgccggggccgatgaagtagacgtccaccccgtccacctccagaatcccatccaggttctccactgcctggcgggtctccacctggcagcacaccagcttggtgtcgttggcctgcctcaggtaggcccgcttgtcctccaccatgccgtaccgggcggcgcgggggaggtaggcggtgccccggcgcccctggggggcgtagttggccagctccaccacccgccgggcgtcctcggcggtgttcaccagggggagctgcacgccgttggcgccgaagtccagggccttctggatgtggtcgtactccttcatggtgcaccgcaccaccgcgggcaccccccgcagctgggaggcccgcaccatgtccgccagggtgctctgctcgatcaccccgtgctcgttgtccagcagcaggaaatcaaagcccatcagggccgtgacctccgcgatgtccggcaggccgtaggtcacaaagcagccgtacagcgtccgttccttcagcgcctctttccacggcgtcaggttgtccatatccgttcctccttttctcagcgcagggacgcaaaaagggacgcgatgtcctcccttgtggccttgcagatgtcgtttgccatgttgcccgacgcggcggcgttggccgccagctcgtcgagggcctcctgcgtatcgggcacgcccatggcggtcagggtggtgcgcatgccggtgagctccttcagctcggccaaccggtcggcggccgcgttggcgtcggcgaagcccatcatgcggctgagggtgtggagcagcgggcgcaccgctgcgtccttccggaaccaggcatccagggtgagggcgcaggcctcgccgtgggggatatggtacttggcggtcagcaggtaggagcaggcgtggctgccggtggtgcccgtattgctgaaggcataaccggcgatggtgctggccatggccatccgctcccgcgccacggcgtcggagccgtcccggaaggcggcctccaggttctcaaaggccagcttggcggcccggacggccaggccgtcggacaccgggttggcccggaccgagcacatggcgtccaggctgtgggcgatcacgtccaggccggtggaggcggtgacggcggggggcacggtgtaggtcagcaccgggtccaccagggccagccgggggaacatggggctgccgaagatggcgattttggcgttggcggcgtggtcggagagcaccgcgccccagcccacctcgctgccggttccggcggtggttggcacggcaatgaggggcagcgcatcggtgacgggcctcccccgcagtagctccaggccggtgcagtccatggcggccgcagccgccgcggccttggcgcagtccatggcggagccgccgcccaggccgatgatggcccgggcccccagctccctggcccgccgggcacaggcgtccacgttgtcacaggtgggattgggctccacctcagagatgatgtccagcacgcggccgcccgcgcactcattcagccgcgcggccacgccgctgcggtgggtgaagggatcggagacgatcagcgcccggtccagcccccgctcggccataagctgtcccagctcatccagcttcccggtgccgaagaccacttccaccgggttgtaatacttccacatggcagcaattcctccttgcttgtcggtacagcctgacggccgttatctcgcctttgcataccttaagtatagcacggccccccaccctgcctaatgtgtcgcggtcacaaagttttgtgccaaaagaatgactgcggcactgatttatatcagcccgccgcagcgactgtctcccgccttgttccagctccatagaaaagctttgcaaagctgtgtcagcggcacattccgcccagcggtcagatctgtcatactggatatacaacatagagcgccccgaccggcgcagaacatgaggtgaagcaattgaaagaatttcgccataccgttatctaccacaccgactgtgcgctcccactgtatgacgaggtggacgtcctagtctgcggcggtgggccggccggcattgcggcggcctccatggccgcccggcaggggcgctccgtccttctggtggagcggctgggttttctggggggcgcggcagtggccggtggttccggcacggtctgcggtacatttctgtgcagtgacacgccggaagccgacggcccccgccagaccgtcttcggctttacagaggagttcctccaggccatgcgcgcccggggcggcgtgacgcccccgcagctctacggcaagacctatctcatcacccacgatccccaggtctataaagaagtggccgaggagctggtgctgggcgcaggggcgggcatcctctatcataccaatattttcggcgtcatcaaggaggagaatattttttatggggtggtaattgataccaagagcggcttggcccagatccgcgccaaggtgctcatagacgccaccggcgacgcggatctggtctacagggcgggcggcggctacaccatgggggacaacggcaccatccagaatcccaccgccatgttccgcttaggtggggtggacacggcgcgcttctccgactactgggggccggacactatcagtcccgactgtgtgacggagctgctccacgaggccaaccgccagggctggcatctgccccgggtcaaggtctgggtctttcctactccccggcccggtgaactgctgatgaacactaccctactgaccggccgggacggccgggcgctgaacgtatgcaacccggaggaccacactgaggcggagatcgtcggccgccgccaggtacaggaatacgcccgcttcttccgggagcatattcccggctgtgagcacagctttatcaacgactgctctcccgaagtgggcgtccgccaaacccgcagcatccgcggcattgcacggctcaccaatgacgacgtggcccatgcccgcaagcgctccgacggcatctgtcgctgcccctggcccattgaactccacgccggtgaaaagccctacctgttctggctcatcaacgattactacgaggttccctacggctccctggttccggaaaccggcgagcatctgctcgtggccgggcgcaacctgtgcgccgaacaccaggccctggcaagctgccgggtcactgcccagtgctttgagtatggacacgctgccgcgctggcggccgacctgtccatccggcgggatctgcccctgcgtgagctgtccggcgctgaaatccgcgcccgtatgaacgaaaacggcgcccgcctagactaaacctctatgtgaaaaggcgccctttcaggcgccttttcacatgcccggatacccaatcagttgtgctttctgcccagctatggtacaataaagggcaaaaagggaggtgccgcccatgatcaaccaggcctttgctgagcagtttatccgacgcatccgctcccagaccgactacaacatcaacatcatgaatgagcacggtatcatcattgcgtcgtgcagtgaagagcgtgtgggcaccttccacgctaccgccttccgcatgatcaccaacaacatcagcatcaacgtcaccgaggatctgaccgaggatctccccggcgtgacttcgcctggggtgaacctgctgctgcgggagaacctgatcccggtgggcgtcatcggcgtctccggcgatccatccaccgtaatgtccctggccaagctcatcaagctgtcgtttgaatcgctgtacgactacgaactccagcgtgaattcctccccactgcctccaccggcgccatgagccatctggcccgccttctctttgtggaccgcccggtcaacatcatgcgcatccgctcccaggccgctgaactgggtatcactgagcacgtcaaccgctatccccttcttattgagtatgtggggtgcgagagctccgaactggtgctttcccgctttgccgaggactacccgaattcccccagccattctcccaacgacctgctgttctgtatcggcggcaacctgctcctgctcttcaagcagattgacgaaactacggtggccacctaccgcaaccagatccgcctgtgtatcgaagaaatcgatgcatggtttgaatctcaggtgcccggacagaaaagccgctatatctgcggcacggtccagaaccgcttttcctattacggccgcatctatgaggatatcatgtggctgtaccgctaccgccagaagaaagagcttaaggtgtactttctagccgactacctgaccgaatacatgatgagccagatctccaccgagaccatggcccctctgttggacatctatgtacgcctgatccgggagcatatggatgagtccatctttcgtgagaccatcggcgcgctgatcgaaaccagtatgaacctgagcgaggcggcggagctgctctatctccacaagaacactgtggcagcccgggtcaagaaaatcaaagagctgctgggcatcagccccctgaccagcattcgggacgcaattttcatgactgccatctacaattacctcaatatggtttagcacattgtttccagtcgatgcccggcagggatatcctctccaggcactctggcagcgggcggcataaaacccgtcggaatccaaggattccgacgggttttatgccgcagagaggagatttaaaccttgggtcttcgaaccatgcggggccgccggcggatgcagccgatcctatcagagccttttttacaatgtaggcttgccctgccgtatatatcaagtaacataaatcacagctcctctggcttgaggtgcacgtcaatctggattctgcggttcagcatacggattatcccctcctcacatgacttattgagcggtttggagacggtgatgcgcgaacttatgatgatgatactcacgtcgttttgagtgtactgtatctgctggttgtaccaccggccgtccaccagttgggagcggtcggcagccatccggaacagctttagcagccgctccttatatgcgctaaaggtaatgcttttaaacccgtggcgcatgatgagcatcttttttgcgttatccataataccgcatctcgaaacagcgcagactcatccatagccgccgaaatgtgttgtgctccagtttatagagtgtcctctgtatgtccgcctttgatatgacagtacttggttcgtgcaataaattgaccgcttccccagctgggggtattccctttttgtcacgggatagaaaggggccgccggttctttgaaacaccggcggccctgttgaagggttgctttcaatccggggactacattccagcttatgtcttcagagcacagatgacagaggctcagctcccagtcagcgcacagccgatgggatatcctacgaatccaatgatcagagatgtaattacaatcatgataatgccgaacagatatatctggttgcggctgctgtactcgtgtccgtggagcatggcaatggtggcgaaggaggagggcagcaaataggcgcatgagccgcacatcgttgtcaccagggcaatgcccaccgcgctgatggctccgccgctgctggctgccagagccacacccaccgctgtcattaccgtgatagtggacacgttggaagcaaagttggtcatcaggacggagacagtggcgatgacaaacaccaccaccacaggcgccacgctttgggtgaggggggtaatattctgctgaatggcggccacgattccggtggaatcggcgctcatggcgctgcccaggtagacaccgatgctaatgaaaatcaggatgccccagttgatgctctggttgaccacagtcctgacgtccagcaggggcttgccgtcaatgtggaccaccgccattaccaccacggataggatcgcccagaaggtaatgccgaagctgttgaaagcattgacccaagcggtgtcgctgaacatcttaagcactccgggcagaatccacatgataacggtcacaaagaacaccactgcagtggtaccctcccgcagcgtcatggggccctgctttttgacgacgttctcaatcttgaagtccttgaatttggacatatccggacgggtcagcaggcgcaccgcgacgcacagcagaacgaacaggatcaggcccgtgggcacgccgaaggccagatagctgaacagactcaggctctcccctgtggccccctcataaatgccgatgcccagaatggccaaggagtgggagatgggggtcatggctccgccgatgttgacgccgaacactgtgaggatgttggccacatggggataggcatcccgactggtgtagcccagctctttgtagatgcgggagacaaacgccagcataaaggcggtggcgggcacctgatccataaagcaccccaggagcatgccgagcacacccagggaaatggtaaaaatccaggggcttttgctgaccagcttgatgctcataaatttggctaccagccggtcggtaaaaccggactcgttgagggcatgggtcatgataaagctcatcagcacaaaatagatgatccagttgccgatggagcccgcgatggcttcattgacggtgcatacgccgctctctcccagcagcacgatggccagcatagccggccacaccgtatccacaatggacagcatcaggataacgccgatgaagataccgatgacccgcataccgacggcggtcaggggcgccaccggcggagccacccagaaggcggcgatgaccgccaggcagaccagaattttgatcaacagggaggccggcatatagaatttctgcttttccattcgtctcttcctctccgtcagattgggcttaccggccgagcttcagaatttcgcgggcctcgtcgggggtggcgacctccatgcccagctcgcggatgatgcgcacggcccgctccaccatttgggcgttgctcttgagcagctctccgggggcgtagtagatgttgtcttccatacccacccgggccccgccgcccttgaggacggtcatcgccatgccgggaacgtgatgtttggcaccgatggagatggtggaaaagttcacaaagcggtccttaggcagcttcttgatcataaagtccaggttctcctcggagaaggagatggagccctggctgatgcggtccatacccatgacaaaggagagtgagacgggctcctccagcacgccggctggtaccagtacattgaacacgtcctccacgctctcggggttgaagcactccagctccggcttgatgcccatatcccgcattttccgggcgtacttgagcaggaaggggcgataccactcgtagacaaaggtacggtccccccagctcgtgccgatcagggagcagtccagggagcacatctcaggcttgaccaggtcggggtcgtacagcagcctcatgccgtcctcagcgcaggttccctcccggtttgcgggggcggtagagtactgaagaatggcattacacctggcccggatgcccgagccgatggcgctgtataccttgggatcattggtggacaagccctcttgatcccgggcgtgaatgtggataatggccgcacctgcattgtagcagtcgtacgcggaggccgcaatctcctccggggtcagggggatattgggatttgcctccttgccgtggaacgcgcccgtctgggccaccgtgataatcacttttctcatcgccataatatcgctcctctacacgttctcgtcattaggatgacgtccgtttgccccggcgtgaaggggaaaaccgccggagacattctgttcttaaagcaaacgcagggccaactcctccattcagcatttttcgccccattttgcctgctttttgagcaaaatgcgtatttagccggggcatcctccatcaaaaacatgcacttatgcgcatttttaggtttcatattgcgcaaaagcgcctattcgttgcagctcaacgaataggcgcttttgtgacgggcaccgggcgcaaaaaacaggcatttatgcgcaatgagcgccgctgtatgcggcagcggccggaggggccgccccctgtctcccgcaccgcttataatggattcttccatattggcatgcctcttgctgattccatgggcgaaggccccgctcggcaagcggggcgcggaacacagaaaggatgatgtgatgtggcgcagcggatcacagccgaggaagcggctgctctgattcaagataacatgacccttggggtgggcggctttggcgcctatgcggctccggacgagcttctatccgccctggcggaacggtatgagcgcctgggaagccccagagccctgacggcggtatgcggcatcagtcccggcagcaaccggcccgacggccgcggactggcccggctccgggctcctggcctgctggataccgtgatggccgggcactttgccaacccgcccgagatcgccgagctcatcggcaccaaccaggtggcggcctatgccctgccccttggcgtgatgctccacctgtggcgggcgatcgccggccacaagcccgcggtgctcacccatgtggggctgggcacctttgccgatccccgggtggagggctgcaaggcgaatcaaaaaacccgggctcagggccgggacatcgtggagttagtttcgctggacgggcgggattatctggcctacaagaccttccccatcgacgcctgcttcatccggaccacctgggccgacgaggacggcagcctgtccatggaggatgaaggcgtgggcgactatgccgccgaactggccgccgccacccacaacagcggcggcattgttattgcccaggtgcgggggatcgtcagccgtggctctctgccgcccaagagcgtacgggttcaccacccgatggtggactatgtggtggtcaataccgacccggccctgcatatgcagagctacgcggcccaactccgtccggagctcagcgggcagctccgccgccccaccgactccatcccgcccatgcccctggacaaccgtaaactcatcgcccgccggggagccctggagctgcggcccgactgtctcatcaatctgggcatcggcattccctccggggttggagtggtggccaacgaggagggcatcgcccagcgcatcaccctctccctggagtccggtccccagggcggcgtgccggtggagggggctggattcggttcagcggtcaacgccgaggccatctataccgtggccgatactcttgagctttatgacggcggcatgctggatctgtccttcctgggcgcggcggaggttgactgccacggcaacgtaaatgtctccaagttcggctcccgctgcaccggccccggaggctttgtcaacatctcccaaaataccaaacgcgtgttttttaccggaacctttaccgcaggcggcctaaaggaggaggtgcgggacggcaggttggttatactgcaagagggcaggagcaaaaaattccgccgtcaagtggagcagatcaccttttccggcgattacgcagtcaaaagcggccaggatgtgaccttccttacggagcgggcggtgctcaagctgacgccggatgggctgatgctcaccgaaatcgcccccggcgtggagctggagcaggatattctggcccagatggagttcaggcccctgatttccccggagctgcgtgagatggaccaccgcatctttcaggcgggccccatggggctgacactgtgagggggacgtttatggaaacccgggtcaaggcgccgctggccgcaaaccgtcggcgcgcccttctttttgtgctcacactggtgctccccgccctgattcttctgctgcgccccctcggctttaccctacagcagtccgtcatcctcgccgccctggtgctcaccatcctgtggtgggtgaccggggtggtggagcggacagcggcctctctctttttgctggcggcctttttgctgtgcagcggcgcgccgatccagacagtcttttccttccccctgtcagaaaattttgtcctcatcaccgtctcttttctgttttcccaaggaatttccaacagcggcctgccgggcaagctgctccagcctcttctggcgcactttgcccgctcccccgggcgtatggtgctctccctcctcctctccgccgcggccatgatgtttctcattccccagcccttttcccgcatcattatcctttcgttgatctaccgggagtactttgctagaataaacctgtccgagcctttgcgcaccgccctcctgttcggcctttattatttctctattttgataaatatgtccatgattcggggcgatattattctcaatggcgccctctcctccatggccggcctgaccgtagatgagggcgtctgggcggcctatatgctggctcccaccctggcctacctgctggcggcggtccttctctaccggttcctgttccgcagggtgctgcgcaccttcccctccagcccggcacagacggcggagcgggttcagctcactgggtcggaacggcgcaacctggtctttctgctggccgtggtggtgctttgggccaccgaggattttcacccccttaccggcactctggttgtggcagccgccacggcgctcatgttccccctggggctgctgcgcctgccggacgtaaaggccatcaacgtcaagctgctgattttcctcacagcggcctttgccatcggtggaaccttaaagtcctgcggtgtggccgaccggctgttttccctttttgttcctgtttttccacagacattctcgccggcttacgcagcggtggttctgctgaccgtggtactgctccacaccgtgctgggcagcaacatcaccaccatgtcggtggtagtacccgggctgatgtccatcggtgccggggtggcccctcctcttccgctgatgtttctcatctgcattgcggtgtgcagccaatttcttctgcccttccaccatgtaattctgctgctgggtgaaggcgaccgctgctattccacccatgagctgctccgggttggcattccccataccgctcttatgcttttcgccgtatttctgctctatctcccctggtggcggctgctgggggcgctgtagggccaagagaggaggcttccgccccatgtccggcgctaatatcaaacgcctaatggatccggagatcctggcggctatcatggactcggccaccgacggcttcacctatacggacgaaaccggatatattgtctacaacaaccgggcttacagtgaaatgaccgggcttccggatgaaaagatccaggggcacaacatccaccagcttgtcaaggaggggtttcccatctcgcggatgatgctggaggtgttccagagccgggaaacccgctccgaactcatcaagtaccaggccgactccgagcggcttctcctcgtcaccctctcccctgtctacagcccggacggacgattccgcggcgcggtgggcaacgtgcgggacatgaccgagctgatgcagctccgccagcagatggacatcacctatttggactacgaccgggagatgcaggtcaaagagaaggccaaccgggagctggttcagcgcatcaatgagatgctccacctgatggaggactacgacatcgtaggcaggagtaaggccatgcacaacctggcggagctggccctgcgggtcagccacgtccgctccaccgtcctgattaccggcgaatccggcgttggtaaggatgtcttttgccgcatgatctgccgctttgcgggcagcccggactatatcaagatctcctgtgggaaccttccggagaacctgctggaatcagagctgttcggctatgaggccggcgcctttaccggggccaaccggacgggaaagcggggaatctttgagctggcgggagacggcgtgatctttttggacgaaatcggcgaactgccgccccagctccaggtgaagctgctgaccgtgctccaggaccgccggttctaccgcatcggcggcaccgctcccctgcctatgaacgcccgcgtcgtggccgccaccaaccgggatctgaaaaaagaggtggcccagggctccttccgccgggatctctattaccgactcaacgtcattcccgtgcacattccgcccctgcgggagcggacggaggatatcctgcccctggccgagcacatcctgctgcgcctgaaccgccagcagggaaccgcgaagctgtttggccaagccttcaagaaggcccttctggcctaccgctggccaggcaatatccgggagctgaacaacatcattgagcgggcctttgtactggcaaggagcgacaccctcgagctggaggatctgcccgacgagatgaccgcccagtggctacagcgtacgccccaggggccggtaccggcgggctccagcctgcactgcattttggaggaggttgaggccgcagtattggcccagcgtcttcaggaggaccgtaccctcagcgagattgccgccactctcggcattgatctgtcgactctggttcgcaagatcaaaaagtacaacctgccaaagcgccacaaccgtggaaaataaaactgtgagagaatcatgtcataaaaatacagggatgtcccccaggagagatgggcttgcggcaggggcagcccaaaccattccctgcttagaggggggaggctgatgcctcccccctgtcacccccatttggattcggctgaacggttctcctccgtactctaccaccactttcacccgctttaagccagcctgtccgcccgcacacggtctttgaattgtctgcatgcctccctgcaattctccagaaggcattggatctcactgccatccgcgtggtcaatgtggatgccgaccgctacactgacattgcatttcagctcggtagccagatactttgccgcccaccgtgccgcctcgtcgtctctgtgtccgaacacacacagcacactgacggtagcgccgcgcattttgtgtcccactgttccggattcgtcgcaccccagcgccgcagctcccacatgatgacggcccccaccgcagattgtgacactataatccctgccacactggacggcacagagttcaatttcatatttgctttgctctgcaattgtaatacgatactcctccataacgccccatccttatccctgaatttttatttattatacaacaatactatagggaaatccatcattagattgtgcatcttagaggcagctccacgctctgtcgtccaaagcgtggtataaattgttgccgataggacaccgcaatattatgcttctcatttcgaaaacgaggcttggctgtgctttctcacggtatttgcagcaacatttctgcctctcaatgcatctgcccgagacttgaaggcacaaaacaaatggtcgggaacgcagagaaaaggcactgtatttctacgaaatacagtgccttttcaaacgctgcgccggtctgaatcgttccgccgtacggtgttgagcatcgacccagcggtatttctccgctattttgtgagcagtcccattccgtctgcgctccccatgaccggtatcagcgctgtacccggccggagccgtctccaccggccagcttttcgacctccgccacggtaatgcggttaaaatctccctcaattgagtgcttgagggcggaggccgctacggcaaattcaatggccgcctggctgtcctttccagccagcagggcgtaaatcaagccgccgccaaagctgtctccgccgcccacccggtccacgatgcgcaggtgatactccttggagaagcagtagtgttccccatcgtacagcatgccggcccagtcgttgtcgctggcggaaatggagctgcgcagggtgattgccacccgctcaaagccgaactggtcagccaactgcctggccacactcttgtagccttccttatttaacttgccgccagtgatgtcggtctccgcagcctcaataccgaacacgtccttggcgtcttcctcattggagatgcacacgtccacataccggcacagctcactcatggccgcccgggcctgctcccgggtccacagcttgccccggtagttcagatcgcaggagatcttgactcccctggccttggctgcccggcaggcgtccttgcagatctccaccacattggggcccagagcgggcgtgatgccggtaaagtggaaccagtccgccccggcaaaaattgcgtcccagtcaaagtcggcaggctgggcctcctggatggcggagtgggcccggtcgtagatgcacacgctcccccgctgggaggcccccttctccaggaaatagatgcccacccggtctccgccccggacgatatgggaggtatcaacgccaaagctgcgcagggcgttgaccgccgcctggccgatggcgtggccgggcagcttggtaacatagacggaatccagcccgtagttggccagagagacggctacattggcctccccgccgccgaaggtggcctgcaactggtcgttctggaagaacctatagtatccattgggggccaaacgaagcatgatctcgccaaaagttacaacgcgcttgttcatggtacgtccctccttatttctgcaccaggtggatagcaaagcccccaaagtctccctccaggtagaccgcctttgcccgccccttggcatcggtcttacaggtggcgtggtcaatcgccaccccgcggcgctccagatgatagatggcccgctccacactgttggtaccgatggcgatgtgtccgtggacgccggggccgggggccttggtgcactccaccgccgtccccgcgtggttggagctgttccccgcccggaagggcaggccgaacaggccgcagatggtcctggccgtgcgctcggacgcctgggcgtccaagcagttgatgcccacatgggccaggctgaagcccagcatggtatccaccgcctcccgggtcaagcgggtgatttcggcccagttctccgcctcaatgaggtcttttttcaccatccaggtgccgccgcaggccacaacctggtcaaaggacagataatccatcagatttttggcgctgacaccgccggtcggcatccatttcagagccttatagggtccggcgatggctttgagcttggccacaccgccgttttgctcggcggggaaaaacttgaccgcctccagcccaaaagccatggcctgttccatctcgcctggggtagcggtaccgggcaggatcagcccccccttggactttacatagcgcacggtatcggggttgaagccgggactgacaataaatttggccccggccgccagggcccggtccacctgttcatggtttaaaacggtaccagcacccagaagcatctcgggcacctcagccgcaatcgcccgcatggcctcctcggcggcacaggtgcggaaggtcacctctgccgcaggcagccctccctccaccagggagcgggctagggggacggccttcttcgcatcgtcaatggcgataaccgggatgatgccaatgcggcaaatctgttccaaaatgggattcatactccatatcctttcccgtccggctacacagccgcggcgccgttttgtccattacgctgaatgttattcttctgaatcgcttcccacaggccgttcagatagctggcgcccagggcccggtcatacaggccgtagcccgcccgccccttttcgtcccagatcatgcgtccgtggtcggggcgtatgtagccctcgaagcccacatcgtaataggccttcataatttcgtacagatccaggcttccgtcgccggagaggtgggccgcctcctcaaaccggccggggccggtgaacttaatgttgcgcacatgggcaaagtggatatgtccctctccgccgaactcccgtaccagggcaggaatgtcgttacaggggctggagcccagagagcctgagcacaaggtcagcccgttataggggctgtccaccagctccacgatgcggcgcatattctcccggcaggtgtaaatgcggggcaggccgaagatatcccaggggggatcgtcggggtggatggccatcttcacatcgtactgctcgcagacgggaatcaccgcctccaggaaatacttcaggttgcggaacaggtcctcatgggagacattctggtattgggcaaacaggcgcttgagctccgccatgcgttccggttcccagcccgccatctcaaactcccctgccccctgttggatctgatccgcgaaggcctgtgggtcggtgatgcggtcaatgactgcctgatcataggccaggactgtggagccgtcgggccgcggcttggccagatcagtgcgggtccagtcaaaaaccggcataaagttgtagcagatcacctttacgcccgcctgacccagccgccgcaccgtctcccggtagttgtcgatatacgcgtcccgtccgggcaggcccagcttgatgtcctcatggacattgacgctctcaatgacttccatctccaggccagcggcattgacttcctctttgagggctgagatgcgctccgtgggccagagcgcgccggcgggcagatccatcagggaggtgaccacgccgctcatgttggggatttgcttgatgtatcgcagcggtatgggatccagttggctcccataccagcgaaatgtcatcttcaaggctgtttcctccttacgcttcccgccctgctgccgtctgaagggcggaacagaatcctctgtttctgttatggctgtttacatacacaattgcggtgcagggtggcccgcactgcccccgggccggccagcatgtcccggaacatctcttctgtcctctcccccaggcctgctgcatacagatcaaccccaaagagggctgcattggacaggatggggcggagctgtcctgccagggaatcgggccggcccacttcaattcccttcaggtgggcctggagctggggcaacatggggtccgggctgacaggcatggcgtttcccctgtcatccacccccagcaggtagcggcaccagccggcgaacaccaggggggcgaactccagtccggccaatgcctgctccgactgccgtgcatagcgcctgagggtgccgccgtaacggacgggcagcttctgtgaggtgtcggctgcgatacgctgcggtgtatccgggatggcgggattggggaatcgctcatggagcacctcgtcaatgaatgccctggggctgaggataccgggatcttccaccacgggcagactctcggtggcaatatgctccaccagggccttgagatctgcatcccccatttcggcggcgatggaggtataccccagcaggcagccgtacaccgccagagcggtgtgcagggggttgaggcaagtgcccaccttcatcttttccgccttctccacggtggtccggtccgtgagatacacccccgccccttccagggcggggcgtccgttggggaaagcgtcctccagcaccaggtactccgtgatctccgcgttgacaaagggggcgataagggtgcccgtgttggtgcgggcaatggccatgtccgccacacccaggcgccccagctcctcctgcacccgctcggaggggtggggggtaattttgtcgatcatggaccaggggaagctcacccggccctcgtcctccagccagtccaggaaagcggactctaccagcccccgctccgcccagccccgggccatggacagcaccccggcgcggagcttctccccgttgcgggcacagttgtccatgctcaccatggcaatgggcgcgcctccggcctggaaacggcggtacagcagagccgccgcgatagacatggtgtgacggggcccctccggcccggcggccagatcccgctccaccaccggcaggggctttttctccagatcggttagggcgtagcccttctcggtaatggtgaagctggccatctggagagtcgggctgcaaaacacccgggtcagcctggcccagtcagggccggcgcagtcggccttgaggccgccggccacgctggcaatcacctcccgctcctcgctgccgtcggcgcgcatgcgcaccagcaggctcagggcgtcataggggctatagacctggtcaatgatctgaaagtcaaaggattcggcggccaggatgcctgtgtcggccctgccggtattcaaaagagtctgctgggccgcagccaggaacccccggaagatgttgcccgcgccaaagtggagccacgccggcgcctcccaggtgcgggcccgtacggcagccacatcgtagcggggcagccggataccggcttgcgcccaggccgcccgatcctgcagaccttgcatattcaaatgtaacatgtttgcgcctctctcatcacactctggtatccaccagatgcttgcccagctttttctccagcatgccctgaatttgggtcaggaccgtgctgaaaatcaggtagacaaaggcggcctcgatatacagcagcagcggctggaacttgaccgcgttgatggcctgggcagtctggaagatctcatgaacggtaatggtcgccaccagggaggtgtccttcagcaggctgatgaaggagttacccagggagggcacggccaccagggcggcctgggggacaatgatccggctcatggtctgccacttgttcagacccagagccctgcacgcctcattctggcccttggggatggagcccagggctgcacggatgacctcggagttataggcgccctggctgatagtcagggccaagatggccgccgggatgggatcaaggatgatgcccacataggccaggccaaaaaagatgatgaagatttgtacgatcagcggcgtaccgcggatgacccagacatagaaccaggaaatggcttttaagggcttccatttggacatccgcatcagcgccaccgcgaaggccacgaccagtcccaggataaacgaaacgagcatcagaggtaccgaaatggtaagaccggccttaaagagcggccagaacgaatcgatgagcaactgaagggtattatccacagcggcccgcctcctttagaaatagtgttcatagggccgggggaccgcctgcggcggccccccggcggaaaagtgctggggtcagcttacttctgatagatgctggtgctgtcggccacggactggccaaagtactgaacggtcaggtcgtagcaggtgccgtcatcgatcatctcctgcaggatctcgttgactttctcggtcagggtgtcggcgcccttctggaaggccactgcggactggatgatccactcctcgccctcctcgggctcatagatagcggcaatcttcacgttcatgtcggggcgctccttcatgtactcctctacggcggccacattgttgacggtggcatcggcgcggccggagacaatcagatccatggcggcggtgagggatgcgtcggacagctccgcgcccgccttgcgggccagatcaccggcggtggagttcagggcgttggcgcagctcctgccggccaggtcggcaaagctggtaatctcctcgttgtcaccggccaccaccaggcagaaggggttctcggcgtaagcaatggacatgttgtacttctcctggcgctcgggcttggggttcacgccgcagatgatgcagtcatagcgtccggagtccatgccggcctccacaggatcccaactgctagagatctggaagtcgggctccacgcccaggcgggagcagatctccttggcgatatccacctcaaagccggtaagctcgccggtgccatcctcgttgtaaacgtagggcacccagttgccctcagcggcgatggtcagcttgcccgcgtccagaaccttctggagggagtcgtcggccgcgggagcctccgtgccggggacagccgaaccggtagcgggaggattggtgtcagggggcgtggagccggagggctcactggggctgccgcaggcggccagagagaggaccagtgcaagagagagggccgcaggtacgagtttcttcagcttcatttgattcaccttttccttttctgatttttattgaccggcggagacatctgccggaaaataacgtcaatcgtcctccacaaaccgctccagaacccgaagattccggcggtcggcggcatagggatcggaaaaatagtgctcgtcggccacctcctgcaccagatatccggtatagtggtggtcgttcatggtctgaatctgctgggccagggcggtgttgccatccccccagacgttatgcagccagggatctccatccaaaaagtgcatgtggatcagctcggctccaaaggcccggaaccagtccccgagagtctcacccgccgcgccggtggcaatgttgtccaccatcatcttcaggctggggtgtcccacctcccggtgcatccggcgggcccgctccaggttgcagaccaggttgctctcgtcgtcccggagggactccatgaccagtgtcactccacagggctgggccacctgacacagccggcccaggtgatcccggcagcggttccacatggcggactcgtcctctccctggtagccccaaccggagttcaccaccacccggtcggcccccagctcggcggccagatggatggcgttggaaaaatatcgaaaggagtactccaggtgggcgggctcctgggcggcatactggtactggtaggcaatgctgggggcggtgaccgacaccacccgcacgccgtgggccctcagcttggccctgagggcagagatatcgtcatagccggtgtgatccagccagaagtgggcggcgccgcaccacagctcaatctgcccgatacccaggcgctgctggcaatccaggaagaagtccatggaaaagcggcggtagtgctggttcatgttgaccagctgactgcgtttgatgcctctcattccgcccctcctctcaggacctccagggcccgctcctccggccaggagggccggccggcatagcgctcccccggcagcagcagggacaccgggccggcatagcccgccgcctccagctccgcccggtagcgctccatgggcagcacaccctcgccccaggcccgccagccgtggtagtttccgtcgcacaggcgcaccaggccggtgtgctcccccaaccgctcgaaccaccgggggatgctgtcgccccaggtgctcataacgttggtgtccaggcacacccccagggcagggctgtccacccggcggagcagctcggagagctcctccagcctgcccagcacaggagactctgcaataagcggggtctccggccccatgaccggagccagcagcaggcgcacacctgcggcctccgcctgaggacacagcgcggaaagcagtccggcggcattccgccgcagagcctccggctctatatcccagcaggcccccgccgcccccagcaccagccgtccggcccccagctcggcggccagggcgatgcatacccggtagtagtccaaggtggcctcccgctgccgccccggcggagcggtgagggagtagcggtaggggggcggcgtgagcacccggacaggaagccccgcctccgccaaggcggccctgaggggagcggcggactcatgtcccgtgtggctgcaccagaagtggggcgtctgtggcacgaaatccacgccgtccaggccaagccgtacctccgcctccaaaaacgcggcaagcgggacgcggctgtacgggccgttggagcccaaaaggggccaggtcgccctcatggcttacttaatctcgccgggatacccgttctcacacagctcaaaccacacataggcgaaccgctcgccttcggcgcactcgctgccgtggtgggagccgtggggggtgaatgtgatgtcgccgccctccacgtggatcttttcatcctcagcggtgtaggtgaaggaggctccggggagcatgatgtaccactgctccagctcgttgtggatatgctggccgatgtagttagggccggtgccgaagttggcgcccatggacaggcggcccaggttgcggtgctcgatcatcatcatctgctggatgtcggcgccggtaaaatcctccttgtagtgccacgcctgggacacgccccggaaccggggcagggtcaggtgggcctctttcaggcaggtcttgtcgtagtcgttgagctcggtgacgaaatggacgatctccatgcactccttggcatcggccgcacagtggaaggtgaactgctccttgtcaaagtcgggcacaaacacagagacctccgtgatgttgaacacgcggcggggggtggcgatgtagcccttgccggcggtgatcagaaacacctggttgtgctccgtcttggaatagagggcgggcgagagctccgcgccgggctgaagggagatgcgctccactgccgcatccttgtaggcgccctccagaacaggcacccgggacaccccatcggtatactcgtggcggatgtcggcgcccttcgaaattttaaccaaagccatggtacattcccctttacaataaattaagcctttgagtcaatgtgaattggcttacttgatctcgccgggataaccgtcgatgcacatttcaaaccagatgtagtcgcactgcctgccggcctccaccttgcttccgtgccagaagccggtgggggtgaaggacaggtcgccgccggtcatctttacttcctcgccgccggcggtgtagatgaactcggagccgggcagggggaaataccactgggccagctcgttgtggatgtgctgtccgatctcgatggggccggtgccgcggacgcagcccatagacagacggcccaggttgcggtgctccagcagcataatggaggtggtggtgtcgttgtccttgaaatcctcgtcgtaggtccagccctcagagataccgcggaaccggggcagtaccatgcgggactccaccaggcaggtcttgtcgtagtcgctcagctcggtgatgatgtggagaaactccaggggctgcttgctgtccgcagagcaggtgatggtgaagcgctccgcgtcaaactcagggacgaatacgccgggctccctgatgttccacgcctgacggggggtggtcacatagcccttgcccttggtgaagataaagagctggttgtgctcggtgacggagtagacctccggtgtgatggagcagccgggctgcagggcgcagtgggcgaagtgggcctggtcaaactccccctccagcaccggcacacgggcatagccgtccacgaattcgtacttgacgccgctgtagcgggccaccttgatctgagacatgtttgcttcctccttgaatggtttgaatcagagcatcttgctcaggaaatcctgaagacgcttgttcttgggatgggcgaagaactcctcgggctcgctgtcctccacaatgcggccgccgtcgatgaaaatcacccggtcggccgcctcgcgggcaaagcccatctcgtgggtcactaccaacatggtcataccatcggcggccagcttcttcatcacgtccagcacctcgcccaccatctcgggatccagggcggaggttggctcgtcaaaaagcatgacctcgggcctcatggcgagggcccgggcgatggcgatgcgctgctgctgtccgccggagagctggttggggtaggcgtcccgcttatcctccagacccacggtcttcagcagctccatggcctggctctcgcactccttcttatcccgctttttaaccagggcgggggccagcatgatgttgtccagcaccgtcaggtggggaaagaggttaaactgctggaacaccatgcccatacccaggagcaccttgttggcgctcctggcgtcggcgctgaccagatccacatcgtggtagaggatctgtccccctgtgggcttttccagcaggttcaggcagcgcagaaaggtggacttgccgcagccggaggggcccacaatggccaccacctcgccgggctggatctcgatgtcgatgcccttgagcacctcgtgcttgccaaagctcttctgaagccctttgacgctgatcatactcataccgtatctgccccccgtaagtgatactgctcgaaaccgaagtagtggatgctgttgcgataggatatcccggccaccagccgctccaacgcggcggggtcatcggggaattcgccgtcctccacccaccggccgataaggttgcagaggatgcgtcgaaagtactcgtgccgggtgtaggacaggaagctgcgggaatcggtgagcatcccgataaagttgcccagcaagccgcctgcggccaaggtggtaagctgggcctccatccccggcttgtggtcgttgaaccaccaggcggagccgtgctgtagcctccccgcagtaccgggcccctggaagcagcccatcagggccaccagcgcggcgttgtcgctgggctccagggaatagaggatggtgcggggcagctcccccgtctcatccagcccgtccaggaaagcagccagtgccggcaggttcaccccagggccgatgctgtcgtagccggtgtccggccccagcaggcggtgcatacggtggttgttgtcccgctgggcggcgaagtgaagctgcatggcccagtcccgcttggcgtagccccgtgccaggtgggtcagcagcgcccacttatactgccgcacctcctcttccgtcacggtttctcccgccaggcggcgcctgaccacgctatccagttcctccgggcgggccggggcgtaccgcaggttgtccaagccgtggtcggacaccttgcagccgtgctgtgcgaagaagtccatccggttatccagggcggccagcaggctcccccatccgttgatgtccacccctgcggcggcggagagccgggccagatagtctgggaagtcctccttttccacgttaaccgccttgtccggccggaatgcggggagcactttggtttccagggtatggtcggcagccagcctctggtgccattccagggtgtccgccggatcatcagtggtgcacaaaagggtcacattggatttacgcaggatctcacgcacactcaggcccccgccgatgacggcgctgcagtgctcccacacctggcgggcgttggccgccgtcaggtgtcccgtgtaaccgaagtagcgccgcaactccagatggctccagtggtacaggggattgcccaccgcctgctccacggcgccggcccaagcctcaaacttctcataatccccggcatcgccggtgatataccgttcgtccacaccattggcccgcatcagccgccatttgtaatggtccccctccagccagagctgggtcaggttgtggaagatccggtcctccgcgatctcccgcgggctcacgtggcagtggtagtccaatatgggcagacgttccgccacctgatggtatagatacctcgccgtatcactggtcaacagaaaatcctcatccaggaatggtctcatggctttccatccttcctagtccgccgtttcccgatgcgcgggcccgccggccgccctgctttccgcaggagttcaatctgttttataatatatttgtgatatatctctagcccaaaatgtagcacagttccctccatccgtcaagacataaaccgataattttgccaagatagccatttcccatccttaaattttgtaaataaagcacaaaaattatccatttttccccactttaaagccttgacccctggaaaagatgctggtataatgacaccaacgatgttgtaagtacagccatttttctatgtgtctgtcatatatcacatagagtatcaggaggatatgccaatggcggcagtggtggataaacggcgggatagtctgtcgcaggtcgcgtatgaccagatcaagacgatgattctgcaaaaagatttgaccccgggacaattcatcaatgaggcgcagctccaggcgctgctggggcttggacgtactcccgtccgggaggcggttcttgccctggctcaggacaagctggttcatatacatccccgcaaagggattgaaatcagccgccccacgctcaaggacatccatgatatctttgaaattcgctccctgctggaacctctgattctccatcagtgctttcaccaggtggatctccagtgggcggtggacatgcgcacgctgctgctccagcatcaggacgacgaggccggaaacgcgggccagacggctgcgccgcttattgaactggacaacgaatttcacctgaagctggttgacacacttcacaaccaatatgcctcccagctcatgcgcagcctcacggaatatctcaacctcatccgcatcacagcctggcgtccaagccgttatcaggtcagtaaccgggagcatattgatatcctgaatgccattttagagcgccgcccggaagatgcctgccggttgctgtccgagcacattcagctctcctatcaggaggccatcaataccatgattcactgttccttttagtgcgcaaaaatccccgccgcagattctctgcggcggggatttttatctgctcccatatcggttaaagagtaacgccgtccttccagatggcgatctcccgatagcctgcggcctcagcacgggtgggggcgccggaggccgtgtccagcaccagttggagcagcgcctgaatgtggggctcccaagcgtccccctgggccaggccgcctgcgtcgtagtcgatccagccggccttgcggctggccagggcggtgttggtggccagcttcagggttggcaccggcgcgccgaagggagtgccccgcccggtggtaaagaggatcaggtgggcccccgccgctgccagcccggtggcggacaccaagtcattgcccggtgtctggagcaccgtcagcccccggcggcgcacagtttccccgtagtggagcacatccactatgggtgtatttccccctttctggacacagcccagggacttctcctccagggtggtgatcccacccgccttgttgcccggcgaggggttctcatagaccacctgcccgtggcgggtgaagtagtccttgaactcctccaccagcgcgggcagggcccgggtcaccccctcgtcggcgcagcgccggaacagcaccccctccgccccgaacatctccggcacctccgccagcagggcggagccgcccatggcgatcacccggtcggtcacccggcccgccaggggattggccgtgatgccggaaaggccatcggagccgccgcatttcagtcccaccaccagctcatcggcccccaccggctcccgccggtccgctgccgcccggtcggccagctcccgcagcagacgctccccctcggccagctcatcctccacggcctggcactccaggaaagccacccgctggctgtcccagcggcccagccgctcttgcagcacggcaatgctgctgttctcacaccccagccccagcaccagtacagccccggcattggggtggcggatcaggccgcagaggatggccctggtgtgctcctgatcctcccccatctgagagcagccgtaggggtgggaccagacgtgtactccgtccacccgccccctggcatagtcctccacccgccgggccatggaccgggccacgccgttaacgcagcccacggtgggcacgatccaaagctcgttgcggattcccacccggccgtccgcccggcggtagccctgaaaggagcgaggccgcaggggggccggggccccaccccccacctgagcctggggagcgcccgccccatccagccgggtagccaggttgtgggtgtgcacccactggcccggctggatctccgtcctggcccgtccgatgggatagccgtacttgatcacatccgccccagcggggatggcggtcagtgcgagcttgtgcccctggggaatgtcctcccgggtggtaacggaagccccctccaccgccacgcggatccccgccgccaccggctccagggccacggccacgttgtctgttggcgcaatacgcaggcagcggctcatttcagcgcctccttcccgcaggcctccagcgccgcggccatgccatcggcccggatgcgggccatggcccgccccgcggcggggacgaagccgggcagctctgtcagatcccggccccagaagtccaccctggcggcaaaggcggcgaccagcgcctccggtccgtccgcctggcgccgggcgaagaaatccagcacagccggctcgtcccgcactgggcacccctccccctctccccggctgtagagggcgcagagggccgcaaaagaaaataccagccggaggggcagcgccccctgccggcggtggaaggcctccacgctgggcagcacccgcgcccgccacttggagacggaattgagggcaatgtccaccaggcggtggtccacgtaggggttgtcaaaccgctcctccaccgccagggcgaagtcctcgcactccgcccgggggagggagagtgtggggataatctcctgaaacagcgccccatccaggaagttcctcagcccccggtccgccatgcaggtgcgcaccagcgtatgcccggagaggagggccgccggggtcaggacagtgtggcccccgttgagaatgcgcaccttccgctcccggtaggggcggtgatcggccacaaagcgcacgggcagaccggcctgctccgccgggaactccccctgcacccactccggagcctcaataatccactgggcgaagggctccgccacatccagcagcttgtcctccaggcctgtggcctccgccaccgccccggcctgctccggggaatagccggtaacaatgcggtccaccaaagtgctgcaaaaggcgttctcctcctccagccagcggaaaaagcccgcctccagcccccagtcccgggcgtggcgcagtacgcagtcccgcagcgtcccgccgttgtccgcaatgagctcacagggaaaaatgatgtaccccggcagtccggtctggtagcgttcccacagcagccgtgcgagcttggccgggaaccctgcgggggggcggtcgtccatccggctggacggctcgtagacgattcctgcctcggtggtattggagaggataaagcgcatattcggattatgggccgtgcggagaaaggcgtcatactcctcaaacacgtccaccgcccggctgatacaactcactatccggcactgatccaccgtctccccgttgcgccgcccccgcaggcagagctggtagagcccctcctgatcgttgatgcggccggtctttccggcagaggcggggggaaccaccactaccttaccctgaaagtctgtacgttcgttcatcacgtcaatgaaatgttctgcgaatccccgcagaaagtttccttcaccgaattggagtacccgctcaggggcctgccgcagcaggtatccgtcatatctcccctgttccagcgccgtataagtgagacgttccacaaaaaccctccctattatccagatgtcccctatgataatataggcacttctgtttgtaaagagccccaccactaatgcgggtctgaaaagcgtctacacgctccaaacgtccataagccgctcatcaaaaaaagcagttgactgggtggacaccaggaacgcaatccgggacgcaggggcacttgtcagcgtggctctccccaggcgcctgcaccaacgcggccaccacctcccagcgccatgcggccggggaatgaggggcgtccgctctcggttagctccggaatcctgtagggttcacggtttggggtagtgccagaatgcaaagaaagccagtgaataaatttaaaatctgacagaagcagccggaacacacacatcccggctgcttctctctggtttcaaatatagtatttataactttgacttccgtacaagtaagagccatctgtcaaatggagcatctgtggaggctgtcctatagaagcagatgataaagaaacaaatttaccatttgccttcctcggtcagatctgctttccccagggagcgccgatatcctggacacagagctttcccccgctgacctcgattgcggcgccggtgatgaatgccgcagcatcggacgccaggaaggtgtaaacacgagatacatcagaagggactccgaagcgctgtagcgcaatctgggcacacagcttttcccggttggcagcgatacgctcggccgcaattggcgtctgaatcaggccgggcaccacacagttgacccggatacccaagggggccagctcaccggcagtcgtcttggtcatgttcacaatgcccgccttggtagctgcgtaggcaatcttctgtgtggcaggaataagcgccatgtaggatgaggtattgagaatgacgccgccgccagtccgtctcatgtagtcgactgccacatgggtaccccaaaatacggaagtcatgttggtgctgataacaaagttccagtcctccaccgtgagctccaggaagggcttggtgatattccctccggcgttgttgatccacacgtcgatacggccaaactgctgaaagaccttctcgcccagggcgctgatatcttccggcttggatacgtccacgacttgggtgtggacctgaaagccctcggcctcgaaccgcccggcggcttccgccagctttttctcactgcgtgaggcgatggtcacctggcagccctcccgggcaaactccatggcggtttcctccccgataccgctggagccgccggtaacaacgacgacttttccgttcagattgagctccataacaatatagactcctttctgcaaatgttcaaatccattttttctaaatccactaaacagcaggcagaatacccagttggagcagtacagcacaggcacaggttgtgacgatgggaatgaccagacagaccatggcataagaggggtaagactggcggtgattcaggcggcacacctgaaggttattgacaaagccgctgacgtggggcatggagtccagtccgccggaggacatggcgccaatgcggtgaatgacgttgggagacaagccgagccccaggaagtaatcctgcatgttttccagagcgatggaaaggccgccggaggaggaaccggtgaggccggccgccacgttcacggcgataatcagcttgaaaatggccgggcccgggatactggtcagagagcccaggatcagttgatagccggagaccgcagccaccacgcctccaaagcccactacagcacatgtggtaccgatggtggaaatggaattcaccgcgccggctgccagagtggccttgaggttatccaggcggcgcaggatcaggccgaacaggatcagacataccagaatgccgcaggagagcgcgataaccgcatgcagcttgcagacattgagcaccagaagcaggacaaccggaggaatcagggccagcagcagaggtatgccgacctggctttctcctgcggcggctttcttttcatcctcatcccggtaggcggccttgactgcttcgccggaggggcggaagccctcaccccgggcgcgggcgcgcttgagtataaaggctgcccagagaacacacagtaaaatctggatagcagcgccggtcaggccgatggcggcccccgccattggcgtagtgcccagatactgcgtgggaataatgttctgaagcgctgccgtaccggggagcatggtcatggtaaaggtagctgaaccgatgccgtggaaggtaaggtagtgccgccaggggatgtccagctcctcaaagagcttgcggccgatggagatcagggtgaagatgacgacaaacaggctgacgccgccataggtcagaaccgctacaatggcggtgatcatcagaccgccgaccaactgcttggttcgctggctgtgaacgtggttgaccacgcgcagcatggagtaggcgatggtgtcggccgctccggaatcgcccatgagctttccaaagacggcactaagcagaaagatcataaaattattttttgcaaagtcagcgaacttggtcatataggagtctataatcagcggcagaatgtcggtgccggcaaaaacggccacaaccagtgcggcgataacagaaacgataatgacattatagcctttgaatgccaggaaaaccaagatgaccatgcccaacaggataccgatcaggctgataacgctgggggacatacaatcactccttccgtggtaatgcgctccttcattctctttgcttttgcttctccgcaggcctcacatgacggtggtctgcccataaagatcgcccagggtatagccctccgaacgtaccgcgccgacgatccgcttgaccggcagactgcccagagcctgtgccacatggtactgggtgggcatatcctcccaggtgggtatatgccagcgcacctgaccgcccatataggtcagctgatccgccggatacttctttacgtcgtcaggcagcttggctgctttaggattcaggcagacatattccgcatccgcctgagtgaagccgccgccggtacgtggaatgtacttatagtgcatgatgccctgactatccgggttattcagcacccgtttcagctcctccagattctccggctggcggttggcatcaaactccagctccagaaagcggaatccccaggaggtcagctccgtctttgatacccccccgtacgtatggatgtcgtcgatggaggcaaatatcttgctgtaaccgagctgctcccggccggtaataatggggtcggcatggttttcccacataaccagaagcaggttgccttccaccacccccttttctccatggaaacgggtgggcacagagacgccggtaaggttgtatccgtgtccagccagccaagccacgtcccgcagcatgttcatattgatgatgacgtagggggcagccagctcgaaccgctggggcaggacagcggacagggcctccggatcactttcgtagacaatagtatgcttggtcagtcgcgtagcctggtcatagataaagcgcttcccctctttgttctgtcggggagttacgcagggcccgaaatgaaccggcatttggtacatcaggctgtcgttgcggacgtaggacataggttttcctcctttttgtctctttcttattgcaactccggcaggacaaacagagccaggttgccgaattccgctctacggcggccctcctctatgtcagtaattatcttcactaccaggtcgttgaacggggtgggaacaccgtacttgcggcccatagcgccgacataaccgttaatcatctggatctccgtctttttcccccgctcaagatcctgcaacatgctggccttggcagtgcgtaggggatagtaattgcggtagatgtatcccttggaccgctctaactcctccttcgtttggaagtcggcgatctctgcggtattcagtccgttggtatccgttagctggaagcccgcggcccgcgctgcatggaccacctcagccgcaagataggaggtgcaggccagcgccttttcactggagattaccgactcaaaggtacagcccaaggccgaggacaggccactcatgcagcagttgagcatcagcttgagccaccgggcccccatcaggttgtcggtaatctccaccttgccgttgtccatatggcccaaaacctcggccaccgctcggatgcggtcggtaatacgtccgtcgatctccccgatctcaaacagaaccgtgcgggcggagagggcgttggtcagctcggagataccgggctccacaaacgtggccccccaacggcaggctccgcctactgtgcggttccggccgacgaactcggccacagctaattccggcactccgttctgcaaggtacataccgtactgttctctcccaaatggggcaacagcgcccgaaggctcgcctcattgttggtctgcttgaccatcagaaacaccaagtcatagaccccttccatctgctccggcagcagtgcacggaccgggacagtcagctctgcacagccaacaacgccggcccctttttcgttgagtgcatccacctgggccggataggagtcgattagatccaccgggaacccgtttctggtaagaaaggcacccaagacggttcccattgctccagcgcccataattgccgctttcatcaattgcagtcctccttctccttgctaaaatcgtgtgacaggacatgggtcgtgtctgaccaccttaggaagcaaaccggatgccagcccgtatccccctgtttttcccccctgtttcggccacttctcgaggcaaattcacgacttcccgccggaattgcacattcagggcatgaaaatgcaatttttgtgcaaatgctcactcaggaatccttgtatttcaatgtgcagttccaatttcgcctgtgcaactcactacaattgtggttgattttttgccctccatttgatagttttaaaggggaaacgcataggagcagaacgcataaggagggctggaagctatggcaagcaatctgcccgggctggaaaacatcctggataatctggatgttggaattatcatctttgataacaaagggacatacctgtttgtcaataagacgctcctgcaatacacagggcgaacccgtcaggactacttaaatcacacggtatatgacttcatcgcaagcggactctacaaggagagcgtcgtagacaaggtctaccacgagaagcgggctgtcacgcagattcatgttacagtttctgccgacgggaaacaggtgggccgtctggtaaccgtgtcccctattttcaacgcgcagggtgaaattgtatacgccatctcctgccagatccaggttgatgccatgaaccagaaatacagccacgccaaggccatcaacgccattgctacaggaatacgcggcaattgggacgaccgcagagaggtgattgccaaaagtccctccatggtgggcgttctgaggcaggccgcacgtgcggcgcagagcgacgcttccgtgctccttctgggagaatccggaaccgggaaggagatcgtggcccagtatatccaccagcacagcccctacagaaaaaagcagatggtggctatcaactgcacctctctccccgaatccctattggaggcggagctcttcggctatgagaagggtgcgttcaccggggccgcctccggcggaaagatcggcctgattgaagccgccgccaacaacaccctccttcttgatgaggtaaactccatgccactgtctctccaggccaagctgctgcgggttctggaaaccaaagcggttattccggtaggctcagtcaaaccgcgggccgtgaatttccggctgatctgcgcctctaatgtggctctcgctcagtgtgtcaaggagggaacgttccgcatggatctgtattatcgtcttaacgtcattcccatcaccattccgcctcttcgagagcgccgggaggacattactcccctggccgactactttttagaccacttctgtcagaaatacggtcttcaaaaggaattttcaagccgcgtctatcaaatcctgaatcactacaaatggccgggaaacatccgcgaactgcgcaaccttgtagagcacatggtggttatgagcgagtcatccgtggtcaaaatcaaccagattcccacaggcatgcttcagctggagcctccctccccggaatccggcccggaatgcctcaatgaggagtatctccgcattcaaatggcactccgtctgcatggcggacaccgcgaaaaaaccgcccaataccttggtatctcccgccggacattgcagtacaagctcaaaaaatatggcctgctgtaaaattgcacccgctcagaatttctgagcgggtgcaatttggcatatattttgcatacagacaacaacagataccacatctgttttgcagacaaaccaagcttgaaaggatttgagaaacaccatggtagaacttctaatccgccccacgcttcaccgctttgagacctgtctggactttgtaaaggaatttcatccgggagaacgtgacctggttctgactaataaatacatctacgagccctacctcggccagatgggacttccggttcacaccatctatcaggaggaatacggcgccggagaacccaccgatgtgatggtagacgccattctggccgacgcggccagaatgggctgtacccgtgtcattgccattggcggcggcacagtgctcgacatcgccaaggtcctggcagtctccagcggcgagggggtagacaccctgtttgacagggcccccgccctggataagcggcgggagctggtgctcgtccccaccacctgcggcacgggcagcgaggtgaccaacctctccatcatcgcccgcacccgtctgggcaccaagctgggtctggtgagcccggccatgtatgccgaccacgcggtgctcattccccaactgctggaggggctgcccttcggcgtgtttgccgccagctccattgacgccctggtgcatgcggtggaatcctccctgtcccccagggctaccccctacaccaagctgttcggatacaaagccatcgaaatgattctccatggctaccagcgcctcgtgtccgagggccgtgaggccctgcatatcctgctggatgatttcctggtggcatccaacttcgccggcattgccttcggcaccgccggctgcgcggcggtacacgcaatgagctatccgctgggcggaaaataccatgtggcccacggcgagagcaactacgccatgttcaccggtgtgctgaaaaactatctggagctccgccaggatggagaaattgccgtgatgaatgaatttctcgcccgccttctgggctgcggcacccaagccgtatatgaccgcctggaagagctgctcaaccagcttcttccaaaacggtccctccacgagtatggcgtcaccaggcaggacctccgggactttacccatagcgtcatcactggccaggtccgcctgatggacaacagcttcgtccccctggacgagactcgtgtgctcaaaatctataccgagctgttttgagcagcggacaccgacgggcaaccgcgccatatacgctccgggtgtccctgcgcttagaacttcagtctccagcccagtcccatacaaaccgaaagacctccgccgatggcttctgttatgctcccgaaccggaacgcaccgtgctggtaaaggagtaaagcggacggcccagcatcttttccagattgcggccgagagcgtagagcttctcctgatccacgccggtatggatacccatgccattgaccatagtgataaagtcttcggtggataccaagccggtgcggcaggtgtcaaagtagtaatcccccgcgcccttaaccggcacaccatccaaaaagtttgccacctgaccgccgatgccgcccacggtgcagtcaaaggtgcggataccagccagcatggctgcgtagtacccggcgatgcccatgccgcgaatatcatggatatggaaggagtgccgtgcggggtctgggtgcttttccaaaatgacttggaagtagtctgcaatgtccctgggtgtagcgataccgtcggaatcggagtgctctacctcgtcaaagccgatatcaaacatacgatccacaaattcgtaggcccgttcgatggataccttcccctggatcgggcagccgaacacagtgccgatgttgccagccaccctcttgatgcccatatcgtggagggccttcacgttcttctctgcctcgtcaaagagctgctggtgggtacggcgcatgttcttcatggcgtatgcttcgctggtggcaatctggcctgtgagcacccggtcgatcttggccccccgatccagcaggccgcccacccgctcgatggccttgggggtgagggccagaacggtatactccacgtccacgtccttgggaagcttgagcagcagctcgtctacgtccttaaactgcggcacataggccacatggctgatggagcccacctccaggcgcttaaagccggccttgatcagcctgtcagccagatagagtttggcctccaggggcacatagtgttcctcattctgaagcccgtcccgcatggtgatgtcgataacgtcaatctgttcaggcaattttagttccatgatataactccttatgagatgggatagagcacggtccccagggcaatggagagaaacatgccggccagggtaaagacaaccgtggggaagaaaatgtacttgtagctctccttgtgactttggccgcagatagtcagcagggtgattaccgcgccgttatggggcagactgtccaggccaacggaggcggcggagcccacccggtgcaggatctccggggccaggcccagggagatgtatttgtccgccatggcggaaagggcgatacccaaaccgccggagccggagccgcaggcgccggccagaatggtggtcatcaggccgaaggccagcaggggcgggatatttcccaggctggtggcgaagtccagcaacttttgaaatccctgggaggcctgcacaaccgagccgaagcccaccaccaccgcagtgttgatgatggcgatggccgaattttcggcagagtaagagaacatgtccagcacaccgtggacattccgaaagaacagcaccacgcacagaaggatgccgcccagcatggccacgaccacatgctgcttgaacacgttgagcaggatcaggatgagcacaatgggcaggatggcgatgatcgggctgggcagccgcaccatggatgccgccttaaccaggctctgggtagtggcctcgtcctccacaaagcagtccccccgggcccgggcccgacttgcctcccacaggaagtaaacacacaccatgagcatgacagcaattccggtgatcacgcccaccagaggggccgccatggtgttggtccccagataggtggtggggatcacattgaccagattgggcgtgccgggaaagtttgcgcaagcaaaggtaaagcaaccgccggcaatcgcgccgggcagcagatagcggggcaggtcggccttcttgaacagggagagggcaatgggatacaggctgaacaccaccaccagagtggtgacaccgccatagaccagcactgcgccggagaaaatgacgcccaggatggcaaacttttcccccaacagctcagccaagaatttggcaatggaggcagccgcccctgtctcctccatgacctttccgaacaggacgctgaaaaagaagagcaggaagttgtccctcacaaattgggcggcccctgtcatataggtatcggtcactgcggtcaccaccggctgaccggataggagggccatgactgcggcggcggcaatgcccaccaccacgatgttgatcttacggaaggtgagaacgatcagcagtgccagggacaccagaatggctaacatacgcgcgcctccctccggttacttctgatactgtttgaccagctcctgggcgtactccagccggacatttttttcagataccatctgctttacaattttctccagcagctctccggtggcgccggcggtggcggccaggttgcgggcgtggagggacatgtggccccgctgaatgccctcggtggccaaagcccgcatggcggccatgttctgagccaggcccacggcagcaatgatctgggccagctccccggcggtcttgacgcccagcatcttcactgccaccttggcggtggggtggattttggtggcgccgcccacgaggcccacggccatcggcatctcgatggagcccaccagatcgccgtcggcgttcttctcccaggttgcgaagggggagtactgtccgctgcgggcggcgtaggcgtgggcaccggactcgatagcgcgggtgtcgttgccggtggcaatgaccacggggatgatgccgttcatgatgcccttgttgttggtggccgcccggtagggatctgcggcggcaaaggcataggcggcgatcattttatcgacaaccttttccccgccaatggcgtccttcttgaagacggcgcgggcgcgggcgattcggtggtctgccaggttggagaggatacgtagctcggcgcggccgccggtaagctcctccaggaagggtgccacggcctcggccatagtgttcaccgcgttggcgcccatggcgtccccggtgtccaccagcaggtgaaccaccaccattggccccaccagggagtccagcacccggacctccacgtccttcacgccgccgcccagcttcaccagcatggggtccttggcgttgcagatctcggcgatcttctccttgttctccaggatcttccccttggcgtagaagggggcaggcacgtccagcagttggatctgggaaatcatgacactgccggtatagtcggtagtgaagccgccgccaggccgggccatcttggctgcattggagcaggccgccaccacggatggctcctccgtaaccatggggatgacgtaatccttgccgttgattacgaaattgattcccacgcccatggggagcgtaaagcggccaattacattctcaatcatgtggtcggccttgtccatgtccagggaatcagcctccttcaggatggcctgctcctccggcgtcagtgcacagaactcggccacctccttcatgcgctcctcaacagagagtttgaaaaatccggaatagctgctgctcttcatggatgtttttgcccctttcttttaaataaaatgtgtgaaggcttgtgtttgtttggacacccacaaaaaagcaacttgcgtgccaactcctgaccaaccgccactttcccttgggcccctaagaaaacaggcggggtagtcctgcgtatgatacgcaggactaccccgcctgtgtcaaatctgtccttttattggtgtcaaatttgtctcttgtgccatttttgtcacagctgagtttccgaccatttgcggtaaaatgtgcgccggctgatgcccagccggtgggcagtctcatccctgtctccgccgcactgctccagcaccgcccgcagcaactgtccctcaaaacggatggtctcttcccgcagggttccatattgccgcgtctctgcgggctgggccgcctcaaccggtctggcgatcgtgcccagagaaaggtcggccgggtcgatctcctcctgaccacacagaatgacggccgactcgatgcagttttggagctgccgtacattacccggccaatcataggacagcagcgcctgtgcggcccctcggctgataacggccgacttctgatatcgttcgttgtagcggtccagaaagtgataggccagagggagaatatcgccctgccgttcccgcaacggcggtatggagaggggcaccacattgaggcgatagtacaggtcggcccgaaaccgtctttgttctatcagttcctccaggggctgattggtggccgccacgattcgcacatccaccgccacgttttcttcccgcccgactttctcaatctcccccccttgaagcacccgcagcagcttgctctgcattatcaggggcatatcccccacctcgtccagaaagagggtacctccctgggccagctcaaacttgcccagcttcccccctttccttgcccctgtaaaggagccctcctcatagccgaacagctcgctctcaatgagcgcctccgggatggcagcgcagttgaccgttataaaaggcctatttcttcggggactggcttggtgaatcagctttgcaaagccctccttgcccacaccattttccccccgaataagcaccgtcgcgtcggttttggcggcggtgacagcacgggacaaaagagtgcgaaattgaggatcctgtccaatcatctgaaacctggagagctctacatccaactggctcgtcaattcctcggccacctgggtgatccgttccacttccatgccaagacggttgagttccgtcacatcccggaagatggagaaggccccggccaccacaccgttccgccacacgggaaacatacgcatagatacatatttccccaccgatttgatgcggtgccactttcgggcgtcgggcttcccgctctccagcacccgaagcagcagagcatccggctcaatggcatgcatatcccgcccgatggtcttgcgcatgggtactccaatgatgcggctgtacgcctcattttcatagcaaattcgaccttcccggtccagcactaccacgccgtcctcgatggcgttgagcagttcattcaggtccagctccaccgcacggcggaccagaaaggccagttggctgcctgccagctcccccaccttatcccccagttcattcacaacctcatagaccacgccttcatccaccgcctctggaggcagatgatgaatctccgtctcctggggtaatgatggttctaagcgttcgggcccgacattggttttcatgatctcccgcaaggtcatcgcgtcccaccccctgttgccgcgtagattcgtgcctgaaacggttttgtatattatatacttctttttcagagaaacgcaactgttggaacaccgcatgctttgcaccaaaataatgccggtgggaactggatgcagtgaaacgctgaacggggcacttgaagtgcggcaagggccccaaatcccatacgtcggcctcagtctgagggcaaggtcataatgacagggagttttgaacggcagttggcctcgtgtgggccagcttggcctgcgaacagactcaggtggtctcctgaagcagctccggtcagcagagcccacctcaggcttacgcccacgcaaccaccgcttgccagcgccaggcagccatggcggcattccgctctctgtcagtctccagtcatgactgctccaaaatcccgtacggattacggcttgggtaaagcccaaaaagcaaagttcagcctaagaagggggcaaacgcaaaacaaaacctgtcagagcccatggattccgacaggtttatgactgcaaagaatgaatgtatggttattcccgaagtttattattttatttattttaaaggcagatgtacgacctcgccggtggcggcggacaggtcagcggcaaagacaatttcctgagttttgaccgcatcggacatagggcagtctgtctccctgtcgtggatgatgcagtccaggaaatgggctgcctcttcagggaaggggtggtgcttcacatcaccgctgttaggggtgagtaccggcaattccatgtaatcccgctgctccgtgatctggccgggcgaccacaacttttcattccagagggtgcccttggtgccgcacaggtgaagattgaacacatagggactgatgaagtcatagctgctgcccaccttaccaaccgcaccgttcttgaatttcaggataatggagatggtaccgtcaaactcgagatccgtgcgcattttgctggactgggcgtagacggacaccacctcgtcctgcataaaccaccgcatggcatccacggcgtggcaaccgccggccaacagggagctgccccctacgctctttttgcacgtccactgatagcagggaatatcacccataacccggtggaaatagtcggtctccgcgtacttcagttcgccgatgaagtccttctgaatcttcttggcggtgacgaacaaggggttgtagtggagaacatagcccaccagcgtcttgactccggccttgcgcaccgcctcatccattcgtttcgtgtcctcccaggtgagggccaccggcttttcaatcaggatgtgtttccccgcctcggcagccagaatggtctgctcacagtgcatatcgtttggcgtgcagatgaccacaatatctacattggggtcctttagaccttcctgatagtcggtgtagaccttacagcggccctccaggccgtactcccgcattttggcctcccccttctcccggctgcgggagacaatagccgtcacctgagcccgctccgtcatttcaaaagcccggatgtgctcgccggacacccacccggttcccacaatcatgacaccgtattttttcatcctgttttcatcctttccttccattcatttgacacagctcccgcagggtctccagcgcatggcggagggtgcgctccaccaggtgatgggccggcgggatcagctccacaatcagatccccgtcaaagccgatgtcccggatagccgccatcaccgccggatagtttacatccccgtccagcaggttggtaaaaccgttgatgttgtccaccgacatgcggtagtccttgcaatggaactccaaaatccgtccgcccagggtacggatccactgctctgggtagccgaagcgccgggcgttggctatgtcgaagcagatgcccacattcttccgccccatctcatccacaaaccgtgccagctccagtgggctatacagcatgttattccagacattttcgatcatcagtcccaccgacggggcatagtcggccagttcagacactctctcctgggcggtggtgtaggcctcctcgtatgccatatcctcagtggccacacccgggatcaccagagcagaggccgctcccagcacctgagctgcgtccagcatccgccggactgcatccatggacgtttggacgacctccggctcccgggctgtcaggggatagatggagaagctgatgatgccgcccacgctgcatagaggaatccccacctcctctgccatgcggcgcagttggagaaactccgcctcccctgcgtgctcgtgcagcagccggttgaaatagccgctgatatccagggcatcggtgacactccccaccgccgggccgggcttccggtcggcggtcaggcagatctccatgcagtcatagcccagtcccttggcccggtgcagggcctccgacacatcgcagggggctggaaaacagaattgattgattccgatgcgcatttgcccgctcctttcagtcctttttccacagttgctgggtagccaccactgctaatatgatgcagccctgaatgatcagcttgcccacctggctgatgcccagcatggtcaggatagccatgagcagcatcatgaaaaaggagcccagcaccacaccccaaacgccgccccgaccgccctcaatggcgttgccgccaatcagggccgcagccagcgagttcatggagtagtcccctgccagggtcagggaagcaatgttgtggtacccggtcaggatcaggccggccacagcggacatgagagcgcagaagatataggccccggccactacccggacattggcgatgccgctgagtcgggcagccttggggctgccgcccacggcgtacagcctgcggcccagggcggtaaagcgcagcaccacccacatagcggccgccagagccagccagatcagcgtggaaaaagggatgccgaacaggcggccggtcccgagggcacgtataaagggggccgcgctgccggtcggtgagccctgggtgtaaacgtagcagatgccctcgcagatggtagtggtacacagggtcatgacaaagggggcaatctttagaaacagcacgccgaaggcgttggcagtaccaatggcaagtccgataaacaggcacaccagcagccccaatggaccattggcatcactgccctgcattgccgatatgcagaagatgtttaccatcatgacggtggcacccacggacaggtcgatgccccccaccagaataaccgccgcctgacccagggtgatgatgccgagagcagacgcttggcgtgagatgatgagcatctgctccaccgtcagggagccgggcaccagaacagcctgggcgccggtcatcaccacgatgatggccagcaacaccagcggctggagggaggcagtccccctcgagcggttcaacagcagattatgacgcacggcgacgcacctccagccgatctgaaatggagtaaaccaccatggccgcgatgagaagggctcccttcatcacgtactggtaaaattggttcacgttgaggttgttcatgacattggacagcatgccgatgaggaacgctcctgccactgtgcctgatagcagtccagtaccgcccgccagggaagtcccgccaatcacggtggcggcgatggaatccataccgtagttggccccacaggtggggtcccccacccgcattcgggaggccagcagcagtcctgtcaccgcggcacacagggccgccagcacgtatgccttcatgctggcccgggtggtcttgatgcccatagaggcggcaatggttctgctgcggccgatagcatacaggctggtgcccgtccgggtgcgatagagcaggtagcgcatcaccagaaatagcgccaccagaatgagcagcggcatactgatgatgtcccacttcttgtagatcacccgggcgaaatcggcgttgattttgccccccgccacgggcagtatccacagtgccacaccctccagaatcgtgctggtacacagtgtggtaatcatgggcggcaccttgagatagttgactcccgcaccgttgaccaaacccacgccggcggcaaaggcaaacaccactaccacacccaggagcacctgcgccgggttgtcgctgcccatgaggcgggcggcaatggcggtacacacactgatggtcgaacccacagacaggtcgataccgccactgatgatgaccagggtctgccccaggctgacgcacgccagcggaacacactgcaccagtacattggtgacattataggcggaacgatagctctccgagtacacgcacatggaggcgaacaccacaagcagcagcccgcagatggtcagcacactgctgagttggggggtggcggcaagtttgcggtggatcctttccagttgtttcataagcctactcctccgtcatgccgctggcggccttcatgacccgctcctcagtgatctcgccgcgggacagctctttgacgatcttaccctcatagaacaccagggtccggtcagacaggccaatcagctccaccatatcgctggtaagcattaaaatgccgatccccgcctcggtaagctggtggataatctgatagatggacatgcgggcaccgatgtcgatgcctttggtgggctcgtcgatgatgagcactctgggtttcgtcatcagccaccgggccagcatcaccttctgttggttgcctccggataggtgggataccaactcctccatagaggatgccttgatctggagactgtccatctgttcggccacctgggttcgctcctcgtcctcctttaccaggcccatgagagtgcatagccgccgcaaggcggccagggcgctgttcttccggatggactgggtaagcaccagcccctccccccgccgatcgtgggtgacgtaggccacgccattgcggatgcgctcggcaattccgccgcttttcagaggggtatcctccacagagatactcccctgggaaaaccgctggtcaccaaaaatagctctgatcgccgtccgctggccctgtccctccaagccgcccaaccccacaatctcgccggcccgaacggaaaaactcacgtgctccagctttcccgggagggtcagcccctccacccgcagcagttccgggccgaactgcacctggctgcggtctgggtagatgtcctcaataacgcggcccaccatcatactgaccatgcgctctttgtccagctccccccgctccaaggtgcccaccagcttgccgtccttaagtaccgttacccggtcggccagctccatgatctcgtccagccggtgggaaatatatagcacagacaccccctcctgccgcagttcccgaacgattcgaaacagccgggccacttcgtcctccgccagagcggctgtgggctcgtccagaatcaggacacgggggctgcccagcagagcccgtacgatctccacactttgccgctcagccaggtttagttccgctaccggcctttccggctccaattgatatcccaagcgctggcagcactctcggatctcccggcacatgcctttccggtcggtgcgccccagggagagaacccgttcccgccccagaaacacattttcacacaccgataggttctccagcaggtttgactcctggtggacgaaaccaatgccctttctgtatgcgtcaatggggctggaaatttttaccggatgaccatccagccggagctcccctccgttgggctggaggttcccccccagtatattcatcagggtgctctttcccgccccgttctcacccaccagggcgtggatctctcccctatgtaccgacatggacacgtcatccagggctgtaacgccgggaaagttttttgtgatatgtaagaattccagatagtcctgttccaatacgctcatcctcccgctacgaggtgaggaaagaggcgatcaggtcacccttctcgccctttcccagtgatgccggaagccggccttccacggctatgcatgcactccggtaatgtgtgtgggctccggcctctcttcagccatcagtgatccatcagtgatctgtagctacaccctcgccagtaaggccctgagagccgtcgtttccgtttccgtacagagccacaatatcctcctcggtcattttggtgccacaccagaagctgtcagacagatcccagcgaacatagtcgtccacttggtcattggtaatggtgggaatctccacgataatgtccttctccccctcataggtaccattcaggatctccaggccaagctcggcaccgtaagcaaacagccaagttggcagggaggtggcaatgcaggacaggccgtcgtccttgtactcgctccacagtttcagaaagccgttgcagtcctcacccatcatggggatccagtcccgaccggagtcggcccacacctcgatggctgcacgggtcatatcaccgcccgaagaccagatgccgtcgatgtcatcataagcggccagcaagttttccatgacaggcttggcagtagcatagtcccagtcggcatactcggaggcaattacattgatgccggggtattcggcaaaggcatcctgggcaccctgcatgcgcagcacagcactggacaggccggccatgccatccaggcagacaatattgccctcgccgcccaactcctcgcacagccacttggcgcccacgtagccgaagtcgtaatcccgggccaccacagacacgttgtatttatcggtagcatccgacaggggggaggtacaatttaccaccacaattcccgcgtcgtaggcctcttctaccactgccgccacagattcggcagagatcggctggagaatcaacatatccacgcccttggcgatcagatcctcgatgtcggaaatctgcttgtttacgtcgttatcggcattgtagatatagtactcggagatctgctcattgttgcgcagataggcttccaactcgttgacgcactgtacgccccaggtgttgcccacccagacgttggagaagccaaccttgtaagtcttggtttcaccgtccggcgccgcggattggggggcagtttcaccagcgccgcccgactgactcgggctctctgcaggggtgccgccgcagccggctaccatcgccaggagcataacacaggacaggagcaacgcgatccactttttcattccatacacttcctttcaatatcggagcacaataacatcaaactttcttaatgaaactgcgctcttattgtctatatgttacaatccacttccgatagaatcaatcccatttccggtactttttataacaattccggctggtttcttggaatttttacaggtctgtgctatcatagtacttaagcactaggataaatccttcctttatagatcaatttttgtatttttaaatatgtttttccttctttccccagttggtcctcgtcagaactccaagagctctattctgtcgccgcgttgggaggtgcacgccacgaaacgttttaactgggaatatgaatttgacccctccttccccatccatctgttcccctatcaagtgatgggaaataaagaccctatgcactggcaccgctaccacgagatcggcctgtgcgtgggaggaacagggaaatttgtttatctgaacaaggtctaccctgtaaagccaggggacatcttcatctctaataactacgagagccacgtagccatctctgacggaacccaggactgccgatacctgtttctgattttccttccctcggctatctctgctcctggcagccaagcagtagacagccagtatctgcgttttctaaactataaccccctgagttttcaaaaccgcatccatgccgacgacccggccgccgactggctgggcgaactcatccgcagggcctatcaggtgtatgccaagcggagtcctttctaccaaatggaattggacattctgctgcggcaggtgcttttggccctgtctcaagcccgcagttcgttggagaacgtccagcatgtccccaattttagtccaaagattgctgaggcccaggtatatattaacgaccactacaccgaacatctgactctctctcaggtggcaagccatctgaatttaaatgagtcctattttcgccatttgttcaaggatgagatgcagatctccttcaagtcctatgtcacactgctacggctggcccatgctcaaaagctgctgatcgcctcccagcggagcatcaatgagattatccaagaggtaggttacagtaacattacacagttctataaaatttttgagttaaactataacttgaccccggcggagtatcgccgtcgctatcgggactcctatgcagatgccccgcctctgtaagcttgcctttcgccgcttgctgtgaatgcgctgttttttaccacttggcgggatagcggagcatttaacttgccgcgggcggtcgttagacagcttttatgggcagaagcccgtatccacctttggctgagggctatattgacaatctaggcccaatattgagaggtgcccgctggagaagctctacaaggaccttctgcccgagggacggatagaacggcttgagcgcaggaacagcccagaggcctgcgtcccaagatagtacaaaatatccgccagatcacttcctctgtaatgaacttggtcagagcgcaaaggctagtccccgccaccccgccgaaaagctggaccctgcccaggctggagcaccaggcgatgaagcctctgtcgttaaagcacccccaatccctcctgcggaaagcaaaaaagggcggcgtattggtacccagaaccagctactggactctgtcggtgaggactgccgggctccaaatgggaatgcattgatttggagaggggtgacctccgggttaagcggcagatcacccgtatcaacggagataaggaaaccgaagtcctgccggtgtgcctgtctccccggacagtgttctgcatatgcttcaccaagtgctaaagcgggtggggctgtccggggacttctctgcgtggtttaccctggaaccctgcgcccatgtgaccacggtctcccagcgccaggcggccaaagccacgtggagactgctctgaaatcccatttgggtcagacaaaaacggaaaggaatcaggccgcgaaagaaaccccgtcagaatctgtgaattctgacggggttctgctttttgagaagggctataaacgttttttgatcattccaaggagtgccgatacttaagcgccaaccagacagcaggagcattcaccggctgctagttgccactcaaataagggggtgcaacagcacgggtatgttcccagcattaactcgtgatgaggcgtttcattcagacaaacatggggataaaatacaggccgagacaggtaatgccaatccagaacacgcagataaatgccataaagccccatacatctttcagcttcatgccaactacggacagggcagggatgacatacaagggctgaagcaggttcgtacactcatcgcccagtacaaacgcattcaggcagttgaccaggtcagtaccgggtatggcctttgcagcctccacaatcagcggtccctgcacggtaaactgtccgccctgagaggggataaacagatttaccaggcaggccgacaggaaggtaaagatcggcatggtgtgggcggtggcgacagacgtgatagcattgaccagcacagaacccaagccgccgtccagatacatcatgcccatgatagcgccatagaaggggaactggaggatgatatccgtggccagatgcatggagtctgtgtgggcctccatccactgatgcggctcagggaagaggaagcagttgacacccacaaacaggaaaatcacaaaattcatgttcaggcttcccagaaaccccttggtgacaaaggagtagacggcataggcaaagatgaaggcgccgaccagccacataatggggcggaacgtgttcatcttttccgcaggggtttcggcctttttggtgctcttatagctctttggctccacatcagcctgggtggctacatcgcgcagctccaccagctcgtcttcgccagggcgggtaaacacgacaataacggtaaatgcgattgccagaaccgtaaacaggatgatattcatggggttgtagcaagtctcagccacactcatggtctggccgacaatctgagcataagagctgccctcagtagccagattggaatacagggtggcggaaggccccaggcactgacccagaatcatgcaggtatatccaccagccaccatcatggggaagtgcaggccgcgtacatgcttggcaagctgcatggcgaggatgggagtaactatggtgcagaaggcatagttcatcatagaggtgacatagccgaagatcatcatcagcaccagtgccgtagtccggctgtgtaccatgctggacatcttgttcagcagacggttcacctgtggactgcgggcgcaggtggcgcacacgacaaccataatgcccatctggaaagccaaggtaaactggctgctcaggccgtcccaccaccccaccagaagctccagcgggcttttgccgcacaggagaagggacagcacgaacacaaggaaggtcaagatgatacagaacacaaaagagtccggaataattttctctgcggcgaaattgaactttttgctcatacgccacagcggagtgcccttcagttgggctgctgcttggggctgtttcgacatgggatcgcttcctttctcattctctcgttctatctatggcatgtgagtcgcggaacacactttccttactttccgtagagcatccgaatcagatactcattgagctcggcgttggactgggcgacctgctcaggcgtccacttctggaagccctcgccggtcttgaagccgatcttgcccgcatcgcggagctgcttgagcaggggggagggctcgtgggagtcctccagatcccgcaggatgtagtcgtggatgctataggtcaggtcggtacccaccatgtcggcgttctccatggggccgagctggggcagccgcaggccgaaggagtagcgcaccgcctcgtccacggtggcggcgtcggcgatgccgttctccacgatggagatggcctcccgccacagggcgtgctgcatgcggttggcgatgaagccgggcacgtcctttttgcacagcacgggcttcttgcccacgga

SEQ ID NO: 4304 - DNA, 506 bp, Unknown
  gut microbiota DNA sequence
cagctcggcggagatctcgctggggctcatgacagaggagttggtgcagaagatggtgtcggggcggcagcgcgcctccagcttggcgaaggtctcccgcttgatcttcatgtcctcgaaaacggcttcgatcaccagatcggcgttcttcaccagatcgctgtcgatgtcgttggtaaaggagatgcgggagagacggtcgctcagctcctgctcggtgatgacgcccttgtccaggagctgcctggtgttggtgcggatgcccgcctccacatcagtggggtacagatcatacatgcccacctggaagctggggttggacgcaaacacatagccgatgttcttgcccatcatgcccgcgccacagatgagaatgttcttgatttctttcatgctgctcgacttccttttttcacttcaagcccaaaatcccgcgggcctcggcgggggtggcgacctgcttgccgtactcctcgatgacgcggcgggcgcgctccacgaactgc

SEQ ID NO: 4305 - DNA, 13566 bp, Unknown
  gut microbiota DNA sequence
gctatttattttagcactcacactttcgcttgtcaagaacttttttcaaacttttctgaggtttttcagcctcacagccgttctttttgttcttttcaagcaggttcccacctctcagcgcgaactcatttagtttaccacgctctcactcatttgtcaagcacttttttcagcccgcttccgaaagtccgtccggcttccgcccggtctcttccatctgctttcctgttttttcatgccctccgtgaggcgctcagttagaataccagctttcctcctctttgtcaacacctttttcccttttttcgcgctttttttctgtccagcaatcccgggttgaagtactcctctaaatatgttacccttattctactattataaataacagaaccggaggaattcaggcatgcccatcaagatcccagacgctctgcccgccactgcgattctggagagcgaaaacatctttgttatgacggaataccgggctctgcaccaggatatccgtcctttgaaggttttgattctcaatctaatgcccactaagatcgtgacggaaactcagatcctgcgcaagctgtccaatacgccggtacagatccaggtggaactgctgcgcacggccagctaccagtcccagcacaccgacgaggaccacctggcctccttttataccacctttgaccaggtaagggaccgtaacttcgacggaatgatcatcaccggcgctccagtggaaaatctggagttcaaccaggtggactactggccggagctgtgcgaaattatggcgtggagccgcacccacgtccactccaccctccacatctgctggggcgcccaggcggggctgtactttcatcatggcatcgagaagcgctccctgcccaggaagctcttcggtgtgtacgagcaccgggtgctcaagcccagttcccccctgtttcgcggctttgacgatgtgttctgtgccccccactcccgctataccgaggtgtgggagaaggatattcgcgccgcaccggggctggagctgctggccacctcctctgaggcaggagtctacgctgtcaagacggaggacagcagccagttcttcatcatgggacaccccgagtatgacccggacaccctagccagagagtaccgccgggatattgacaaggggctggacatcgccgtgcccgcccactactttcccgaggatgatcccgcccgcgtccctgtggtccgctggcgcagcgcgggccaattgctctataccaactggctgaattactacctgtaccaaacgactccatacgacttgtcaaaggtgcgctgaacggcacgccgggaaggagcttccgcttctccccggcgtgctttgttaagatttcattcggatttttgcccggatttgactaataatcctcattttgctatactgatatggactacactggaaaaagggggcttccgctttgcttcgttttgaacacgtttctctctcctacgggagtcagaaaattatcgacgacatctcctttgaaatccaagaggggcagatggcggtcctgatcggctcgtccggctgcggcaagaccaccacgctgaagatgatcaaccgcctgatcgaacccaccagcggcaagatctatataaacggcaaggatatcgccgcccaggacagggtggagctgcgccgccacatcggctatgtcatccagcagatcggcctgtttcccaacatgaccgtggcccagaacatctgcgtggtgcccaatctgctgaaatacagcaaggaggcgtgcgacaagatcgtccatgagctgctggagctggtcaacctgccctatgagcagtacgcccacaagtacccctccgagatgtccggcgggcagcagcagcgcatcggcattctccgtgccctggccgcctcgccccccatcgtgctgatggacgagcccttctccgccctggaccccatgacccggcgcaccctccagcaggaggtgcgctccctccagcagaagctgaacaagacctttgtgtttgtcacccacgatatggaggaggcgctggacctggccgatgtgatcattttcatggatcacggcaggatcgtccagatggccccgccagaggagatgctggcccgcccggccagcggtctcatccaggatttcctgggcaagtttatcaacacgccctcccataaggcgctgaccgccgccgacttcatgcgcaccggcgtctacaccgtctccctccaccgcggcaccaatgagtgtgtgcgcaagatgcagcgctacaacgtggacaccctgatcgtggtggacgacgcaggccgctacgcgggcacggtttccatcgcggacatccgcctcaacggccacgtggttaccgacatcgctcccctggtacgcaccgccacccccaccgtccactccggcgacgacgccaagggctgctttgagcagctcatctccagcggcgccagctatctggtggtgctgggcgaggcggaacaggtggagggcatcatcaccaagaccagcatggcctctgccatggcggaacagctctgggggtgacggtatgggtgagtttctggcgcgcaacgccgaggccctgatccgaagcatcggcgtgcatctgttctacaccctggtctcggtggccatcggctttgtcctgggcctggggctgggtatcctcctctcccgctttcccaggcaggcccggttcatcctgcccctgctctccctgttcaacaccatccccggcgtggtctttatcggcctgctgttcctggtgctccacatccagcccgccaccgtcctcatcgccctgtccatctatgccatgttcccggtgctgaaaaacaccttcaccgggctgctgggggtggacgcgcagtataaggaggcggcacagggctgcggcatgagtcccgcccagcagctcctccgggtggagctgcccctggccatgcccaccatcatcggcgggctgcgcatgtccatggtctacaccgtgagctgggccgtgctggccgccatgatcggcctgggcggcctgggcaccttcatctaccagggcgtgcagtccagcaacaacgccctgatcctgctgggcgccgtcccggcggccctgctggccttcctcctgggcgggctcatcgatctgctccagaagcatgtggtgcccaagggactgcggaaggggggcggtgacgcatgaccctctccatggtggtggaacacctgtccatggtggtgttcgccattgtcatcgccattctcatcggggtgcccctgggcctgctgtgctatctcagccgcgcggcccggggcgtggtcctgcgggtggtggacctcattcagaccacccccgccctggccctgctgggcatcatcatggtcacccccctgggggcgggcaagccaacagtgatcctggggctggccctctactccctcctgcccatcgtgcgcaacgttaccctggggctgagccaggtgtcccccgctgtcaaggaggcggccaaggggatggggatgacccgcgtctacagcctcttccacgtggaactccccctggccatgcccatgctgttcaccggcctgcgcatcgccgtggtcaacgccatcggcacggcggtattcgcctcctcggtgggcggcggcggcctgggcaacctcatcaataccggcatccgccgcaacgacgtggccatgatcctctccggcaccgcggcgctgatggccatggccctgctgctggacaacctgatggccttctgcgagcgccgcatgggccggcgggacagccgccgccgccccggccggcacgccgttctccgccggcggctcacggcaggcgcggcggccgtcctggtggccgccctgtgcctgccctccctgctgcccaaggacacctccagcacccttgtcctctacgacggggagttctccgaggttcagttggtcaaccgcatggtgcagcagcttgtggaggaccgcacggggctggaggtcagcatactcgaccccatgacctcgatcaacaacttcaaggagctcaccgcgcgggagccgagctgtgacctgatgtatacctgggacggcaccatcctgaccaccttcctggggctggacaccagtgacatccctgcggggcagagcctttacgacttcgtcaacggccgcatcggggagcagtacggcgcccgtatgctgggcaagatcggcgtggacaacacctactccatcggcgtcacccaggcggtgatggatacctaccaccccgcggccatcagcgatctggcccccatcgccggggagctgcgcttcggcgcggagcaggacttttacaccgatgccggcagcatgaagtacggccccttcgtggcgttctacggcctccagttccaggaggccattcaggtggacatcatgctgaagtacaccgccatcaagtcgggcagctacgatgtcatggtggtgtacgccaccgacggtctgaacaaggacgccaatctgaccattttggaggacgacaaatccttcttccccgagtacaatggggtgctcaccgtccgggatggtctcttcgaggacttcgccgaccgggcgccggagctggagcagaccctggagctgctcaccggccaattcaccaacgaggtcatgagtgagctgacctaccgggtggacgtgctgggagaggacgtggacctggtggccgcagactacctgcacaccctcggcctgctgtagtgcaaagcggcgccgcctggaacgggcggcgccgcttttgcttgtcctttttcctccggcgggatataataggtaggaaacgacccggaggaaaggagtccccaccatgaagatctgctatgaaaccgtgcggaattcagaggagatccgcacctatatcacccaagccgaccagtccctgctggcccggggctttaccgagcacagctttgcccacgtcacccgctgcgccgagtttgccgcccgcatcctggcccagctcggatatggagagcacgaccaggagctggcccgcatcgccggctttatgcacgacatcggcaacgtggtcaaccgccacgaccacgcccagaccggcgccgtcatggccttccgtattctggacaagatgggcatggagcccgctgacgtggccgccgtcatcaccgccatcggccaccacgacgatcccaccgccttccccgtcaatccggttgccgcggcgttgatcctggcagacaagaccgatgtgcgccgcagccgggtgcgcaacaaggagcatcagagcttcgacatccatgaccgggtcaactatgccgccgagcgttccgagctgacactggacccggagcggcgcaccctcaccctctccctgggcatcaacaccgaattctgcgccgtgatggactacttcgagatctttctggagcggatgctcctctgccgccgtgcggcggaattcctggagctgaccttcaagctggatatcaacggcctgagcctgctgtaaacgcacagccatggcggacgctcctcctgtgcagcaaaaactccagagacagcacaaccccccggccatccatcgtgaccggggggctaccgttcgatctggggttctaccactacacattacctcgcactttctacagattttaccacgcggtggagcaacagaacgggaaattcctttgtttcactgtctcctgcaacaaatcggcacttggtttccgtcttcggcgaacttcacctcggaggtcttccctttgtgcatctcacttcattgagtccgttgggaacgagtgcaagcgtggaacttcaggtattcggtcttccaatacgctgtggtcggaaaagaatgagctttctcagcccatggggctcacctctttctttttctgtctagatcatactaccatccatcccttttgtcaagtgtttttgtttgaattgcctcattttttgcaagccggacagtaagagggagtgccgcctgggcggccctccctcttcccgctctttatccccggaaaaagagctggagaatcacgccgtagagcacggaggcgctgatgccgtaggccagcaccggcccggcgatcacaaacatcttggcgcccacgcccatgaccagcccctcgcacttgaattccagcgccggggagaccaccgcgttggcaaacccggtgatgggtaccagcgtgcccgcccctgcgtgcttggccagcttatcgaacagcccaagcccggtaaaaagggccgccaggaagatgatggtcaccgacacggcggtgcctgcggtgttctcgttcagcccgcacccgcggaacagattcagcagggcctgtccgccggtgcagatcagcccgcccgtcacaaaagcccacagcaggtttttccacaggggcgagggcttggccttctggctgacgtagcggccatactcttgattggtcatatccatgcgtccgcagcctccttttgtcctttgtaaggtttcccttgacagcgaagtttatacgtgctatcttattttagtcatttactaaattactaatttactgattggaggccgaccatatgcacatccccaccaccctcaagcacaagcccgtcctggtggccgaggactacggtcgcatcgacggccgcaccgcctatggctccgacgcccagggcctctccctgggcctggcccagtggaacgaccggggcaaggtggacatctccgccaaggtgtggcggcacaccggggagaagtggtcccgccagtcggaggagctgcccctccaccgggtgctggatctggcgattctggcctgccgggcccagctctatttccaggaggaggcctaccgcttccccaggggctacgacccggagcatccccaggtggaccgcatcggcctgcagggggacgccatgacggtggaggtatgcacctccagcgaccacatcgacgaggatctccgtctgttccaggacgccctggcccgggacggcgagctgctcggggagcgcatgcgagtgctggcccggctcctgggggagctgggctgccggggctgagcgcggaacaaacacgggcccccggtctcaaagagaccgggggcccgtgttgtttatccgtccttcacagcatggcgtagagcagctttgccacctcgccgcgggtgagcagatcgttggggcggatgcggttgtcgttgccggtgatcacaccctggcccaccagactcctgaggtagccggccgcccagtcgggcacctgccccgcgtcggagaaggtgagctccggctcggcgtagcccctggcctgggtgcggcccagaatggtcatggcctcggcccggctgatggtggccagggcgttgacggtgaggccgctctcgttggccccgcccttcaggatgcccaggctgtacatggccttgacctcattcagcgcccagtccggaatggaggcggcatccacgaagggcagctccacattggcgtactgggtgagatccaggtccatccaccgggccaccatggcgaagaactccgcgcgggtgatgttcttttccggctgatagacagggatctccacgccggtgcccttggacacgccggtgtcatagaggtaggtggcgtagggctcggcccagtgacccgccatatccccaaagggggaggtacgtgtcccggcgggcttgatatccgcggaggcgcgggccaggttgccgctggcgtcgcaggcggtgacgctcacccgatggtagccgctgtcggcggcaggcagcgtggcggtcagggttccggaggcctcgttccaggtaaagttcagagtcgccccgtcataggtcaggctcacattggcctggggaatcgtgcggtccacgttgtccgacacggcggcggtgagctgagtgccgctgacggacaggcggacggtgggggcaatggtgtcgctgacattctcattggaggtggtgaactggtccagccagatggtcccggccgggccgcccgcgccgccgccatagatcacgtccaggctggtgagggtggccgcgccctcgggcagctcggcgctgacgtacttccatccggtgaagtccagggcggtcagcaggaactgccggctctggaggctggcgtccgccgccgtggccatcagggtattgcccgagccgtcgccgtacacccacacgcccagccagctctctccggcagggatgggcagcgcgctgttcaggctcgccgttccgcctgtggaggcgtcataggtcatcctcaggctctgtcggccgttgtggacgtagtccaggccggtctcggccccgtaggaggccgtgctggtggcaccgaaggaggccaggtcgccctcacagtcctccagcgtcttgacgtggcccgcgatactcaccggcacggtgagtgtcttgcccccggcggagacggtgaggttaccgctggcgctctttgtcccggcggtaaagacgccgtttgcgtccaccgtgcccacctctgggtccgctgaccaggtgaagcaggtatcctgggcggtgagggccagcttgcggtaagaggcggaggccttcagatccacctggccgccggggtccaggttcaggctggcgaccgccgcgccggtggcttcattggtcagggtgatctcgtccggggtgcggacggtggtgatgtagccggtgccggaggcggagccgtcggtggcggtgacctgggcaaagccgctctccgccccggcggtaaagaggccgttctcgtccacagtgccgccgccgctggacaccgaccagctcacgccgccgccgctggtggggaagtagctggtgtccagcccggtagcggagagctgcaccgtggccccggagagcaggatgctgtcggaaggggtcacgtagtaggaggccagctcgccggtgggctggagcccggtggtgaggaagatggcggtgctgttcttccgctggctgccgtcggagggcttgttgaccacctgcatgccctcctggtcggggtaggtgacaccgatggtggtggagccgccgccgtccatgcagatggcctccacgcatcccagctcaatgaggcgctgggccacctggccctgggtggcacccacgctgtaaccgggctgctttccatccatggcgtagaagatcacagtgccgtcagccttgatgccgatggcgggccaagcggtgcgggaggcgtccagtccggagtccacctgcccgttggtgaccagcttggacacgccgcccagggcctggaccgcctggctccagcgctgatcgctgctggacacggtaagggtgacggtatcccccggctgaagggcccgcaggcgggccagggcctcctcgctctccttggcgttcagggtgagcacggctttgccctcgggaatggggatacttccggtggactccagcacctgctccaccacatactgggtctgccggccgatggtaggcttaacggcgtaggtgccggtgccgtcatccaccggggacagaatcacatctacccccggctcggtgttctgggtggtagcggcgaagtcgtcggtcagcagggtcaggccgcccacagcggcactgtccgtcagctttcgtaccttattgatgccgccgcccagctttacggcctgccctccgaaggacacggagacagacagcccgttgcgggcgatgaaagcggtgccgtcggcgttgaagccgatggcccaggtgtcgttgtagtagcctgtggcccgcacaatcccgtcggtcaccaccagtccggtgggcgcgccggtggagagcacataccagtcgccgttcaggccggacaccacccgtttgccctggctctccagggtctgggccatgccggacagggtcacccggtcggtaaccttggagccgtaggccaccgtgggcactacgctggcgttgggggaatactccacatagtactcggtgcgcaggtcggaataggtatcgctccagaacacgttctttcccaagctggccccctgggagaggggcgcccgcccggtatgtacgtcccagcccatggcctgggacgccgaggccgcggtgacagtcagggccagcgccagacccagggccgccccccgccggatccattgtttcatacttgtcctcctaatatcgtctgtgaaacgggtcatacaaaaattatgttaacacaaaagcccccgcttgtaaacaagcgggggccaggatttgtcaatccaattcttacaattttcttccacgggcggcgggcggtcttaaaatcccgcccttacccctcctccggcctgccctgcttcagccggggcagagtcttttccagtgtcgcctcctcctgaatggacagcagctccccaatgagctggttggacaccaggaagcccttggccgtcagattccagcggcggtcgtgccgctccgcccagccctggcgctcgtactcctccagcttctgctcgatgggatcgaagttcatgaagaactcccggcggtactcccactcctcgatgccccgggtggtgcgcaggcggagcatcaaatattcgccgccccgctcccgctgggggatcaggtcggactcgtcgatgacggtgcccccctccagcacggcggcaatatagccctccagatcccggataaaagagtagcgccgcccgccgaagtcggagtgggcccccggcccgaagccgatgtagggccggcccatccagtatttcaggttgtgccgggactggaagcccgcccgggcaaagttagagatctcatactggcggtagcccgccgccgccagccgctctaccgtccaaagatacatatccgcctgctggtcgtcgtcgggcagcttctccccccgcaccacccggtcgtccaggggagtgcccggctccaccttgaggccgtagcagctcaggtgctccggctccagctccagcacctgctccacggtgtcccgccaccctgccatatcctggttgggcaggccgtagatcagatccaggctgatgtttttgatcttggcctctcgggctgcggccaccgcccgctgggcctgctggaaggtatgggggcggtgcaggcagttcagctcacagtcgtgggcagactggacgcccagggagatacggtttacccccgcccgccggagggcctgaaacaccttcttatccacactgtccgggttgcactccacggtaatctccgcgtccttggccagatcgaagcgcttggccacggttttgagcacctcccgcagccgcttctccccgtaaaagctgggggtgccgccgccgaagtagacggtgtccacctgccagccccgggtgaggggcgcggtctccttcatatgggcgagcagcgccttttggtagtcgtccatccggccctccttccccgccagggagtagaagtcgcagtagtcgcacttgctgcggcagaaggggatgtggacataaaggcccagtttttccgccattggaggcacctcgtttccattgcttggattctaattgattattatactacaaaatccgccgtttgaaaagccgccgcgcccgtgctatactgggaaaaaacgcaaggaggtcgcaaacatggcccagcagtccccccgccgcctggagctgaccgtgacggcggaccaggcgggggaaaaaatcgacaccctgctgcggcgggagctccgcctgtcggggacggtgatccgccgtgtcaagtggctggacgacggcatcctgctggacgggatgcgggtcaccaccgcctgccgcccggcggcggggcaggtgctctccgtccgggtggccgatcccgacggccagggggacatggtgcccacccccggccccctggatatcgtgtacgaggacggggatctgctggtgctcaacaaggcccccggcgtgctggtccaccccggtcccggccactacagcgatacgctctgtaattatatcgcctggtattacaaaaaagcggggatttccgccgacgtccaccccgtccagcggctggacaagggcacctccggcctgctggtggtggccaagcacccccacgcccaggagcagctcaagggccagctccacacccccgccttccggcggatctacctggcggtgtgcgagggaatcccccggccgccggaggggcgcatcgacgcccccatcggccgtgtccccggctccctcatggcccgccaggtggaccctgcgggccagcccgcctccacccgctaccgggtgctccgcaccgggcagggccgcgccctggtggagctggagctggacaccggccgcacccaccagatccgggtgcacatggcccacaccggccaccccctcatcggcgacttcctctacggcacggaggatcacagcctcatctcccgccccgccctccactccgcccggctctccctccgccaccccgtcaccggggaacccatggcctgggagcagcctctgccggaggacatggcccggctggtatgaacgggcggctttcccgcacgcgggaaagccgcccgtttatttatacccccgtgagatcaaaggccggaatgtactccgactgcgcggcctccgccccctgggtgaagccctccagtcccagggcgtccatatagtcctcggccgagcgcacctccgagggccgcagccgacggttcagcgcggggaactccgccgcccgcccccaggggaggtactggctcatgagggagaaggccaccgcgccgggggcgaagtgctccgccacccagtccatcacccgcttggcctcggccaatttcccgggaaggagcaggtgccggatgataacaccctgttttaacaggccgtcctgatacacgcaggggccggtctggcggaacatctccaggatggccgcctgggccgcctccgggtagtccgccgcgccggaatactgctccgcgtactccggcgtgacatacttcaggtcgggcaggtagatctggattttcccctccaggccccgcagggtgtccacccggtcgtagccgccggagttccacaccaccggcaccggcaaaggctgggccagcagccgggccaccgcgtgggcgtagtgggtgggattgaccaggttgatgttgtgggccccctggtcgatgagctcgaagcagatcgcccgcagccgttccagggagatgggccgtccaaagtcctggtggctgatggcgtcgttctggcagaagacgcaccccagggagcagccggagaaaaacacggtgccggaaccccgcgtgcccgagatgggcggctcctcccactggtggagggccgcacgggccaccaccggcgcctccggcatacggcatacgccccggccctcggtctccgtgcgcagggccccgcaccggcgggggcagagattgcagatcattggatttctcctccttcccaggtttgccggctgcgggcggggacaagccccgcccctacgccccagcacgtatctccgtctccccccatccaggctggtgcggcgggggcgtt

SEQ ID NO: 4306 - DNA, 20287 bp, Unknown
  gut microbiota DNA sequence
ggaatccaccgggcggacggcgccttcatcgccgaaggagtttccgccgccgccaacgacggcttcggccacacacagcttggggggctggcggcgctgctggccgacctcctccggcagcgggagccctccgccaaggtgcggggcatcgagttgtccctcccccagcgctgcggcgcccacagcgcgtcccagaccgacatcgacgaggcgtttctggcgggcaaggcggccgtggaggctgcggtcgccgggtattccgacaagatggtggccttccggtgcacccgggagggaggctaccgctgcgagactgtgctggaacccctggatattgtggccaacgcggaaaagacggttccccgcgcctggatcaacgccgatgggaacggcctggagcagcccttcatcgactacgtgctccccctgattcagggcgtccctcgggccccgcaggaacactccctcccccgctatgcacggctaaaaaaggtgctggtctctcaggaggcgtaaaacttgctgaaaaagcggccctgtgcatttgcacagggccgctttttatctggctcagtctaggaaatttcctttgaaaaagttctcgtttcccagcttttctgccgtcaggcgaaagagaacgcagccgtcgggacacacaatatccttgcagtaggggccgcttccgcctacgttttccagatcgccgccgcttcggacggcctccatgagggggaaaagcagtagcatggccttggagcagatcccctgcccgtcctgattgacggggcagccataggtacaggtataccggtctccgacctcctctccgttgcggcaataccgctcagtatggtcgccccggaggaagccggttacctcgatctgaaactcgtactcctcatcgtaccactttttcatgcccgctctccgctcaatgcacgccggtgagggcgcgcatgacctcataggtgtgctgatccagactcttggtcatctggagggcctcggtgatgtcatagtccacatagttctccccctgaagggccaccacccggcaggtcttgccctcggccagcaggcgcaccgcctcatagcccatgtaggtagcggtgatccggtcgcgggaggagggggagccgccccgctggatgtgtcccagcacagtgacccgggtatccagggcggtagcctcctcgatgaccttgccgatggagtaggcgccgccctctacgccctcggccacgatgatcatgaagtgggtacggccggccagacgggcccggcggatgggctccagcaggtcggcttcatagtccacagggtgctccgggacgatcacggcagtagcgccgcaggccacgcctacggtgagggccagatggcccgcccggtggcccatgacctccaccacggaacagcgctcgtgagactgcatggtgtcccgcagcttgtcgatagactccagcgcagtgttgcaggcggtgtcatagccgatggtatagctggaacaggcaatgtcgttgtcaatggtgccgggaatgcctacaacggaaagtcctctcttggccaggcagagcaggccgctgaaggtgccatcgccgccgatgcccactagggcgtccagccccagcatcttgcaggtagccaccgccctctcctggccagcgggggttttgaactcctcactgcgggcggagtagagcatggtgccgccccggcgggacaagtcgcttacgctctcaaaggtcagcttggtgaaatcgccgttgatcagaccgtggtagccccggcggatgcccacacattcaatacccatgtgcagagaggtacgcaccactgcccggatggcggcattcataccaggggcatcgcccccgctggtaaacacgccgatgcggcgtactgctttttccatattcaatatcctcctcttaaaccttcagttccgtctctttgccctgtagggcggcagcatagcgctccaacacgggctggacatcgtgagcaaggaaatcctccacctgctgcgggcagcgcccaatatagcgggccggctccaaatgggcggtcagctcctcccggctcagcatggagaaggccgggtcggcggcgatgagctcgatcaggttgttgctaaggccacagtcctttacgttggctcctgcctcctgggagagcacgcggatacgctcgtggagctcttgccggttgccgccccgcttcacagcgtccatcaggatgttctcactggccatgaagggcaactcctcccgcacgtggcgctcgatcactttctcatggaccaccagtcctccggccacgttggcatagatgctcagaatggcatccaccgccaggaaagcctcgggcacggacagacgcttgttggccgagtcgtccagagtacgctcgaaccactgggcggaggcggtgaccgcagggttgaccgcgtcggccatcacatagcgggccagggcgcagatgcgctcgcagcgcatgggattgcgcttgtagggcatggcggaggaaccgatctggtttttctcaaagggctcctccacctccttcaggtggcagagcaggcgcagatcggtggcgaacttgctggcagactgggcaatgccggagagggtggacaacaccgcatagtccatcttgcgggaataggtctgacccgaaacgggcaccacggcgtcgaagcccatctcggcggcgatcttccgctccagcgcccggcatttctcatggtctccctcgaacagctccaggaaggatgcctgagtgccggtggtgcccttgctgcccagcagcttcagagaggcgatgcggtgctccacctcctccagatccatcagcagctcgttcatccagagggtggcccgcttccccaccgtcaccagttgggcgggctggaagtgggtgaagcccagggtgggcagggccttgtactgctccgcgaactccgtcaggcgggccagcacccgtaccagcttgtcgcgcaccagcagaagggcttcccgcatgaggatcacatcggtgttgtcccccacatagcagctcgtggctcccaggtggatgatgggcatagctttggggcacgcctcgccataggtgtggacgtgtgccatcacgtcgtggcggagcttcttttcatacgccgcggctttgtcgtagtcaatgtcggtgaggtgggcctccagctcgtccacctgctcctgggtcaccggcagtcccagctccatctcggcccgggccagggcgacccacaggcggcgccaggtggaaaatttcttgtcgggcgaaaagatatactgcatctcgtcgctggcgtagcgggaggacagcgggctctcataacggtcgtgcatgcaaagacctctttctcctcagatttcactggctagaatatcataaaacgggggcggacacaagttccgccccctgtttttgccgttgtcattccgccaaaaatttttccagacggtccaggccctctttgatattttccatagaagtggcgtaggaccagcggacgaagttgggcgctccgaagccggagccaggtaccaccgccaccaggccgtacttcaggaaggcgtcggcgaacacgtcgtcattggtgatctccaccccgtgaatggtcttgccgagaagctgctccaggttcatcatcacatagaacgccccctccggctggatgcagctcacgccggggatggcgttcatccgctccacaatgtagttgcggcgctgctcaaaggcctggcgcatggtctcaatctccgcctgggaaccggagagggccacagcggcggccctctgggagatggccaccggagaaccggtggagtggctgacgtaattggccatcaccttggcgatggcgtcgttggcgcaggcgtaaccgatgcgccagccggtcatggcgtatgccttggatacgccgttgaccaggatggtgcgctccttggcgtcggcgctgagggaggcgaagctggtgaaggtgcggccgtcgtaggccaggcaggcgtagatctcgtcggaaatcacataaatatccgcctgggtacacacagcggcgatggcctccagctcctcccggtcgtacatcatgccggttgggttggagggattgttgagcagaatggccttggtcctgggggtgatggcggcagagagcttttccgctgtcagcttgaagtgttctgcctcggtggcggtcaccaccaccggcacgccgcccaccatcttgatgagctcaatgtagctcacccagtagggcgccggcagaatgacctcgtcaccggggttgaccactgcccgcagagccaggtagaccaggtgcttggcgccgctgctcaccaccacttggctgggcttgtactccagtccgtagtcggccttcatgcggccgcacaccgcctgacgcagctccaccgtgccggctgcgggggtatagcgggtgatgttctgctcaatggccgcaatgccggctgccttgatgttgtcgggggtgttgaagtcgggctcccccgctccgaagccgatcacatccacaccgtcggccttcatctgcttgaacatggcgtcgatagccatggtggtggaggcctgtacggccgatgcaatcctggacagctctttcactgaaatcgctcccttgtactttaaaatcgtattttattatatgcggctttgcgacgttttgcaagtccttaatcctaaaaatgcaaaatcggcgcctgccgactggcagacgccgataaactcaggagtggctccgggcgctgaccacgcggacaatcaccgtgctgagcaccaggttaatcaacagttccagaacaaaattgatgctgaccatagtaaagatcatataagtaatgaccgtctgcccagcaccggtggcccatgcctccaaataggtcgggaacaggaaaaacagacccagcaggaacaggccggtattgaccaccgggctgacgatgccagcggcaatggagccgcccagcatacgaccgctgctgtgggatttgccgccccaggcgatggcccgatagaccaggccggcagccagaccggccaggatgcccttgcccaagcagaccaaggcggtcaggaagggattggcattccacaggatcgctccaccggggtcccagcccaaaatgcaggccaacaatacgacggcaccgaataccccgcccaggcacgcgcctgccttcgggccgtacagggccgcgccgatcaggatcggcgccagggccagcgtgatggtgaaggggccgaacttgacaaaactggcgactacctgcaggacaacaataatggccgtcatcagggccagtccggtcaggcgtctggtcttttcgcttgctctcatatgaaattacctcctgctgccgctccttacctggaaggatgcagcgcaatttatttacccacggcagacagccgttgagtacaaaaaatggcgtggccggtcacgctttccggtacttttttgcgtttttctggtagagcaaataaagtccggtcatgatcagatcggcgtcatattgaatgggacgcttgcagtagcgcagaatccgaggggcatttccgccggtggccacggtggtgacgctttggcctatgctctcctcaatgcgctccagcatcccgtccaccatgctggcgtgtccgtagagcacgccggagcgcatggcctcctctgtggtgtggcccatgaggcccaccggggaggcggtttcaatggagataggcggaagagcggccgcccgctccgacagagcgtccagcgccagggccagccccggcataatgatgcagccctcgtatacgctgcctacaatgagggacaaagaggtggccgtacccatgtccaccatgacaatggggcttggatatttggcgatcgccgccaccgaagaggccacgatgtcactgcccaactggttgtggatctcggccttgatgttcaaaccggtcctgatgccagggcccaccaccatgggggggatgccggtcaggcgggcgatggcatcggtgaagatggtagtcagcggcggaacgacgctggagaggatggccccgtctaccgtgcacgcatccgccccatagagctgaaagacgcccaggagctcgatggcgcactgatcccgggtcttgctgcgggaggtctccagcagggcgcggaacaataactcccctgtaccgttgaacaggccgaccgtcgtattggaattgcccacgtctaccgccagaatcataacatatccccctccccacaaatatttttattattatagcaataaatacagcgaaagatcaagctggtatctgctgttcctaccccttttcggagcttggaactgtgttcaggagtttggtcaagtctcctatggaggcacccattttgaccgaaacctcctccatagtcatgccggaagccagaaaacggcggattaccatccccatgtcctcccccacttcaatgaggtgcccatctggatcgtaaaagcgtgccacccgctggccccagtcgtgttcgatgatgccgccaagccgttctatacccggataggcatccagcttttcaataaatccatcaaaatccgtctcttcaaagaccaattccatattgttgggctttttccgcacgtgcatactcggcactccaattagccagtcaaaatcctgttgcagcgccagcccacaggtaaaggcaatatttctcccgtaatcctgggccacctccagaccaaacaattcctgataaaacgcttttgcagcgtgaatgtccctgacagacagaagtgcgcagatatatttcattggtttgttcccctctccgttacaagatagagccagtataccatatgaagtgggcaaacacaagaaacagggcagccttttggctgccctgttttcatccaatatgacggcagatgagttcgcccatcttttgggtgccgatgggggtgacgcccggcccggcgatgtcgggggtgcgccagccttcggccagtaccgcgtccactgccgcctccaccgcgtcggcctcggcggccaggtggaaggagtagcggaacatcatggccaccgacaggatggtggcgatggggttggccttgtcctgacccgcaatgtcgggggcggagccgtggatcggctcgtagaggccgggggcggtatcgccgatggaggcggatggcagcaggccgatggagccggtgaccatgctcgcctcatcggagagaatgtcgccgaacatgttctcagtaaccaccacgtcgaactggccggggtctttcacaagctgcatggcgcagttgtccaccagcacatcctcgtactgcacgtcgggatactcctccgccagccggtgcatgacggagcgccacaggcgggaggtttccagcacattggccttgtccacactggacaccttcttgcggcggaggctggccagctcaaaggcccggcggccgatgcgctcaatctcctgctcggaataggccatccggtcgacgcactccacgccccggtcaggggtgtcgtaccgctcccgctggccgaagtagatgccgccggtcagctcccgcaccatcatcaggtcaatgcccttctccgcggtctcccttttcagaggacaggcgtccgccatagcggggcgcagggcggcggggcgcagattggcatacaggcccagatcctttcggatggccagcagggcggtctcgggccgctgctcggcgggcttgtcggagccccacttggggccgcccacagcgcccagcagcaccgcgtcgcaggcccgacacttctcggcggtgccgtcgggatagctcttccccaccgcgtcggtggcgcagccgcccagcagcacctcctcataggtgaagctgtggccgaacttctggccgacggcctccagcaccttgacggcctcccccaccacttcggggccaatgccgtcgccgcggatgagcgcaattttataattcatttcgccgcacctctcgccttcagggatttgagcaggccgccgttgtccacgatgccctggacgaaggcgggcaggggcgcggcctgataggtcttgccggtggtctcgtcggtgatcacgccggtgctgaagtccacgctcaccgtgtcgccggcctggatgccctccgccgcctcggcgcactccagaatggggaaaccgatgttgatggcgttgcggtagaagatgcgggcgaaggaaggcgcgatgacgcacttgacgccgcaggccttgatggacaggggggcgtgctcccgggaggagccgcagccgaagttggccccggccacgatgatgtcgcccggctccaccgtggaggtgaagccggcgtcgatgtcctccatacagtgggaggccagggacttttcatcgggggcgttgagatatcgggcgggaatgattacgtcggtatccacgttgtcgccgtatttgtaaaccttcattgccttacacctccatcagagcttgcgggggtccgccacacagcccgccacggcggacgcggcggccaccgcggggttggccaggatgatctcggagctgacggggcccatacggcccacgaagttgcggttggtggtggagatggcccgctccccgtcggagagcacgcccatgtggccgcccaggcaggggccgcaggtgggggtggaaacggcgcagccggcctcgataaaggtctggatcagcccctcggccatggcgtccaggatgatctgctgggtggcggggatgacgatgcagcgcactccggcggccactttgcggcccttgagcaccgccgcggcctggcggagatcctccagacggccgttggtgcaggagccgatcaccacctggtcaatgtgggtacccgccgcctggtccacggtgcgggtgttggagggcaggtgcggcagggcaaccgtgggctggagggtatccagatcaatgaccacctcccgctcgtactcggcgtcggcatcgggctccaccgcctcccaggtgcgagtgacccggccgtccagataggcccgggtcttgtcgtccacggggaagatgccgttcttggccccggcttcaatggccatgttggcgatggtgaagcggtcgtccatggacagggaggctaccccttccccgccgaactccagggacttgtaaagggcgccgtccacgccgatggtaccgataaggtggaggatcacgtccttgccggatacacagggctggagtttgcccttgagggtgaccttgatggcggaggggatgcggaaccaggccagtcctgtggccatgcctgcggccatatcggtagagcccacgccggtggagaacatgttcaccgcgccataggtacaggtgtgggagtcggcgccgatcatggcctcgccgggggcggtcaggccctgctcgggcaggagggcgtgctctacccccatgcagcccacatcgtagaaatgggtgatgtcaaagcgcttggcgaactcccgcacctgggcgcagagctgggcggccttgatatccttgcagggggtgtagtgatccagaaccagcgcgatcttttcccggtcgaacacctgggtcagccccgccttgttgaactcggcgatggccaccggggtggtgatatcgttgcccagcaccagatccagcttgccctccaccagctggccggggacaacatgctccaggccggcgtgcctggccaggatcttttgggtcatggtcattcccatggttgggtgcctcctttttatttcagtggcaccagaatagcatggccccttgccaaaagaatgtaaagcgtgttacaattgaccaaacaggaggtgaacgcaatggcgcaggaccacatctgggcgccgctggcggaggggcagcccacccaccatcgggagccggggcagatgatctatttacaggacacggaggccgcgcagttttactatatcctcaccgggacagtgaagtgctttatcagctcccccgacggggacgagcgcaccctggccctccaccacggcggggagctcatcggcgaggcgtccttctttgaccggcagccacgggtctcctccgccgtggcggtcaccccgtgcgagctgatctcggtgaaccggcagcatctggaggcggtgtttgcccgccggccggacctggccatctccatgctggagtatctggcccgcacggtgcgcctgctctctggccatgtagacagcgcctttttgcaggcggacaagcgcatcgcccgccatctgctggccctcgagccggacgccaggggtctgctccactgtacccatgaggagatcggctcctctgtgggggtgagccgggtaacggtgagccgggtgctgggggacttcgaccgacggggctgggtggagaccggctataagagcctgaagctctgcaaccggcaggcgattgcggattttctgaccgagggggtggggtgagcgtgggctggtatttcctgctggcggcggccgggctggatctgctcctccccttcctgctggccccattttaccccggctactcccaccggcggcaggtcatgagcgtgctgggcagcccggaaagtccggtgcggtgggtgtaccgggtgtggctggtggcgctggggctgctcctgtgcgccgccacaccagacctatgggctgcctttggaaaccgctctcctgtcctgaccgggctgctgatcgcggtgctctgcgtgttcgccctgggggcaggggtactggccgggctgttcagcgtcaatgccgacaaagcggtggagacagcggcctcccgcatccacggcgtcggctcggttctgggcttcctggccctggcctttgctccccttctggtggcgctgctggcttttcgggatggtgccggcggggccggggtattctccctgatctgttttgccctcgatgtgtgctgtttcaccctctttgttatggcggacaaggaggcgtggcgtggcacccggctggcccaggagggcacatggcagcggcttaccctcctgtttatgtacctgccgctggccgttctggctgcctcacagctcattcagaaatagaccacgagggggcgtcccatctgggacgccccctcgttttacagaatgatgcagatcagtccgccggagccctcgttgatgatgcgctggagtgtctcctggagcttggcgcgggcgtcgtcgggcatgcgcttgagcttgccgttcaaatcctcgctgaccagctcatggaaggacttgccgaagatattggactgccagatggccttggtgtccccctcgaactcctgaagcaggaaattgaccatctcctcgctctgcttttcgttgcccacgatgggcgagacctcggtttcgatgtccgcacggatcatgtggatggagggggcggaggccttcaggcgcacgccatagcgtcccccctgcttgacgatctccggctcctccagcaccagctcgtcggtgctgggcaccacgatgccgtaaccggtggacttaacctcttccagcgccccggctaccttgtcatactccgttttgacgtgggcaaggctggagagcagctccatgagatcaccatcgtcgtggatggtgaagccggactgctcggagagcgtatcgtagaacagcccccggggcagctccagctgggcggcggccagaccggtgcccaggctgatggaggtgatacgggcgctgctgacagtgtcgcactccccaatggcggtgaccgtacgctccacatcccggatgcggtgcatcccggccgccccctcccggatggccgtatacaggccgctcttgatggggtggtcgtaaggcagggcgtccacccaggggggcaggaacagatccagctccttcaccgggaactcgtagagcacccccttgatgatggcggttaccgccgcctcgtccagctccaggcagtcggcgcacacacacgtcacgtcatagcgggaggcgatgtccgcccggatggcctgtgcccggtcggaattggggtaggacgagttgagcaccaccaggaagggctttcccaactccttgagctcggtgatcacccgctcctccgcctccagatagtcctcccgggggatgtcggtaatggaaccgtctgtggtgaccacgataccgatggtggaatgctccgcaatgaccttgcgtgtgccgatctccgcggcctcggtcatggggatctcatagtcaaaccagggggtggttaccatgcgggggctgtcgtcctccagggagcccaccgcgccgggaaccatatagcctacgcagtcgatgaggcggacggagaaggccgccccgttgtccatggtgacctgaacggcctcctccgggacgaatttgggctcggcggtcatgatggtgcgcccggagccgctctggggcagctcatcccgggcccgctcccggcggtacacgttgtcgatattggggatgaccatggtctccatgaagcgtttgataaaggtcgattttcccgtccgcaccggccccacgacgccgatatagatatccccctcggtacgcagggcaatatcttcatagatcttgcgttgttccacttgcgattcctccttcggccgcatgagccggtcgttttctctacatacctatggggataagccgtaaattatgcctcgtccccggacagaaccaaaaagcccgcccggcatttgccgggcgggctggttttaccgcttgcgtgggatgagcaggagttgcccctccggggccacgtcctcctccagcgcgttggcgcacatgatgtcctgtgcggtggtaccgtaagacttggcaatgtcccagagccgttccccgtttcctaccatacgcagaacaatggagggctggccggagtgatcccggggggtaccctcatccatatggaccgcagacacggcggctgtggtgcggctggtcatggccgtgtaccggaaacccaccgggaagcgcacctcaatgccacccgtcgtcggggtggcaaagacaggggcggtacagccgcagtggcaggagcaggacgcctcctcaggcagctccagggggcaggcggcctggagctgccgggtgatggaggtgcgggcgccgtcctccgtgaggtagagcaccgtcacgttggcctcggcggtcagcgtcacccgtctcccgtcccggctctgggtgatggcgccgatggtcacataggcgtccgacacctcctgggccagcatcccggtttccaggatctcccgcactgtcagctccttctccccgtgctccaccagacggcccagcgtataggtccggctctccgccgtaagctggaaggcggtagagtacacatccgtcagcatctggagcgtgcgctcctcccgcaccaccgcttgggccagcagccccatggagacgctgatggtgcggccgtcgccgctgtccagggcgcagtccaggccggtcaaaaccacgtacacatcacaggtggactcctcccccgccccggtaatctccatgatctgggagaagggcagctcatattccgctgtgcacagtccgccggcggaggagcggtagagcatctgaagctggctctcccccttgaaaataagcttgtttccgatgaccttggactcactgcaccgcagggcagcgcggcacttcagcagctcttccgcctccggcttgctgccggacaggctgatttcatcagaaaatgtaaagggcttctcctgcacgcagactgtggtacaggcatcacactgctcagacatctgctgcacaccagcttcctccggagccagcactccgctgcagatgtcatcctccaccggggcatagacctgcacacagaaagccagatccacccggaccagcaccttgcgggggttgatcagccgggcgtctgccccctgtacccgcggcagggctaccacgcggcacagaggcgtcagcgccgggtgctccagagtacaggaaaagggcagttccacctccatccggcgtatcccctcttcaccgtccgggaggtagagcagcgccgcccgtaccgagccggagagctccacccgaccatcctggagcaccttgtcccgcaggcataccacgccctcggtatcgcagatgcgaaggatatccggacaggcatccggtacaatgctctccagtgtctcctcgcggcagacggttgtatccagtacggcctcatagccgctccgttgagtccgatccagttccagctccatagcgttccactccttgtacgggccgcagccctttttcatgcattctgctacagaactatatgtacaaggtgggaagactatgcccgtggctcatgcgccccggatgccgaaaatggtcttgagtattccgcgcagcgctttgggtgatttaaccacgacgatcttcatagcacagcctccctgtcgtcccaaattcgtttgagccagtctctgccccggctacccgcccaagcacccgcaccgaaggcgatcagacaggccggatggagcagcagggctgccccccccacgcacagcgctgccgttcccaggcgctttctggtttgtagcgtcaaaatggccgcctcctttcgcaactggttctgtaccagtatacgcaggaggcggccaagggttcccagttcatcagacgcgctggctccggatcagcagggcgcggccggcggaaaggcagatctccacctcgtcgcccagcggctcattactcactgagagggtgtcgccgcgagtgagtaccgcgtcggtcagcggatatttgagtccccgcagggtgacgccggtcacgcggcgatccagaggaaccagagagaggtagtgatagcagggacggttggttagccgcagcactccactgtccagcaggcgcacctcattatcggcatccaccaacagcgcccggccgccgtggtcggcgatccactccagaagcaccaagttggaggcggtatggtccagccgtcccccagtacagccgcacagcaggagctcccggtaatccagctccagtgcctgatccaccgctgcctggaggtctgtcatatccttttccactggaagcgtgatgcaggggacatcgccctccggcgcaccgccggagtcccagtcgccgatcagatagtccggccgcagcccggccgcacgggcgttgcgtaccccgccgtcggcacagaagaccgtccatccgcctccgtccagataagggcggagaaaggccccatctccgcaggggactgagccaaaaagcagcgcgcgcttcatttccgctcccattcgggcacttcctttgcctgctgatacagccgcacatagctggcatgacggctgggtgcaatctccccggcctccattgctgcaataactgcacagcctttttcccttacatgagaacagccggtgaactggcattgctccagataaggggcgaactcccggaaggtatattgcagttcctcagggcgacggagctccatctcctccgtgtcgaaggaggagaagccgggggtatctgccacaatggcgccggagcggagccgaaacagctccacatggcgggtagtatggcggccacggcccagcttgtcggagacctcccccacctggaggcggaagccgggctccagggcgttgagtatgctggatttgcccacaccggaatttcctgtaaaggcagaaacctttccagcaattgccccagagagctcctccagtccctcccctgtctcggcgctcacccggagggtggggaacccggcagcgcggtaggtctggtagagctcctccgccgcatccaggtcgcacttgttgatgcagatgaccggctggcagttccgcccctccgcaatggaaaccacgcggtcaatcaggaatgggtcggtaactggaatggcgccggaggcaatgactacgagctgatcaatgttggccaccgccggtcgctgaaattcgttcctgcggggcaggatttcatcgagaatccccgccccgttatccagaggggtgaagatgaccttgtcccccaccaggggggtgatcctctgatggcggaactttccccttccgcggcaggcgaccagaaccccatctccgccgtccacgtaatagaagccgctgatggcctttaaaataatcccttccatcagccgaagttcatcatgcgggtctcggagagctgcccgtcaagatagacatccacttgctggaagccggttccataaagtgttaccacccggacgcctagtacggtctgtacgtcctcattgaactgatcctgcccgttgactgtgacccggacacggacagtctccttgtcggagctggccagatttaccgtatagctgatgggcttcagcgcacctccgctgcctggtgtgggggaaacctccgggtcggtagaggcccccggcgtgggagtcggggtgatctccggggcgggagaggtggagggatctgcccctttgctcaggcgcagatggatggtggaacccttatcgacctcggtacccgtctggatggactgccagcagaccagaccctcggcgtagtcattgctatactgaggctcgtcaaatacgaccaccagtcccagcgttccctcggccttagcgcgggcctcctgctctgtcatgccgaggaacgggataataacagaggtttccgtcttgacaccgctgctgactacaagagtgaccttctcctcatcggccagatcggtctccgccaccgggtcggtggaaatcacatagtccttggttacatcctccgaggtctcctcccggataaccagattaccggcctcctcggtgaagccgagttcccgcagggtattgatggccagacgcttatcctgattcaccaggttgggcatccggttctcctccacgtcggtgctgccgctgccgttgctgatatcgacagtgatggtggttcccgccgcagcgttgcgtcccgattgcggatcctggttcacaatctgtcctttgggtaaagtgctgtccacttcctgcccctctacgacctgaaattgagccacggttacgccgctgtccgcccgcgcttcctcgatggtcttacccaccagattagggacattgtagacagtctgccccgggctgctgaagaaggagacccagagaaatacgccgatgccgactacaaacacggccactgctgcaatagccagaataatgggcagacgactgccgcccccatcccgccggtccggatagtcgtcatagtccacctcgtcctcaaggggaaccgcacggcttttgcggggcttcggtgtgggacgggcatagggctcctccgacgcggcccggctggcatgggccggctgggaacgcacggtatggggtgtgttggcgcccagaatctgagtaggctcgtcgccgtcggcgatgagcagatcggcgggcgtatagtcgaaattgatgctgggattcttgcggaactcctccagatccatcagcatggcgtctgccgatacatagcgctggttgacatccgaggccatagctttcatggtgatggcctccagagcctctgggatctctgggtcgatctcccgtggggagagcggaatggagttgatgtgctggatggccaccgccaccggggactccccctcatagggcaggcggccggtgatcatctcataaagtaccacaccggcggagtagatatcgctgcgggcgtcgatatggctgccgcgggcctgctccggcgagatatagtgtactgagcccagggcctcctgggtcagggtggcctgggcggcggaggtgagccgagcgatgccgaaatcggccaccttcaggctgccgtcccgcagcaccatcatgttgtggggcttgatatcccggtggatgatcccccggctgtgggcgtgagagagggccttcatgatctgagtgatgaagtgcagcgcctcccgccaggccagcttgcctcccttcttctgcatatactgcttgagggtgatgccgtcgatgagctccataacgatgtaatccagctccgtggagtgggacacatcgtagaccgccatgatgttgggatgggagagcatggcaacggcctgggactcatcgtggaaccggcggcggaactcggcgtcctgggccagctcctccttgaggatcttcaccgccaccagtcggttaaggcggtgatcccgccccttgtagaccacggccataccgcccgtcccgatgcgctcaatgatctcatatcggttgtcgagtaatttccctatgtactgatccatagttcattacccccttttaaacgatctgaaagaggaccgccgtaacgttgtccggcgcgcctctggacagagtgatgtggagcaggcgctggcagcagtccgacggctccccgccgtggatggcctcgtagagcagctcctggtccgtgacgatgttgctcagcccgtcggagcagagcagcaggaagtcccccggctggagctccttctcgtacagatctgcccggatgcgctcctcagagcccagtgccctggtgatcaggttcttccggggatgagtacgggcctcctcgggggtgatgtccccccgcgccaccatgtcctccaccaccgagtggtcccgggtcaggcgggtgatcccgttttcattgatgtgataggcccggctgtctccgatgttgagcagataagcggtctgctccaccaccaaagccgccaccatagtggtgcccatgccgcggcagtccgggtcagtgacggcccggtgatagactgccgtattggcggtctccgcggcccgcgaaagaacggcggctggccccgcctcgccatcgccatccggctgcatgccctgcagggcgtccacgaaggtttccacggcgatgagactggcgatattgcccgccttggccccgcccatcccgtcgcacacgacgccgaccgccaggtgctctgaaggaacgtctaagtagaaaccgtcctgattttgtgttcttaccgcgcctttgtcggtaataccccatgcgtgtatcatactgaacttgcctctttcccgcgccagtctgcctctgttcacgccctgcgcggccaggcgtgagccgacttatgttaagtgtgttcctgctgcattgtcttgcggcggagctgaccgcaggaggcgtcaatatcgccccccagcttgcggcgtaccgtggcggtgatgccgtggctctccagccgcttctggaaggccgccacccgcctgctgggcttgagggggctctcctccacattgttgaggggaatcaggttcacatgccccggcgtccccttcaggtgccgagccagcagatctgcctgccagtcggcgtcgttaactccgtcaatcatggcgtattcataggagatccgccggccggtcttttcaaaataccggcggcaggcggcgaacagcttctccacccctatgctccggttgaccggcatgatgcggctccgggtttcgtcgtcgggggcgtgcagggacacagacaacgttaattgtaactgatggtcggccaatttgtcaattttttcagtcaggccgcaggtggacaacgagatgtgccgcataccgatgttcagtccgtcggggctgttgaccagctccagaaagcggagcaccgtgtcgaagttgtccagcggctccccaatgcccatgagcacgatgttgctgaccggggctccggagtccatctgggtgaaaagcacctgatccagcatctcagcgggtgttaagtcccgcaccttgccccctagtgtggaggcgcagaaagcacagcccatgcggcatcccacctgagaggagatgcacacagtattcccatgatgatagcgcatcaaaaccgtttcgatgcagtttccatccctcagccgccacaggtacttgatggtgccgtccagggcggagacctgcctgcgctccacctggggcgcgtagaggatacaggaggcggccagcttctcccgcaggggcttggagaggttggtcatttcgtcaaaagaggatacgccccggtgaagccactggaacacctgcttggctcggaacaccggctccccgagctccttgaaataggcggccatctcggtcagattcatggatttgatgtcggtcatgcgttctctcctccgccgggcctccccggcggctccagtccgtatttttttgccaccgctgccagacgctccggcgtaacgagccggggttccggggttgg

SEQ ID NO: 4307 - DNA, 46094 bp, Unknown
  gut microbiota DNA sequence
ggcccgccgtcataaggggcccggcatggctccagtggaagagccgccatggaggcggaactgcgcacccataccgcctggaaggtccagccgtgggtctgctcatactccagattctccggaaggacacgcatgtgcgcctgaaattccggattatccagcagcttagggtggtaggccatctcccgccacagctccaggccaagggtcgggaagcgatagttgcaagccagctccggatccacgcaatcgcaggcaaactcggcctttcgtgccaggcgcggaatgagctcctccacgtgcacatgggtcagttccagtccatcccagagtatctgccgattctcgtccgcaagcaggccaaccccggccagcctgccgtccagatagtccgtcctgcagtaatagcccggaaagactccgggaaacagacggttctgaagctcaaccaccttatcttctgtcatgcccaggcggaaagggcctatgcccttgtttggatacacttcaaaggtttccatcatctttcctcctcagcctggcaaagaaaaatccatcggtgccatggcgatggggccagcaggtgagcatgccggtatctgtatccaagaagggaccggggacttggaatccatctagtataaagtctctccgcttgtctaaaaacgccctcacgactccctcattctccggccccagcagggtgcaggtggcgtagagaagtacgccgcccaggcgcacataatccgccacattgtccagaatggcggcctgcacacggggcaggttctccagaggcttaggatccttgtagcgaatgtccggcttcttgcggatgatacccaagccggagcagggtacatcggcgattaccagatcaaagctgttaagtaattcggcttttcgctccttaccgtccaacaggtttgcatggatgatatccaggcccagccgctgatagcccgcctcgatcaggcgcagcttgtgggggtgaatatcacaggaggtgacgctcccccggttctccatggcgatagcggcggcgaaggatttgcctccgggggctgcgcaggcgtccagcaccctccaccccggctgcggcgcggcggccagcaccgccagatgggcggcggcatcctggatgtaaaagtaccccttctggaacgactccaggtgttccagacttccggtgccgttcaggaacagacagtccggcagccagggatggggttccactgccaccccctcggccatcagcatggcagccagctcctctgcggagattttgagggtgtttacctgggcacaggtgggcggctcgctgttgtcggcggccagcagggcctccgcctcctctctgctcagccgggcaacgaaggaatccaccagccactgaggatggctgtaccgggtggagaggtcggcgggcggctccagcgcctcccgctggcggatcaggctgcggagcaccccgttgaccagccctgcggccctaggatttttggccttctttcgggccaaggacaccgcctcgctgacggcggcgtgatccggcacccggttcagatacaaaagctgataggctcccaggcgcagcaggttgcggatagacgcctccagcttgtgcatcggggtggcacacagctttgaaaggtaaaaatccagcagcatccggttttggagtacaccgaagcacagccgggtcgccagagcggcatcccggccgtccagcttcgctccgccgatggcctttttcagatatccgtctgaccacgcgccctgcctctcgcaggcagtaagggcgtccagtgccacttctcgggcctgcttcatctaatccctccgtcgtcctgcaaaggccagcaggaaccgcagcagttgagccagggagaccagcagggctgccacataagtcatggcggcagcccccagcaccttgcgggcaccccgaagctcatcgtcctccagcagatgggtgccctccaggctggcaatggcccggcgggaggcgttgaactccaccggcagcgttacaagctggaacaccaccgccgtggcaaacagcagcacgcccacgccgaacaggggcttggagtagagcagcaggccgatgacgatcaaaatcagggagagctgggagccgatattgcagatgggcaccagggcggaacgcagcttaatggggccataccccaccgcgtactgcaccgcatggcccgcctcgtgggcggccactcccaccgacgcaatgctgttggagccgtacaccgcgtcggacaggcggatgacattgctccggggatcgtagtggtcggtcagccggccggagacccgctcaatgcgcacattttgaatgccgtgggcccgcaatactgcttccgccgcctgggcgccggtaaagccccggcggctggccatacgggagtaacggttgaaggtggaggacacattgagctgggccagcagggcgatcagcatggccggtaccaggatcatccagtaataggggtcataatagtagaaaaacggcatggaatccctccgttcacataatctgcccgcccaacaggtagcaccacaggttcgccaggaacccgacccccatcccgcccgccagcagggcggtgagccggggccgtttttccgtcagccctgcggcgaacaggaagaacggcagggcgcaggacaggtagcgcccggcgctgagcagccaggacagggagtagttgagcaccagataggcgaaggcatagagcgtatacatgctccgaaaccgcccgcgggcgtaccagagcagtgggaaaaaggcggcaaaaagcagcagggtgggaatccagatctgaatccgtatcgcctcgtcatagtaggacagggcattttgcagcacataccacagagtgtctgagatccagcataagccctggctccagtgctcctgcatcaccgtaaaggcaaagggagcccccgccacggcggcgttgaggccgagataggccaggctgcccacagcgggcagtagtaccgccggcaggcggcggaggatggccctcccgtcaaatttccccagactctctaccaattccgctcccgccgccccaatgagtaacagaccatgcatgcgggtcatagcggccaaaacaccccacatacccgcccgccaccaacggtggcggcggatgtgccagagagcggcggccgtagtcagcaggaatagcccctcggtcatcaccccgccgaagaaaaaggcatatggaaagagagacaaaaagagaaccgtccgccgggcggcacctttccccagctcccaggccgccagccggtacagatagacgcaccccgcggaatagcacaaaaaggacaccatcaagcccgccgccatggtattatgccccgtcaaggggcaaaccagccgcaccagccagggatagagggggaaaaagaccagaaacaggggtctgccgtcctcccaatagccggtgtagcccagttcggccaggccaacgtagtgccatgcatcccatttcttccagatatccgtggcccaggacagaccggtacccgggtagagcaccaggcaggccagcgcggccaccgccagaaagacggtcaggcggaagagcagggcggcggagaacacatgcagaagctcccggcggcttacctcacagcctctgggggcagatgccggtacggcacagggcgccggaagtccggcggcccccagccaccggagcagcagagacagccccagggccagcactactccagagaccgccagcgtccagagcagatggatcatcccacggggatggggtgcccccgcagatagtcggcggccttcatgcgcttgccgccgtcggcctgaagctcgtcaatgcgcagtaccgtgccgccgccgcaggccacctgaattccctccttcccggcggccagaatggtgccgggggcggcggaagtcgtggcgtccagtacagaagtggaaaatactttacagcgattgccgcccagctcagtgacagcagtcggccaggggatcagcccccgcacctgattgtggagcgcccgggcgggccggctccagtccataggggacagctcccggctcagcatgggggccagggtggccttgccgtgctcctggggggtgcgtgtggccgttccggcggcgatgtccgccaccacgttcaccagcagctccgctcccagcaccgctaggcggtcatgaagagccaccacagtctcgtcgggatcgatgggggtggcggcctgggcgatgatgtcgccggcgtccagatcgtgggccatgtgcatgatggtcacgccggtctcgcgatccccgttgagcaccgcccagtggatgggggccgccccccggtagttgggcagcagggacgagtggacgttgatgcacccctttgggggtgcggccaggatctcgtccggcagaatgcggccgtaggcggccaccacaatcagctcgggagccagctcctgaatcagcgccagagccgcgccgtcccgcagcttgacgggctgatagactgggatattgtgggccaaagcgcacaccttgaccggcggtgcctggagcttcatgccacggttcctgggcttgtcgggctgggtgaataccccgcagaccgtgtgcccggcggcaacgagcgattccagggagggcacagcaaaatcgggggtgcccataaacagaattctcattcgccctgctcctccatcatgcggtccagctcctctgtggtgtagagccggtcggtatgctcggtgaacagatggccgtccaggtgttcaatctcgtggcagaagcagcgggcgacgatcttctctccctccgcttcaaagaaattgccgttgcggtcctgggcgcgcacacgcaccttgtaggggcgcttgaccacgccccagcggccgggcaccgacaggcagccctcaaagccctcctgctccccctcctgggagacaatttcggggttgaccagctccagcatgttgtcctcggcgtccaccacaatgaccacccggcggagaatccccacctggggggcggccaggccagccccgttggcatcggccagggtctccttcagatcgtccagcagcgtgtgcaggcgggcatcaaagctggtgaccgggcggcacatcttgtgcagggcagggtctccatccgtcaaaatcttgcgcagggccatggtgtttcctccttaatccagtgggttcacgtccgccgagacggacacccccttgttttccttgtcggtttgcgcacagcggaccagatgggccaccatggcgcgaatttcctttgtattttgtgccgccagagtcaggcggtagcggtagcggtcgttgatcttggccacgctggccggggcggggccaaggacggtcagctcccaggcccgaaacggcggctgggccagccacccctccagggagcgccgcaggcgcatacaggtgcgcagcaccgcgctctccagcggccccgaggccgtcaggacaaacagctcccgaaagggcgggcacaggcgcatccggcgcagctcgatctcctgctcatagaagctgtcgtagtcctgacgggcggcgcagcggatcacgtcattctccggggtaaaggtctggatgaccgccctcccctgtttggcaccccgcccggcccggcccaccacctgggtgagcagggaaaaggtgcgctcccccgcccggtagtcgtccacatacagggagagatcggcggagatcacccccaccagggtgacattctcaaaatccagccccttggccaccatctgggtgcccaccagcacgggaatccgctccttctcaaaccgggagagcagcttctcgtggctctgggtggcggagacggtgtcggtgtccatccgcaggatctcccgccccggaaaggcggcgtggagctcctcctccaccttctgggtgccgtagccgaggaagttcaacgccccgccgcaggaggggcaggcgtcgggcagcggctcggagtggccgcagtagtggcacatgagccgaccgttggccgagtggtaggtcaggtggacggagcagcgggggcacgtgggcacctcgccgcactcgccgcaggtgaccatgcggctggccccccggcggttgaggaagagaatactctgctcccccgcctccatggcggcggccagtccggccctgaggggcccgctgagtgaggtgccgttgccggcgcggagctcctttttcatgtcggcgataagcacctccggcagggcctgctcgttgtaccggcggcgcagggtgaacaggcggtagtccccccgcttggcgtggtacatgctctccaccgacggggtggcggagcccagtaccagcagggcgtcattctgagcacagcggtattttgccacgtcgcgggcgtggtatttcgggacgttctccgatttgtaggtggactcctgctcctcgtccagaatcagcagccccagattccgcaggggggcgaacacggcggagcgggtaccgatgaccacccgggcctgaccgctccgcacccgcttccactcgtcgtaccgctcccccgcccgcagggacgagtggagcacagcgatgtcgtccccgaagtgggaggcgaaaatgcgcaggagctggggggtcagggcgatctcgggcaccagcaccatggcggtacggccccgggccagtgcctcatagatcaaccggagatacacctgggtcttgccgctgcccgtcaccccgtacagcagggcggcagcgggtcttccgaccgccgccagggcgtccagtccctcaaaggccgcctgctgctcggcgttgagcaccgggggagcggcccgctcccccgcctccaccgtcacccgacggaacacctcacggtgttccaggcgcaggataccgctcttttccaaagagcgcagggtggcgttggcggccccggtgaagtagcacagctccttagccgaggcgctgccgagggcgcacagcagctcggtcacggcataccgcaggggcgcggagcggcgccttggcgtgaccagggccatggcctcctcgggcgggatggccagcgaggccaccagctctttcttgtcccccaccccccgggaggcgctggtctccagggtgagaatgcccttgtcccgcagcagcttgagggcgggattgggatcttttgtcccgaacgcctccttgatttgggccacatccgcctcccgccccgaggcgaagagcagctccacgatgcgccgggcgtgctctgaccggcccgccgccgcataggccgcctcccggtccacgccgggggccagcttccagcggtcctgaagggagaagtacagccccgccgggagcatggcccgggccgcgtcgtacacggtgcagaaccagcgctcccgcatccacagggccagccggagggcctcgccgtccagcaccggctcttcgtctagaacggtgagaatgctcttgcgccttgggtcgtccgggtacccgccctccagcgccaggacgatgccctccgtccggcggttgcccgccccgaaggggacgaccacccgcataccggggcgcagggtgtccagcagctccggcggcacttggtagtcgtagggcttgtcgatggcgtaggtggcggcctgcaacgcgatcttggccacggtattcccctccatctctccgccccctttcctccagaaaaggcaagcgccgggcgcttccccgtcgcttgccttatgctcactcctcgtcgttcagctcaaccttgccctcggccacctcacggatagcgatggtcacgggcttgtcgtccagcggaatcccggcatcctccgcctcgctggccacctggcgggcccgctgggccactacgttcaccagcatatagcggctgggtacctgcttgagcagttggttcatcgggggttcgagcatcatattggatcagactccttccacaagattgattcggtgcttggtacggcagctctccgccgtcaggatggcgatgatctcgcccgcggcctcggataccttgtcgttgaccaccagatagtcataattggggatctgcttgcactcctcacgggccttctggaggcggccctggatgacctcctccgcgtcggtggcccggcggtgcaggcggcgggagagctcctcaaaggagggggggatgataaagataaaaaccgcgtctgggcacttggcccgcaccttggccgcgccctgcacctcaatatccagcagcacgtcggtgccggcggacagcttctcctcgatcaggcgaagggaggtgccgtagtaattatggacatattcagcgtattccaacagctcaccgccggaaatcatggactcaaactgctcccggctgacaaaattgtagttgacgccatcctcctctcccacccgtggctggcgggtggtgaaggaaacggagaagtagatgttttcccgttcgctcaggagctcggagatcaccgtgctcttgcccacaccagacgggccggagagcacaataagctgccccctggttttctttttcaggttcatgcgtcctcatcctcctctggggcgggctcgttctcccggccgcccagccgcccggccactgtctctggctgtagggccgagagaacgatgtggtcgctgtccatgatgagcaccgcccgggtgcgccgcccataggtggcatcaatgagcacaccccggtcccgggcctcctgaaccatgcgcttgatgggggccgactccgggctcacaatggcgatgagccgtccggcggaaaccatatttccaaatccgatattgataagcttcatcctgccccaccgccttactcgatgttctggatctgttcccggatcttctcgatctcggccttgatatccaccacgtatccggcggtctcaatatcattgcatttggagccgatggtgttggcctcccggttgaactcctggatcagaaagtccagcttgcggcctacgggtccctcttgggccagcatgtggtccagttgggacaggtgactgcgcaggcggacggtctcctcgtccacagccaccttgtcggcatagacggcggcctcggtgaggatgcggctctcatcaagctgggtgttctgaagcacctccgccattttggcgctcaggcgggcccggtagtcggccacaataccgggggcgcgctcctccaccctggtagtgagggcctcgatggtgcgtgcccggccggtcacatcctggaagagcttttcgccctcccgcgcccgcatggcgtcaaagtcctgaagggccagctccagcacggagcagatgtccgcgctcacggcctccagatcctcctgggtcttctccaccaggaagacatcctggaaccgggagagcagggaaaccgaaatgtcgtcctttaagccgtagctgtcccgcaacgcgcacagcgcggcatagtagccatccgcaacaggcctgttgaccgagatggatacatccccgttctccgacgggccgatggtgacgaacacatccaccttgccccgggagatatgggcctgtaccttggatttgatggcgtcctccgcaaacacatagatgcggggcagcttgatggtgcagtccagatagcggttattgacggagcgcagctccacagtgatggagcggccatggaccacggcctctcccctgccgtagcccgtcatacttttcaccaacgcgggttccccctgttccattcgtcttttgttctgaggctattcaaaaattataccagactaggaagtctttcgcaataccctgtccacccgggccacataaaaggagatgagcttggagaagcccacgtcgtaaatcacaaaggctgcgttccccgccgcatagaccatccaaggcgcttgcagcgtctccggcaggaagggcagaaacaggctgtgcagaccgaaccagaacagggtcagaacggcgttgaataccgccagcttgcacagccactccagcggccggacgggaatgcgctccagcaggctcttgagcatgggccagaggccgaaaaagagcaggtagagcagggcgttggccttgtcgggcaccagcagcaggcccagcaggcctgctgcgccgtagcagaagaaccccgccttcagcccggccgacaccaccgcccccgcaggaaagaggccggcaatggctacaatacccatccgcgccgtgggcgagacggcggagagatagagggcgatcagcgacagcgcggccagcacgcccaccaaggccacccggcctgcgcccgtttcagtatggtttcgcatggctcagttcccacagcacatgttcatgcacaggcaggccgtacagcagtcgcaggcgtcgatcccaccgccgtagccgtaggggcggtaggcctgtccaccctggcgcatcatcatcagcgcctgccggtactccccgttggccgggtccatgttgcaggccatctggaaatgctgggtggcctcgtccagccagcccttgcggtaggcgatggacccggttaggaagtgccactcggcatcctggctggcagcgccgcggaggagctgctcggcccggccgatgtcgcccatgttgatggcctgccgtacctggttgtagaggctccctgaggaggcgctggagtactgctgctgatagccgccctggtaggagccgcggtaggccccctggctctggtagccgccggaggcccctcccccgctgcgcatcttggtaatggtatcgtaggcctcgttgatctccttcatcttctcctcggccagatcggccagggggttgttttgatagttgtccgggtggtatttccgggccagctcccggtaggcgcgtttgatctcctcgtcgctggcgtcgggcttgacccccagcacaatgtacggatctgtcatgaaatccttctcctgttttgatgattgacggccttccaacggccggtaaagaccagctcctccaccataggtagccccagatagaggatattctccacggcgccctgccagtggcccagctccaggagcgcacaggcggagcgggccaggttcagagagtggagaagggtggtgcgcagataatcccggttcgcctccacctgctccggaaaacgggcggcaatggggttgtaggacccggtgcgtccgtcctcctccagatcgtcccaggcgtccaccaggtaaatccaccgccccacatggtagaggagctgctccagggcgcgggtccgggcggaggactgctctggaagggcggccgccgccaggatgcgggcaaaggtgtccgccgtccggtccagcgagggagagccctcctgctccagggcctggagctcctccagacagcttcgcaccgcccggtcaaactccggccgggcctgggccgcccggcggtagccgggtcggagcagaaaggacagaacccgggcggcatttcccttccagaagggaccgtccgccaccgtgtcccgcagcttccaatagctgaggatggttccagcgtccgccgccgcatccacgcttccggcgcagatgcagccttttttccgacaccagaggcgggccggacagcgcttccgctccgccgtaggcttcgagccgtccaagagcatggcgagaaaggtaaagtcgtagttcagaaagaaccgggcgaaaaagccgtgccgccttcccaatgcgcggcagagtccgcagtagagggcctcgtagtcccgcagctcgcgcactttcaactcgtcccggttggggcgcacatagccgaacatcaggcctccggcgcaatggcggtaatgcagaaggaaatggcctgctgcctgcgcacccggcggtcccacagaacggccagcaggagccctagtgcgaacccggccaccccgacggccgcgctgactcccgaagagagccggaaagccgcacagaggaaatagccggcgaaaaagagcaggaagggcaccagatagacgatcacagccgcgcccagtacccggctggtggaggactccaccgtcaccatgtcgccgggcatggcccggaccggattggcggcaatcactgctacggtggagctgaccatcagttcgctgcagcctccgccgcatttggagcagtcgtggccgcaggcagactgacgcttgacggccacctctgccctgccgtcagccaggacgcgggttacctttgctgtttgaaccatactttcacctgatttctacgatcttgagaccgaaatggaaatgttgtactcaccgaccacgcccacctcgctgctgccatccagatagaccttgaccggcactgtccggcttccggtggacagatccaggttggacagatcggccacaatccggacttgggaggccgtgaccgcatctacggcttcctgggtgccgcggatcaaaaccgtgcaggactgggtgttgcgtgtgatctcatagccgcccggcttattgataatctcaatatttccagcctccagtgtcttagtgaccaagccctccacggtgacggttaccttggcctctgtagtgccgctgacattggtcagggatgggtccaaattaatcgtcatagactgtgtcagggtgccaaataccttggacaggtcaatctcccccaggctgatgcggtccaactgatccaggatctctgcgctgcccgctaccatcagggttctgggctcaatgtctacggttacattatctgcggtggcgccgccgccgggaatgagatccacggttagctccacctccttcatcttctccaccgggagggtaaccagcacggtctccggttccgtctccaccaggccggcggcgatgggctggccgttggtgccgatgagggtatagctacagtcggcgctgtaggtggaattcatatcctcctgagagatggtgacttgggcgtgatccacctgactgaccaactcctcctggccgctgacggtaatggtatccggcgcgaaggagaagtcacggcgttggaagccttcggccacgctgccgttaaaggttccttgaaccgggatctccttgctgctccagcgggaaacggtgaagtcgatggtacttgggctggtgtagcgtacgtcaatggagtcgattatggtgatggagcggggaaaattgatgttgcgtgaggtaatagccacactctgctcccctggctcggtaataccggagacatccaccaccacagtggtatctccctggttcaggcggctccacacctcgccgcgggcagacagctgcaaattgaccgtctgctctgctccctcagagatcatcagtccccgctcttcaagcttttccaatccactgaataccacccggacattccgcagggttccggtgtccaccgagttggggtcgttgccgacgtagacccagaggagaaacgccagcaggatggagagcaccacatagaaccaccggctgttaagaattttcgttcccatcctgctttttcccctttccaaagcggagcagattgcccagcttgaatttggacgcggcctcgtcattctcccgttccggaagcagctcattgcggagcaggcgctccagagtctccggcgccaggtggcgcttgagcatgccgcccaccgccacggagatggagccggtctcctccgagacaatagccaccacggcgtccgtgtgctcacttgctccgatgcctgcccggtggcgcatgcccaactcccgcgacagatttacattgcccgacatgggaagcatacagcccgcgcccacaatccgtccagcgcggacaatcaccgcgccgtcgtggagcggggccttgttccagaagatatttttcagcagttcggcattcaccgtacagtccagcgcggttccggtcttgatggcatcatccagcatgtttttccgctcaaacaccatcagcgcgccggtcttgctcttggaaagggacgtataggcatccaccgtctgagtgatggcactgtccagctcgttgcgtgcctcctccggtgtaaacaccttcccgaggctggtgcggcccatctgctccagaaagcggcggatttcaggctggaaaatgaccaccagggctaccacaccccacaccatgagctgctgaagcagatagctgaccgtgttgaggtggaagaaggtggagacacccagggcaaacagcagcagcagtacgcccttggccaccgcgccggagttggtgcggcgcatcagcataatcaccttatagataagaaaggccatgatcgcgatatcaaccacatcagagataccaaacaggacgacctttcccttgaattcctggagcaaatacaaaatgccttccatttcctcgtctcccgcttccggccgcgccggcatccttgcttcccgcagagtacatgtatatcctttaactgatttattatactgtattcacaggcggttgacaagtagaagggaaatcaattttctgtgaacaggccctgtgtgcagacacaaaaaatagccgcagacgcggctatttttgcccggcggtcagccgcgcaacctcctgtgtgaagcgctcgacttcccggggtgtattgaaggcggagacgctggcgcggactgtcccagcctccagcgtcccggccgactgatgggccagcggcgcgcagtgcaggccggcacggacggcaatccctctggcgcccagggcctcgcctaccgcttcacagtccattccgtctatctggaaggagagcacgccggcctggacggctcccccatccccgtagacagtcacgccgggaatgcgggacagtccggcagccgcttggcggatcaggcggcgctcatgggtcaaaatacgctccgtcccctgtgtctgaacataacgaagtccctccagcaggccggcaatgccgggcatgttgtgggtgcctgcctccaggcggtcgggcaggaaatcgggcatggcctggagcgccgaggcgcttccggtgccgcccatgagtagtgggtgggtctccgccccgcagagcagcaggccggtgccctggggaccgtaaagtcccttgtgtcccggcatggcgacaaaggctgcgcccagctcccccatgtgaacgggcagacacccggccgactgggaggcgtccagcacaaagggaattccacgttcccggcacagggccgcgatgccctccaccggcaggatgaagccgaacacgttggacacatggttacaaatgacggccctcaccgtctcgtccagctggcgctcaaaggcgcggacttgagcctccggatcaaagagcgggcctgcagccacccggatattgacaccaagggcgtggagcggtcgggtgacggcgttgtgctcatagccggagatcaccacggcgtccccgggcttcaacagggaatgaatggcgagattcagcccatgggtggcgttggaggtgaacaccacctgttctgggctctccgcctgaaagagctccgccgctgcctgacggcagagaaaggcggtttctgccgcccgcatggcgggaacatgcccgccgcggccaggggttgccaggcgccccactgcggacgaaaccgcccgcgccacggcgggcggtttttgtaaggttgtggccgcgctgtcaagatagatcatagcagaacctctttatagctgccgtcgctggacatgatatagatgcgcttgggcgtcagcccgacgcggcccaaaatcagcagcgccggggccagattgcgttccgaaaccttgacggagtggctacacccctccccggaaatcatctttggcgagcggaggatgtgggccgtaatgcccgcccgctccagagcggaggccgtccgctgggcgtaggtcagggaacggcagacaatgagatagtaaaccatatagaaacgctcctctcagtgcagtgtatgcaccggaggagcgtctggttcgccggttacagaaggttctccaccaggcagacggcatgggcggcaatgccgtctcccgtgccggtaaagccaaggccctcctctgtggtggccttgacgctgacagcgtccaccggcacctggagccgccaggccagattccggcgcatttgctccagatagggggccagttttggggcctgggccagcacggtggcatccacattgcctacccggtatcccctctgacggaggcgggaaaccacctcgtccagcagccgcaggctgtccgcccccgcgtaggccgggtcgctgtccgggaacaggtgcccgatatctccaagggcgcaggcgcccagcagggcgtccatcaccgcgtgggtgagcacatccgcgtcggagtgacccagcaggcccttgtcaaagggcacctccacaccgcccagaatcagccgccggccctccaccaggcggtgtacgtcatatccatgtccaattctcactgctgctccctccaagcgaaaagcgcctccgccaccgccagatcctccggggtggtgattttcaaattgcagtagtccccctgcgtcagggatacgccgatgcccagccgctccaccgctccgcagtcgtcagtcagggcggccccgtcctccagggccttgaccagggcggccttgatcagatccacctgaaacacctggggtgtctgcacggcaaagagctccgaacgctccagcgtagcctccaccagactgtcccgcgctcgctttatggtgtccttcaccggcaccgccggggcggctgcgccgcactctgcggcgcggaaaatcaccgtctccagcacctcctggctgaccagggggcgggccccgtcgtggatggccaccaactccgcgccggaggggagctccccaagcccggccagaaccgagtgagtgcgggtagccccacccactatcaccttgcggaccttggacaagccggcatcccggcagagctggccaatggggacgatcagatcctcccgggtgaccacgataatctcggcaagataggggcacagctccagcgcccgcagggtatgtagcaaaacgggctgctcctccaggggaaggagcagcttgtcctggccctccatccgggtggagctcccggccgcggggaccacggcggaacagcggagctccggtgtccgctgccgccggaacagccgcccaagcagtccggccatgtccattcctcctccacaaaaaaagagccgtttcggctcctcccccgtttccctccaggggtccggtgggcggtcacagcggaccgcccctacagactgtattaggccaaggcggtatttatgcgcgcctcaacatcttcataactggcatcctgcgagagcacaatctctgagatcaaaatctgcttggccgagtggagcatcttccgctccccggtggacaggccgcgctcctcctcgcggagcatcaggcccttgactacacgggccacctccagcagattcccgctcttgaggcgaagcatattctcccggtagcgccggttccagtttggggtcatgtccacctcgatgtccgggatggccgcgatcacccggtccgcctcgtcgcccttcaccaccgggcgaacaccgatctcctcgctgtttgccgtggggatcatgaccagcatgccgcccaccggcagcttgagaatgtagtaatcccttaccacgccgttgacttttttctgcacgatgctgtcaatgataccggcaccgtgcattggatgcacaatcttgtctccaacctgaaacacgctcccacctcccagcagaacattccgatgcgtataacttcatttttaccctacatatcgtattatagacgcattcctcaccctttgcaagtcattttgtgtgtcttatttgtaaaaatgaaaaaaaccgtgcggtttccaagcggaaacagcacggtttcattgtaggaatgtgattactcctcgttgacatcctcggactcagcgggctcgtcgccgccctccagcagggcgcggatggacagggagaccttcttattgtcgtagtcgatgtcgatgatcttcacatccaccatttggccctcgctcagcacgtcaccgggcttgtcgatgcggtggtcggcgatctgggagatgtggatcaggccgtccacaccgggcacaacctcggcaaaggcgccgaaggtcatcagcttgactacgcggacattggccacgtcgccgggctgatacttgccggtgaacacctcccaggggttctgggagcggtccttcatccccagggagatcttcttcttctccttgtcgaaggagatgacatagacctccacggtgtcacccacggagacgacctcggagggatgcttgatgcgggaccaggacagctcagagatgtgaaccataccgtccacgccgccgatgtccacaaaagcgccgtaagaggtcaggctcttcacagtgccggtatagcgcttgttctcctcaatgttggcccacacctcggcggccttggcggcgcgctcctcggcctcaacggcgcggatggagcccaccacacggcggcgggcgcggttgacctcggtgatgcgcaggcggacatgctgcttgagcagctggctcatcggggtctcccggggcaggccagtctgggaggcgggcacaaagacgcgcacacccttgatggacacaacgacgccgcccttgttctcctcggtgaccacaccctcaacggtggtgtgctcctcacgggcctgctcgatgtcatcccagctcttcacggtgtcaaggcgcttcttggagagggtgaccacaccctcctggtcgttcacacgcatgacataggtctcaatctcgtcgccgatctttaccaggtcctcaaccttggccgtagggtcgtcggtcagttcggacaccggtatgtaaccggcgtgcttggtgccgagatccacatagatctcagtaggcgtaatgccagtgacaacgcccgtaaccttctcccctgtatttaaagttttgatcgacttctccagcatttcagcgaaggattcctcgatctcaatgttttcgtcgctcattttgtcatagacctcctttataatccactcaggcgtggacgcgcccgcagtgattccaatagaagccttccgacacaggttggaaggttccagctccgccgcccgttcgatccaaacgaccatgggacagagtgccccgcataactcggccagccgtttggtattggagctctcccgccctccgatgacgaccatagcatcggagcgcgcggccagcgcctgggcctcagactgtcgtttacacgtagcattacatattgtatcaaaaatttttaagtttgtacactctttttttgctttttctacgcaggaatcccaaataaaacgggtggaggtggtttgtgagaccatagtgagaggtatgtcccgccgttccggcgcggtttccagccagttcgacagctccgccaccccctccagcaccaccggccgccggcaccatccggcgatggcggccacctccggatgggtgcgggtgccgatgatgagcacctgccgccccccctcctcagcgcgggagacgatctggtgtatgcgggacacattggggcaggtggcgtcgatgaccggccggcccaggcgcgccagcgcctcatggacgggccgtccctccccgtgggaacggataagcaccgccgtcccaggcggaacctcctccggggtgtccaccaggcccacccctatggactccagataggcgatcacgtcccggttgtggatgatgggccccagcatgacgcacggccggcccccctccgccgccatctccgccatctgcaccgcccggcggactccgtagcagaagccggcggagcgggccagctccagcctcaccggccagcctgaggcttcaaagcctcaatgcgctccatcagatcatcggccaccgcgtggtagtcctccggcgtgggcttacgcccctcgggtgccttaggatagtatgcctcgccgaacacgacgggattccagcggaaccactttttctccgcaggaagatagatggggacgatgggcacgccggtacgcagggccagcatggccgcgccggtcttggcatcgccgaattcgccgtcctggtggcgggtgccctccgggaacatgagcagcagttcaccgtccttcaggtacttcatcgccgtcttgatagccgccacgtccgccttgccccgcttgacgccgaaaatgccgccgtgcttcagcacccagccgatgaggggccagtgcataatctcctccttggccatgacgtggatctggtaatgccaccccagtgcataggcgatgaacagcgggtcattggtgcgggtgtggttggcgcacagcagcgcgcccccttcgggcctgttctgtttattgatgcaccgtgtgggcatcacgatacggaacacgacccagagtaccatataggcaatgcagtaaatgacatttttctttcgcttcttcatgccttcagacgctcctttatggtttccagaaggacgtccaggctctcgtccagggaatttccggtggtatccaccagcagggcgtcctccgcctgccgcagcggcgcggcggagcgccgggtgtcgtgctcatcccggagaatgatatcccggagcacggtgtcatagtccgcctcctgcccccgcttccgcagctcgtcaaagcggcggcgggcccggtcctctggcgaggcggtgaggaaaatctttacatccgcgccggggaggaccaccgtgccgatgtcccggccgtccatgatcacatcgtgctcccgggccatgtcccgctgacgctccaggagaaaggcccgcaccgccgggatggccgacacgccggaggtataccgggagatcacatgctggcggatggcatcggtcacatcctcgccgtccagatacatatgctgcaggccgtccgcgccatacttcagctcgatgtccaggccgtccagcagagcggtcaccgccgcctcgtcctccgggtccactccggcccggtaggcccgcagacctacggtccgatagatggccccggtatccacatacaaaaagcccagcctgcgggccagcagcttcgccagggtggactttcccgccccggaggggccgtccacggcgatgctcttgtgctttgtcatgggttgattcctcctatgtcttgtgcggcggcctctccagcggcgtggccggtggaccaggcaatttgcagattgaagccgccggtataggcatccacgtccagcacctccccggcaaaatagacgccgggggccttcttggattctaaagtggtgggattgatctcggatacctttatcccgcctgatgtgacgatggcctcctccaccgggcggggcccctgtatgtcgatgcgcaggcacttgaggacctccagcagacggcggcgctgggccttcgtcaccgaatgaaccttctccgccgccgggatgccggtacgctccaccagcaccggcaccatcaggcggggtaccaggccctccagaacattgtgaaagtcccggttggcgttctcctcaaagtcccgcagcagacggcggtccagcttctcctcatccagtgcgggcttcaaatccagattgatgtagtagtgctctgtgtcaaagtcccgcatatgggcgctggcgctgagaatcagcggcccggacagaccaaagtgggtgaacagtaactccccctgcccggcgtagacggtcttctttttgctgttgcgcacctgaatggccacgttgcgcagcgacaggccctgcatttttgcacaggcatccccctccgccaccagtggcacaaggctgcctctgggcggcagaatggtgtggcccagcgccacagccagggcatatccgtcaccggtggagccggtcagcggataggaaaccccgccggtggcgatgaccaccgccccgccggggtaaaagccgcgctccccctccacgccggtgaggatctcaccctcccgtcgcagggcgcgggcccggtcctgcacaatgtgcaccccggaccgacgcagggccaacagcagggcgtcgatgatgtcggcggctttgtcggagcagggaaagacccggttcccccgctctgttttcagcggcactcccaggccctcaaaaaacgccttcaccgcctccgggggaaagcgggtgacggcgctggtgaggaaccggctgttgcgtgggacattctgcagcacctccggcgccgcacagtcgttggtcacgttgcagcggccctttccggtgatgtagagcttgcgccccagcttgggattgcgctccagcagggtgacggctgcacccttttgggcggcggcgacggcggccatacagccggccgcaccgccgccgatgacaattacatgcttcaagtgatctcttccactttctcatagacctcgtattcatcccagatctgctccagtgtctcaaaggtctgggagaggtcgtcgtttttcttgcggccgatggccacaatcagcgcgttgatcagcgacagcggagccaccagggagtccacgaaggacgccatatcgctcttggccagcagagtcagggtggagatgggagccaagggggaggtttcgctgtcggtgagggcgatggtggcggccccccggtcgtgggcaaactgcatggccttcaccgtccggcgggaataccgcgggaagctgacgcccacaatgacatcgttgggaccgatgcgcaagagctgctcgaatacctcactggtggaggtggcgtgtaccacggtgacattgtcaaaaatcaggttgaagtagaagcccagaaagctggccagggccgccgcggagcgcacgcccagaatatagatgtggcgggcgtccacaatggcgcttaccgcccggtcgaagtcctcccggttggtctcctccagagtcatatggatcttatccatatccgactgcatgaccatggacaggatgtcctgattgccgatacggtcgttggagacctcaatgcgctggatggaggtgagcttgctgcggatcatctcctgcagggccttctgcatagcgggataaccgtcataccccagttcggcggcaaagcgcaccacggtagactcactgacgttgaccgtcttgcccaggcggctggcagtcatgaaagcggccttgtcataggattccaggataaagccggcaatcagcttctgtcccttggaaaaggtactcatattggtctgaatgaccgaaaggatatctttggacattgtggacgatccctcgcatttctgcccgcccgtggcgggaatgataccacgctgtgttttgattcgtccctatcataccgagaattgaccggaaaagcaatcccttttctgcaagttttcctgatctccttgcaaaaaagagatcattttcgcaggagacaaagctcctcacctgtcaggcgccgccatgctcccacaggcagcgcgcccaggcagagctccccctcccgcacccgctggaggcggcgcacccgcaggcccgctgcggcgcacatccggcgcacctgccggttgcgcccctcatggatgaccacggagagcaccccctcccccaccggagtgacctgggccggacggagggcgtacccatccagctccatagggccccgcagcaccgggagggcggtgtccacgtcgccctccacccacacccggtattccttctccacctcgtggctggggtggagaagggcgtgggtcagcgccccgtcgtcggtgaggaggagcagcccctcggagtccagatccagccgcccaaccggccacacccgggcgccgcatccggccaccagccccgccacggtgcgccgccccttttcatcagagagggtggttacgtagcccctgggcttgttgagcatcagataagtacggcgggcgggccgccgcagaggccgcccgtccactcggatgtcgtcccgctccgggtcggccttgtcccccacccgcgcggtacatccgtttaccgtcacccgcccggcggagagatagccctccgccgcccgccgggaggacacgccgtgggccgaaaggattttctgcagccgctcttccatggccgctcccccctttttacaaattcgaatcagagatccagcggcagcagaccgtcgccagcgtgtcggcctcccccgcccggaaccagtccagcacccggccgaacaggccgcggccggcccggtcgtccgccacatcgccggcatagagcagataggtctcgccgattaccgcgccgtccagcgtaaagagcagccggccggcaatggttccgccctggataggggcctccacccgctccggcagctccacacgggccttgaccagctctccttccgtcagcggatagtacacatcggcggccgtatagaccggcacaaagcggttgaggctgcccgtcaccgggagcatgcggaaggtccggttcgccagggccagcatggcactgcggtagtgggcaaagccatagtcaaacagggcggcgtggtctgcccagtcgttgggatcattcagcgtgacggcaatcaggcgctgcccatcccgctccgcacaggaaaccaacgtccgccccgccctgtccgtgtagccggtcttgaggccagtgcagccctcataccgccagagcagcttgttgtgattggtgagggtgcgccctgccaccgtgatggaacgggtacccacgatctttgccagcgcttcgtgctccatcaccacccgggccagggcagccatgtcggcggcggtggagtagtgcccctcgtcattgagcccgtttgggttttcaaagtgggtgtgctccatgcccagctcggcggccttgtcattcatccaggccacaaaagtatccacgtccccggcgcagaagcccgcaatggccaccgccgcgtcattgcccgaggcgagcagcagcccgtagagcagcgcctccagcgtcagctcctcccccgccttcagatacatggaggagccctccactccggtccactcgggccggatggtgactacctcggacagatcagggtgagattccaccgccaccagcgcggtcatcagcttggtaatgctggcaatggggcgctcctcctccgcgttctgggcataaaggacccggccgctttccccatcgatcaggatggcggaggcagccgagatgccgggcccggcggcccggacggagggacagagcagaacagccagtgtcaaaaggacggcggcaaaccgtttcaaacagcatcacctcaggggatagatgctgctagtatgcgtgtcagccctgggatttatccttgtcctgctgcttctcgataaagccggtgaccttgtcaatcacatcgggcaccatctctaccacccggtccacggcggtgccgggcggaggcgctacgggcatcaggcgcaccgagtcccccttgacaatcaggaaggccaccggggacaggttcattcccgcgccgctgccgccgccgaaggagttgtcgtcctccggcttctggttcttggaggtaaagtcgctgccgccggaggcgaagcccaccgtcagcttggagatgggaatgatggtgatctcaccggccaaaatgggcttgcccacaatggtgttgacgtccgcgatctcccggagcttctgcatagtggtggtcatcagatcaccgatgggatgttgcttttccatacgttaaaccgcctctttctgcttgcttgtcgccgggctcccggcctcggcgcgatacttggagaactctgccagaaaccgtgtggtcaggcgcaggcccagagccagcgcctggccggcggtcagggtagccgccgcgtagagatagacggagggccgctccgcgtcaaagtccacccgggtgcgcagcctccgctccttcacgttaaaattctgctccaccagcggccagatcataccgataaatgcgttcgccccgccgaagcacagggcggcggcagcggggtccggcgccgccgcggtaacttcaagctggaacacatcgatgcgcagcttgcgccggaagcgccccgccgcctcggcgatcagcggaagaaaccgcttcaccagcgccagcggcccgccgcccagctccggctgcgggcgttcctcccgttttttctcccttcgggacgatttcccagcctttcggcggggctgcttcggctttctgggatagagcatcaggcgcagcggtcctacctttagcttgagccgcagtccggcggcggagtactccgccagcgcgcccagtcgcaccaggcggaggagcgcccccagcgccagaagcaccgcgcccaggatcaggattgctttcatccagccctacgcctcctcctcggcctgtgccatctcccgggccgcctgaagcagctcctcctcggtgacctcctctgtcccctccgcggcctgggcggcctgaagccgctccaccgccgcctgcatctccagggtaagctgtccgtcctccggggtggtgttgggcagctcgggcagctcatccagattggatagtccgaaggagcgcaggaaggtctgggtggtgcggtactggatggggcggcccggcacggccaagcggccgcactcctcgatcaagtcacgctccagaagcaggctgacggtgtaggagctgtccacgccgcggatctggtccacataggcccgtgtggcaggctggtagtaggcgatgatggccagcacctccagggcgggctggctcaggcgggcgggccgccgactctcaaacgcccggcggatgcagtcggcaaactccggcgcagagcagagctgatagctgttgtccagccgcaccaggcggatgccacgccgctcatagcggtaggcatcggccaggcgttggcacacggagtccgccgtgatccggtcgatgtccagcgccaaacacaggcgctccacccccaccggctccccggcagcaaagaggaccccttcaatggcggattcaatttccttcaattccatagtataccctcaatctgccgttttctccccatcggtggtcagctccagctctcccccgccctcctcggtacaggtcacggtgcagtcgctctccgtgcctgccagccgcaggcggcgtgccttgcacagctccagtactgcgataaaggtggccaccacctccgagcggctccggttgcccttgaacagagcccggaaccgggtcacaccgaagcggctgagccgttccagaatttcgccggccttgtccgccaccgggtagggctcccggcccacaatgccctcgaaggccgccatgggtggcgggaggcggtggtccacccgggccagcaccgccgtcatggcacgcagcagatcctccggcttgtggacgtagcggtaggtcctattaaccggcagggcctcgggcaccttgggaatatagtcccggccgatggcgtagcggtcggacagctctggcacgatggccttgatcttggcaaagttttcgtggcgctggtgctcctccagagaggcaatgagctgttccatctcggagatggcctcctcgtcgtggatggagagcagcatccgcgtcttgatgaacaccaggtgggccgccatggtgacaaactcgctcgccacctccagatccagccgcttgcgctgatccatccactccagatactggtctaggatcagggagatctggatgtccttgatctccatcctgttcttgctcagcaggtggaggatcagatccagtgggccgttgaagtcctccatagcctcatcccgggccttgaccaccttttccagatgaaaaatcggcgtttcgatggcgcctcacctcaaaacagatttaaaatagcagacgcgtcctggaacagcagcaacccgcccagaggcattccggtgagggtgcaaaagccccgtaggacatggaccatcaggaaggacaggggcttgtcgaacacccccaccagcaccaggaggatcaccactcccatcacatacttctcatagcgcaagatggtgtagtagattcggtcgggcagcagggcgaacaggattttggagccgtccaggggcgacagggggatcaggttgaacagccccatccccacccccaacagggccatgttggacaggaagcacagcacgaacaccgccgccgggcccagaggggccagatggaacacggcggagctgactcccaccgccgccagggcggtgaggaagttggccgccggtccggctagggcggtaagcgccattccctgcctggggtgcttaaaatagcgcatatccaccggcaccggcttggcccagcccaccttggccacaagcatcatcagcagacccaccacatccagatgccggatgggattgagggtcagccgcccggcatttttggccgtgggatctcccagtcgccaagccacaaagccgtgggacagctcgtgcagggtgatgcacagcagagctgccgcggcgctgataaggagggtgagcaggccccaccagtccatgttgttgagaaagtcggatatggagcccaagcgtccgcccccctagcacaaagatcgtgtcaattatagcaaatttccaggagaaactcaaggaaaagcggcggagccctcccctgagcgtccgccgtcctctcatacaatggtgttgcataggattccgatgcctgaaacctccacctctactgtatcgcctggttgcatggggcccacaccggcgggggtgccggtggcgatcacgtcccccggctccagggtcatggaggcggtgatgaaagagatgagcgcccgcacaccagtgatgagctgctctgtcctcccctgctgcaccacctgaccgttcagtcgggtggtgatggtcaggtgttccgggtccacctcgtcggtgacgacaggccccatgggggcaaagccatccatatttttgccgcgggcccactggccgtccgccttctggacatcccgggcggtgatatcgttgaggcaggtgtagcccagcacatagtccagcgcctcctcctccggcacatccttggcacgccgcttcattaccacggccagctctccctcgtaatccagccgccctacaaagtctggggcgtgaaccgtccccaggtgggcgttgagggcgttgggggccttgagaaacagggtgggccggtcgggggtgttggaggcatccaacatggacttcatttcatggatgtggtcgaaatagttctttccaatgcagacaatttttgtggcctcacagggagccaggaggcggcagccggacaggggcaggctctctccgtcataacggacaccctcaaagggcggctctgtcagagtgcgcaccacatcgccgtggagcaccccccacacgccccttccttctcgcagcagtttgacaaatctcatacgcttccctccgcgtgctccaggatcagattgagcagctcctgtttgccgtctcccttctcggctgaaaagggaatcagctttacaggctcgtccagctcaagagtttcccggatgcgcgccaggttcggctctatgtcgctcttgcgcagcttatccagcttgttggccacaaccgcaaagggacggccgctgttcttgaaaaactccgccatggtgcagtcgtccgccgtgggcttgtgccgggcatccacgatcatcagtcccagggtcatcagggagttgtccgcgaaccactcctccatcaggcgaccccagcgggctttctccgcctgggacaccttggcgtagccatagccggggagatccaccaggtagaaagcgccgtcgatcaaaaagtagttgatgtgggtggtcttgcccggtgccgcgcccacccgggcaaaattcttccggttgagcagccggttgatcaccgaggacttgcccacgttggagcggccggcaaaggccacctgaggcaggcgatcccggggaaagtccccggccttggccgcggagcgcacaaactccgccttctgtaaattcacactcatgtcaattcctcactgtcggaaggtgggtacttcccggctccgggagccggactcagggggcgggagcgcgtcatcccgaagggggtcgcaggtcttcagctccagcgcctcggccagcaccgaatccacctgctccaccggaacaaagtgcagagcggcccggacggtggggtcgatctcctccagatccggcacattgtccgccggcaggaacacggttttgatgccgttgcggtaggcggccatggtcttctccttcaggccgccaatgtgcagcactctgccccgtaaagtaacttcacctgtcattgcgatctcccgcctcaccggcgcgccggtgagggcggacaccatggcggtggtgatggcaatgccggcggaggggccgtccttgggcactgctccctccgggaagtggacgtgaatgtccttcgtcttgtaaaaatccgcctcgattcccagttggacggcgcggctgcggatgtaggacagggcggcctgggcggactccttcatgacgctgcccaggttgccggtgagctctaccttgccggagccgggcaccacgcccgcctccacctccaggatctcgccccccacctgggtccaggccaggccgttgaccacgcctacctgctccgtccggggcagccgctccgggtgatagcggcggatacccagatagtcctccaggttatctcctgtgatgtgaatcgactttacaccatttgacacaatgtccatagccgccttccggcacagtgcccccagcttccgctccagaacacggacgcctgcttcacgggtatagccccgaatcagctcccggatggcgtcgtcggtcagcctgagctgggcctttgccaacccgtggcgtttcagctccttgggcagcaggtgccgcttggcgatctgcagcttctcctcatcggtatagctggtcagttcaatgacctccatccggtccagcaggggccggggaatggtatccatggtgttggcggtggtgataaagagcacgtcggagagatcaaagggcacctccagaaaatggtcgcggaaggtgctgttctgctcggcgtccagcacctccagcagggccgaggcgggatcgccccgctgatcattgcccagcttgtcgatctcatccagcagcagcagcggattacagctctcagcctgcttgacggcggcaataatgcggcccggcatggcccccacataggtcttgcggtggccgcggatctccgcctcgtcatggacgccgcccagggagatacgggccagcttacggtttaaggcccgcgccatgctcatggcgatggaggtcttgcccacgccgggaggccccaccaggcagaggatctgtcccttcagtccgggggccaactgcttgaccgccaggaactccaaaatgcgctccttgaccttctccaggccgtagtggtcgacatccagcaccctgcgggccgcctccacgttgacccgctccttggtgtgcttgccccagggcagctccagcacggtatccaggtaattgcgcagaacggtggcctcggcggagccaaagggctgcttctccaggcggcccacctctttcgtgagcttgtccgccacctcctggggcagcttggccttggcgatgcgctggcggtactcggcaatctcgctgtcgccgccggcaccctcctcccccagctcctgctgaagaaccttgagctgctcccgcagaacatagtcccgctggctgcgggtgagctgctcccgcaccttgccctgcatctcctgttccagctccagaatctccacctcccggcggaggctctggcacaggcgctccaggcggcgcaccggccgcagctcctccagaatggcctgcttgtcccccgtgcgcatgggcaagttctgagcaatgtagtcggcgatgtagcccggatcctcactggagagcaccgagaggagcacatcgggggtcatcttgggagccagctcaataaaccgctcgaagagctcgtaggtctggcggataagggcctccgtccgggcggagcggcggaccggctgttccgccggaagctcctccaccagggcgttcaggtagggcgtggtcttgggcagaaggcacagccgcccgcggctgatcccctccaccatcacccgcacgttgtctccgggcaggcgcagaatctggcgcacattgcagatggtcccaatgctgtaaaggtccttttcctgcgggctttcaacggccagctcccgctgggccaccaggaaaatcggctggcctgaggccatggactcgtccagtgcctgaatggacgcctgccgtcccacatcgaagtggagcagcatctgcggaaagacggtcagcccccgcagggccagagcaggcatagtctgctgccggttcagttcttccatcacacattcacttccttccaggacagggatttgatgcagaatggggcgagggatgctcccccgccccaccggttcagttgctgtttaagagacatttcccttgggggatacgcccccctgctccgcatggagggcggcaccgccaaggcggggccgctgggtgcggtcgggatcgtgctcaacggcgggggaaacgtgttctttcacgctctcagccgtaatcgtcacccgggtgatcgttggatcggagggcacctcgtacatcagaggggtcattacctcctccagcacggcccgcaggccgcgggcgccgatgccgcgctcgatggcccggtcggcggcagcctccagcgcctgggtatcgaagtccagctccaccatgtcgtactccaacagcttctggtactgcttcaccagggcattcttcggctcggtgaggatgcgcaccagttgtcccttgtccagagcgttcagggtggtgatcaccggcaggcggcccaccagctccgggatgattccgaacttgagcagatcgtgaggctgtacctgcttgagcaccgaggtggtatcccgctccttcttactctggatgtccgcgccgaagccaatggtctttttgttcaggcgctgctcgatgatcttctccatcccgtcgaaagcgccgccgcagatgaagaggatattcttggtgttgatctggatgaactcctggtggggatgcttgcggccgccctggggcggaacgttggccacagtaccctccaggattttcagcagggcctgttgcacgccctcgccagacacgtcgcgggtaatggaggtgttctcactcttgcgggcgatcttgtcgatctcgtccacgtagatgatgccgcgctcagccagctcgatgtcgtagtcggcagcctgcaccagtcgcaggaggatgttctccacgtcgtcgcccacatatccggcctcggtgagggtagtggcgtcggcgatggcgaagggcaccttcagaatccgggccagggtctgggcgaacagggtcttgccgcagcccgtaggccccatgagcaggatgttgctcttctggagctccacgtcctccccgccgccgaagtagatgcgcttatagtggttgtagaccgccacggacaaggcgattttagcgtcctcctgcccgatgatatactggtccagcacgtcgcggatctccctgggggtggggatcacatcggggatgtccggcccggcctgctcctcgggatcgtaagtgtcgtccagaatgctcatgcacaggtggacacactcgttgcagatataggcgcccggaccggcgatgatgcgggcgacctgttcctggtgcttgccgcagaaggaacagcgcacggatttgcgctcgtcatttttcggcatggtttgctccctcaagtctttctaaggctcagagggagcggggcgtttgcttccccgctccctctgttggattttatcgcgtataaatgaccttgtcaatcaggccgtactccttagcctcctcggcggacatgaaattgtcgcgctcgcagtcggctgtaaccacttccagcggcttaccggtgttgtccgccagaatgtggttcatgcgctttttgataatctccaggcgcttcaggtggatggccatatcggtgatctgtccctgagtgccggcggagggctgatggatcatgatctccgcgttgggcagagccaagcgcttgcccttggcgccggaggagagcagaaacgcgcccatgctggcagccatgccgatgcagatagtcgacacatcacacttaatatactgcatcgtgtcataaatggccataccgtcggtgacggagccgccgggactgttgatgtaaaactggatgtccttgtccgggtcctgggcctccagatacagcagctgggccaccaccaggctggccgtggtggcgttgacctcttctcccaggaacacaatgcggtcgttcagcaggcgggaaaagatgtcataggaacgctcgccgcggttggtctgctctactacataaggaactaggctcataatgaaggatctcctttaattttgatgtcggggtgcagggcgccccaccatcctaccgcagacgggcaggctcacaaacagagtatgcccatcgtttggaaacttattcctccgtcttctccacggccgcctcggcggtctcctccaccttcttgcgggaggtgcccttgcgggcggtcttcttgggcttctcctcgccctcggcgctctcctccgccttcttcttggtggacttcttcttggcgggggccttgccgaccttggcgctgtcgtagaccacgtgctcagccttgtggtagctctgctccttgcggatgctctcggcatccaccgcggccttcaccttgtccacatccatgtgatactgctcggccagacgcttgtactcctcctccagctcctcgtcggagatggtgatattttcggcagccacaatggcgcccagcgccagctcacggcgcacccgctccagagcagcggccttggcctgctcccgcatgatatccatggtcatgccggtcatggccagatactggtcaaaggggataccctgggcctggatgcgctgggccatgtcgttcaccaggttatcggcctcatactccaccatagcgtcgggaatctcgacctccatgttgtccataacctgctccatcagagcggcctcgaagtcacgctggttctgagtctcgcggcgttccttcagcttctcacccagatcctttttaaagtcggcgagggtatcgaactcggacacatccttagcgaactcgtcgtccacctcaggcagctccttggccttgacctcgtgaaccttcaccttgaagacaacagccttaccggccaattcggcgtgatagtcctcggggaaggtgatgttcagctccttctcgtcgccggctttggcacccacgagctgctcctcgaagccggggacgaaggaaccggagcccagctccaggctgtggccctcggccttgccgccgtcgaagggcttgccgtccaggaagccctcgaagtcaatcaccacagtgtcgccggtctcggccgcccgctccacggtcaccatgcgggtggcgcggttgatgaagggcttgagctcgttgtcgatgtcctcatcagagatggcgacctcggccttctcagcagtcaggcccttgtactcgcccagcttcacctcggggcggacggtgaccagggccttgaaggtcaggccctccttgcccacatccacgatctccaccttgggccacgccacggcatccagcttctcctgctcaatagcctgggcataggcctcggggtacaagtcgttgatagcatcctcataaaacacgccggagccgtacatgccctcgatgatcttccggggggccttgcccttgcggaaaccgggcacgctgatcttgccgcgctgcttcttgtagaccttctcgacagcggcctcgaactcctccttgccgatctcgatcaccagctcgacggtgctcttctcctgcttctcgacgctcttgacattcatgttgtttacttcctcctgtcagccctgtcccgccgcgcatcggcggtatacggggccatctttcgcgttatccgttatatactagcagatatgcgtcaaaatttccataccttttttcaattattcacagattttttgcgggcgaaaccccacatagtctgcggagaccagataataggccacgcctccctgccgtccttccacggccaagcggtggctgccgccgtggagatggccgtaatagcagcgctccacgccgtactgctccagcagggcaatgatctctggacagcggtagccttggtagaggggcggatagtggagaaagcacagcttgggccgctcccccgccgccttcagcgacgcctccaagcggatcagctcccgcttgaacaccttctggtcgccggtctcctcatagaaccagccccgggtgccgcacagggcgtagcccccgtattcatagcagttgttgtgcagaatgcggagggttgaaaagccgctctccgcaaaaaagcggttcatcttggcggcggtgttccaccagtagtcgtggtttcccttgagcagcagcttccgcgccccaggcagggcgtccaggaaagcgaagtccttctttgcctcctccagactcatgccccaggacaggtcgccgcagagcaccaccgtatcctccggccccaccgccgcgaagcccttctgcagcttgtccacatagccctcccagcccccgccaaacacgtccatgggcttattggaggacagggaaaggtgggtgtccccgattgcgtagagagccattcagcgcagcatctccagcacctggtccaccatgtgctctttggtgacgctccggccaaagcggaccgtcttgtccttcaggacagccaagggcgccgggacaggtacgccggtctgctgggagagctggtccaaaatggccgtgccggcggccagctcgctcacgcccagggcgcccagcacgctgtcacagaacttgaaggggctggcggtggacaccaccacggtgggggtagtgtcaccagtatcccgccggtactggtcgagcacgtcaaaggccacggcggtgtggggatcaatcaggtaacggtgctcctgccacatgcggccgatggccttctgtgtctgatcgtcgtcgcagaaaccggcggcgaagagcttctccagcctgcccttgatggcggggctcacctcataccgcccggaccgggccagctcctccatgtacccgcgcacctcggcgtcatcgtggttggacagggagaagagcagccgctccaggttggaggagatcaggatatccatagagggggacatcgtattgtagaaggtgcggttgcggtcgtacacgccggtgcacaggaagtcggtcagtacattgttgctgttggaggcgcagataagcctgccgatgggcacgcccatctctctggcgtagtaggcggccaggatgttgccgaagttgccggttgggacgcagacgttgatccgctcccccttctgaatccgcccctcccgcagaagatcacagtaggcggagatgtagtagacgatctgcggcaggacgcgaccccagttgatagagttggccgaggagaggaaaaagccgcggccggccagcttctcccgcagggcctcgtcggagaacaggcgcttgacaccggtctgggcatcgtcgaagttgcctgccacagagcaaacccctacgttgtctccctcctgggtgttcatctgcagctcctgaatagcggaaacaccgtccttggggtagaacaccaagatgcgggtcttgtccacgtccttgaagccctccagggcggccttgcccgtgtcaccggaggtggcgaccaggatgcacaccgtcttctcctcttggtttttcaccaaggaggcggagagcaggtgtggcagcatctgcagggccatgtccttgaaggcacaggtggggccgtgccacagctccagacagtaggtgttttcgtccaccgcccgaacgggtgccacctccttcacatcgaacttctctccgccgtaggccttgtccgcataggcagacagctcagaggccgtgaagtcgtccagataggagttcatcacatagacggcccgctgctgataggacatgtcccgcatggtgtccagggcgttgtgggacagctttggaaatacctcaggggtcatcaggccgccgtccacagccagtccctgggcgattgcctccgccgccgtgcgccggtcttccttgttcctcgtgcttacatagtacatacttcgctcacaaccctcatcagattctcaaaaaacagggcgcgcaccagcgcctcactgtaattccgctgcagcagccgctcccacagccggtccagatcctgaatacccgtgatcccctccggcaggctggaacagccgtccagatcgccgcccaaagcgacggtccgctcgccccccagctccagccagtgctccaggtgggcgatggcggtgtccaggtcggcccgctcccccaggaagttggcgtagaggttaaggccaaccactccgttgtggtctattatggcagtaaattgctcatcggtcaagttcctgggatgagaaaagaccgcccgggcattggaatggctggcaaaaaaggggccgctcagctcctccgccacgtcccagaagcctggatccgacaggtgggacacgtccaccagcatgcccagccgctccattttgcggacgaacaccctgccctgaggcgtcagcccccgctccggctcctctgcattcgtgccggagagggcgtttacgtggttccatgtggggttgacggcccgaacccccatggcgtgggcctcctccagccgctccagggagcagtccagcagctccgccccctccaccgagaggaaggccgccctccgccccgaccgaaaggccgcctccgcctccgcgcctgtgcggcaaaaggctgccagatcggcattggccgccatttcccgctcaaagagcgcgtactcctccagaaagagctcccggtgggttttcccgctgagatcccgaaccggggtgggctccggctctccgaacagggcgaaaaactgggcgcagcggcggtatttccccatacgctccagatccacatggccgtcgttccggcgcaggcctccgccggagagatagcgcagaaacaccgcgtcacagtgtccgtcaaacaaatcaattgcatactgctccatctggaactccccctaaaatgcattttcaagccaggtgatccgggggcggcgggtggcggtgccctggggggcgtagatctccgccacgtcaaagcggggctggcgcgcctcctccgggtgctccgccagatagagctccgccgtggcgcgcaggcgggcctgcttccggcgatccaccgcctcccgtccgagggcaaagcgctcctccgtccgaagctttacttctataaaggataaatacttgtcagtagctgctatgaggtcaatttccccaaaccggctgcggtatccggccgccaagatcttccagccctttcgcctcagttccgccgccgccagcgcctccccccagcggcccagcagctttgcctctcccccgctcacagcttcttcaaaaaggtccgccggtggatgggacaggggccgtaccggcgcagcagctcatagtgccgcttggtgccgtagcccttgtggcgctcgaactcatattccgggtagcgttccgccatctgctccatatagcggtcccggctcaccttggccaggatagaggctgcggcgatcgatgccgaaaggctgtctccctttacaaccgtctggtgctccaggaggatagccgccgtcttgccgtggtcccggttgccgtcgatcagcgcaaagccgggtgcgggctccaggcggtcgatggccatctgcatggccttgatgcgggcgctgaggatatcggtagcgtcaatctcctcggcctctacccgggccaccgcccaggccaccgccacggttcggatcgtgtcgtacagggcatcccgtcgcttgggagtcacctgcttggagtcgttgagtccctcaatggagcactcggggggcagaatgaccgccccggcgtagaccgcgccggccagcggacctgcccccgcctcgtcacagccgcacaccagggcgatccccctcgcccagcaggcccgctccagcgcccagcggtcaatctctgccatgggccgcctcccggctctccagatcttggggcgtctcaaatgtcaagtttcccagcttgccggagcggtactcgtccagaagcaccttcgccatgcgctcggtgtccacctcgccgccagagatccggaagccccgctttttgccgcagagctccagcagctcccagccaggcagccctgggtcagcctccagcttataccgctcggccagcgcctgggggtagcgccgggccagcagctcaatgaggtgacaggccagggtctccagatccatgatttcgtcctttacagcgccagtaaaggccagatggatgccggtagtctcgtcctcaaacttgggccagaggatgcctggggtatccaaaagctccagcccggcatccacacttacccactgtttgccccgggtgacgcccggccggttgcccgccttggcggacttccgcttggccacctggttgatgaaggtggactttcccacgttggggacccccaccaccatggcccgcacggggcggcccaccagccccttggccttccactgctccagcttctccttcagcgcctgccggatgacggtggagaactggccaactcccttgccgtctctggcgttggtctccagcaccgcccagccctgtctgcggaaccagtcagtccatacccggttcatggccggatcggcctgatccgcccggttgagtacgatcaggcggggcttctcccccaccagttcgtcaatatcagggttacggctggagatagggatgcgggcgtctatgatctccgccaccagatccaccagtttgagatccgcctggatctgccgcctggttttggtcatatggccaggataccactgaatattcacgcgttcaccctctctaccgaatattcttgtattatacacaatgctccggtatttgaaaagggcaaagacgcataaaaagtgcccggccaatggccggacactttttagcggctttggatcgtactatttgagccagccgatggagacgcagttactgggtgcataccaggtcacgttgcggcccaggccctcaaagagggcgcgcacggcgacatactctacgccgtccacagtcttgacgggcagcttaaccgacttgccatccagcgtaaccagaacgctggagccttctgtgcgcttttctgcactgataccgttcacaatgtcgttcagaggaacccagattttcccgggctccacaactagcttgttgttgaaggactgaaccaggccattccacatcactgtgggaacagaggcatccttgcggtagacctcctcacctccggagacggtaagcagcacttgggtgtccttgatgtactctgcggggcaggtcatcagatcacggtcaatcactgcaaagtccgccagcttgccgacctccagggaacccttgatatcctcattgaactctgcataggcagaccagttggtaaaggaacgcagggcctcctcacgggtcatggcctcttcaatatgccagccgccctttggctcacccaggcggttggtgcgggtcacggctgcatagataccgtggtaggggtttaccagctcgaccggagcatcggagccgttgggaatcacactgcccttgtccaaaatggtacgccaggcataggcccccttgatgcgctcactacccacgcgatcctccgccaccagcatgtcagaggtagcgtgtgtagtctgcatagagggcagaattcccaggctgatggcgcggtcaatgtcagcgggcgccacaatctggaagtgctcaatgcgcagacggtggtcatcccggggattggccttgatggctgcctcataggcgttgatcatctggttgttggcgccgtcaccgatgcagtgggtcgcaatctgataaccggcgtcataggccaccttaacgacttcgttcacctgttcctgtgtatagcggtaatcgccgatatggccctcacggtcggagtagggctccagcatggcggcagaacgggcccccaaagacccatccgcaaacatttttacgcagcgcagactgagatgattgttgtataaaggctcgtaattctcattgtcaatgggatggctcttcaaatactcgacggtctctcctgcggcagatgtgtgggaaatcatcccgtagacacgcagcttcaactctccggactcatacaggggtacaaagacctcgttatatacctcaatgctgttgcctgcatccatcgcagaggtcagcccataagagaatagctgctcttgcgccttcagcaggccttcctgcatctgctccaccgtcagctctggaatcagctcccggatgggattcatggcggtatcggtcatacagcccagcagctctccatttgcattcttcaggtactcgccgccctggggatttggcgtatcgggggtaatcccagccaactcgatggccttgctgttggcccagcccatatgcccgcatgcccgggtcaggaatactgggttgtttggggcaaccgcgtccaactcctcctttgtagggtagctggtgtcctcccatactgtgttcatccagccgcggccctggatccattcccctggctttgcctgttcggcggccgccttgactagatccaaaatcgcctgcttgggcatccagaagcagtccagattcatcagactgctgcccaagccagccacgtgcatatgtccctccaccaagcctggaatgaccgtctctccacccaaatcgacaaccttggtatcgggaccgatgtaagcctccacaccggcctcaccgcctacatagaccaggcggtcgcctttgatcgccagcgcggtggccttggaaaatgcctcatccacagtatagatgtttccgttgcggtatacgctgtcggcagcctctgtaccggctgccattgcagggaatgctgagagaagtgtagcgaggactaagcatgcggcgagagctttacaaatgcgtctgcgtgacattatggttcctccctcatcatattcttctttctgaattcctggatcagcgtgcgccccctaccctccttccagtcttcatgatcacagcgtaccacattttatacatcacatcaaggaaaaacgcaaattaaatttgttatttttcacatattacactctgtggtatagagatgtgagctccggcattgcagaagaaatacttataaaaaggctgtggagaggcagttgcctctccacagccaaatatccaagactcagatgcgctccttgaccttggcgctcttgcccacgcggtcgcgcaggtaatagagcttcgcgcggcggaccttacccttgcggacggtctcgatcttctcaatggtgggagcatggatggggaacaccttttccacaccgacgccataggagatgcggcgcacggtgatggtctcctcgatgccgccgtgcttcttggcgatgacggtgccttcgaagacctggatacgctcgcggtttccttccttgatatggacgtgaacgcggacggtgtcgcccacttccgccacagggggctcggctttcaggtacttgttgttaaacgcctgcatgagatccattttaaaacttcctcctagtttataggtgttcttgcagccatggatgccgcctacctttggcggcggccgcagaggaccaccctttattgagactgcaatagtttaccacaagtctcaacggattgcaagcagaattttcatcccatccgtgtccctcggcatggtttggctgcaggcggcaccagcagccaaagcgcggtaatgagcagagtgaggtttcccctcccctgccagagcagcagcagcgctccgagaaccagccccactgccagcgcggaggagagcacccgcagcagccgttctgcccgttcctccgaggtcagcagcgccaggatacaccagaggatgcgcccgccgtccagttggacagcgggcagcagattgaatgcggccagcgccagattgagcccagcaaagcagtacgccccctccgtcccaagcccggccgccatccgggcggccagcagattgaccgccggaccagccagcgcagcggctatctgctgccagcagcccagcggacagcgggcggagagacgcatctccgcgccgacacaggtgatgcgcagggcggttacccgcccgcccagggcccggatgaccagccagtggcccagctcgtgcagggcacaggcacaaaaggccatcagcagtacaccctgttcatccaaatagtagagcgccgcccccagcagcagcgcgcctgcgctgatttcaactcgtttccatctcagcattcagttcgtctcgatataatagagcgggttgagcagcactccgttcagcttcagctcaaagtgcagatggggccccgtggaattgccggtggcacccgagagggccacccgctctcccgccgccacggtctgcccctgctgaaccagcagctcgctgcaatgggcataaaagcttttcagccctccagggtggctgagctggaggtagagaccgtaaatcgggctgtcgccgatatagtctacggttccgtcggcaaaggccagaacatccgttccgtcgttcactgccagatccacgccgttgtgaaatttctcaccaccgtctactgggtgttcccgccagccaaagtcggatgatacccaccccagcgccggagttaccgtctcccccacgcccaaggcgttcagattgtagcggtccatggtggcgttgtccgggagcgtgggaccgttgtactctacatggactacggccggctccggcgtggcggtgggaaccggagtgggttccggtacggtattgggctccgctggttctacagcgaccggctccggcttcccagcctcccccaaccagtggctcaccgcatcctcacgtgcggggaagccgctgagaaatgcggcctgggcgcggaacaggggcgtgctcacctgtccctctccgtccggcaccgtgacagcctctccgccaaagacctccacccaaaggtcccccagggtgtccaaaatcggttccccctcggagatcgaccggcccaggctcgcaaacgcagctttgaaatccgtgtcggcctgaatagcgctcaaaacagtttcccgcacctccgcgagctttcctggaaatactccttttccgataaataccaccagaaacagcgccagacatactgccaactgcgccatccggcgcttctcacgcggacccagcgccacgctgcccttttttctccggtgggacagcgccggcctatgcccgcccgtccgctcctgcctccgcttttcccacttttgataggccgtttccatagcggcatcttcccttctgtacgcatttcacagcatgtatatgcggacgtgccttttgctatgcggagaagatttcctctcttgacaaccggcggcaagacagctataatagtatccatcgtgtgaacggggtgtggcgaagtttggtatcgcgcatggttcgggtccatgaggccccgggttcgaatcccggcactccgaccatgcggagtgtccttataggatctgagtatcctacaaaggacactccgcattttttattgccaaaattggggcagcgccgttttcgtcgaacagcagccgattccggatgcacaggagctttaccttgtgccgggtaagtaggtcaatgtagcttttggtcatgccccattcccggcctatccgggtcaggttatggactaaaaccacatccaccttgccagtgaccacggcctcggtcactttctggag

SEQ ID NO: 4308 - DNA, 734 bp, Unknown
  gut microbiota DNA sequence
gacctgtcccatcccttcggccgcggcaatcccctgtggccctccaacggcgacttccacatcgaccgtgtgcagcacatgcccatgcactatcgtctgcttcagaccttcaacgacttccacatgcacaactccacccacgccgactccccctcccacgtgattcccgagtctccttacacccacgagctgcctctggagaactactatggccctgcggtctgcctggatatccccaaaaagcactgggagctgatcaccgttgaggacatcgagaaggccgccgccaaggtggagggcggcatccaggagggcgactgggtcctcatctgcaccggcatgaaccagcgctggggcgagaacgacgactacttcatgtactcccccggcatgtccatcgagggcgcccactggctggtggaccacaaggtcaagggcgtgggcttcgatctgcaggcgctggaccacatcctctatacctacgcggcccagcacggccccggcccctacgtcccccgcatcgtggacgagtacaagaaggagtttggtcatgagcccatcgaggactaccccgagtgggagccggtgcataccatcctgctgggcaacaacgtcatgggtattgagaacctgggcggcgacatcgagaaggtgaagggacagcgcttcatgttctgtgccttcccgctgcgctggtatatgggcgacggcaccatcgtccgcgccgtggccat

SEQ ID NO: 4309 - DNA, 289 bp, Unknown
  gut microbiota DNA sequence
gctatttattttagcactcacactttcgcttgtcaagaacttttttcaaacttttctgaggtttttcagcctcatggccgttctttttgttcttttcaagcaggttcccgcctctcggcgcgaactcatttagtttaccacgctctcactcacttgtcaagcacttttttcagcccgcttccgaaagtccgtccagcttccgcccggtctcttccgtctgctttcctgttttttcatgccctccgtgaggcgctcagttagaataccagctttcctcctctttgtcaac

SEQ ID NO: 4310 - DNA, 16108 bp, Unknown
  gut microbiota DNA sequence
gtctgctttcctgttttttcatgccctccgtgaggcgctcagttagaataccagctttcctcctctttgtcaacacctttttctctttttttcaggtttttttctcggctgtcaaaccggaccggatcactggtattctaatccatagcatgcacaagatctgccacccttatacctgcctgcgcagcttttttaccagcaggagcaaaacagggatgccgaagccgaagagcaggctgccaatcctggccgggccctccatccaccgctccagggaaaaggcgtcgggaaagaggaaccaggcccccgccagggccagcaggagcaggggaagtacggcgtgcttgcgctcctttaaagagaatacggactgggccaggacggagcaggagcccgccagcaggttgagcagggctagatcagagaacacccagagggcgatgatgaccgactccacccgttggaaggtgccctcgatgccgatcccctttaccatcataaaaaagggcgtgtccatgcgagcggtcagcccgggcccgaagttgcccaggcagacaagctgaagggcggtaagcaccagacagaaggcggccgcccaccatagcgcacggcggcggtctccctctccccgagtaacattcccccccaggaaggcggcaaagaccacataaccgaacaggcccagcaccggaacggcggcggagagcacccccggaagatcctccgtccacaggggaaggatgtgccggggctccacctggagtacgcccaggatgagggagaagcccaggccgatggccagggccaggtagaacacctctccggtccgtgccagcacccgcaccggcttgcgcaccagccagagggtgagccccagcagggtcagcaaaaacagacccaggggggcgttccggtaactggtggacaggaaacggagggcgaaaagcctggcgttggcgctgagcagaagcagaccccacaataaatagagaagaagtacccccttgcccaaccccctgcccaggacggtctcggtgacctgggccagccccgccccctcccctgccgggcgcaggagggcaaagagcacccagcacagccccagcagtaccggcagggcagccagggcggacagccaccccgcctctccggccagggcggcggtctgggagggcagcacgccgatggccggagccaggagggcagcgaagaggagcgccaggagctggcgcagggagattcggtcgtcaggcatgggtataccgcctttcctttgagctgccgccctcaccgggcggcgtcatagctgcgctgaagcttggccgtcacgtgcagctccagctccagcgcgcccagagaggccccttccagcgcctccttgtgccagggccgggccagggccgcccgccggagcagccccaaatagtccgcgtccagctcctgtgccagttccagcgcggaccggatgcgcgcctcctccacctgggccagggccgcctcgagggaggcgtgtacctcctccgttcggaggtccacattcccctccgccatattggcgtccagcgtacaggtgagggacaggccggtaagggcgcccccgtccatcaccgggcggacggaggtcctggcccccaccacacgcagggccgccactccgcctccatccaggggcagctccaccacatcggcgtccacctggcccagtaccaggttgacccccagggcggcgtcccccccagcccagccggccaggcggtccccttttaatatgccatacccggcggcggtgagagcctcgtccgcctctaccgccgggagaaaggtggccccctgggcatagagatccgagagggcgtcctttacggtgcggggcatggaaccggccagcagacccgcgtcctccgccagcgcctccagccggtcggcggcggagccgtcctcccccgctgctgtgatcgccttgcctgctgtgccgccccgcaccagatagagggcggtgtccagccgggtctctacatcccggagaatatagtccagggcgggctccaccccctgcctggccagcccctcccccagcaggagctggcccacatggccgaagtagaggtaggaggagccctccccctgcatccccagcacggcggcgctgatggtgccggcctggccggacaccacggtggccgccccctccgccggatcgcccgagccgctggaggcggttacctccacctgcccctccccggcccggtccacgcccagggtctgcatcagctccatgtcctcgatttcccgggcatagggcaacaggccgggcccacggcggcagccggtgagggtcagggcggccaggcccgccagcagcagggctgtcatgcgtctcatttctgattcctccggtttcgggttttcagggccgccgggcgctgctttacccgcggcaggggctgtcggaacaccgcgtgcccctctacctgctccccggcattcgaggcaaagggggtcaggtaggacacgccgaagctctcaatgcctgccagatggatcaccagcgccgacaggccggccaccacgccgaacaggcccgccgcgctggccagcagggccagcaggaaccgccagatgcgcagggcgcccgctacctcctgggagggcatggtgtacccggcgatacccgcgatggccaccacgatgagcaccgcgggggagatgatcttggcctccaccgccgcgctgcccaccaccaggccgccgatgatagacacggtctgcccgatggactggggcaggcggagccccgcctcctggagaatctcaaaggccagcagcaggacgatgacctcaaagacggagcggaagggcacgtcctgcttggcggcaatgatggacagggccaggcgggtgggaatcatctcctggtggaaggtgaccatggccacatagagggcgggcagaagcagggtgcccagcatgcacaggtagcgcagcagggtgagggcggaggccagcagccagctctcgctcttgtcctggggcgcctggaggaaatcccccagcacgccgggggccaggtagcccagaggcaggccgtcgatgaggatgcccacccgcccctcggccagcccggcgcagaagcggtcggaccgctcggtatattgcaccagcgggaaggcggtgcgggcggcggggacgatatactcctcaatattgcccgtggccagcaccgcgtcgatgtcaatgtccgccagttgggcggccacctgctccaccaggtggggattggtgagcccctctatatagaggatgtccaccgacgtgaccgactggcggcccaccacctgctcacggatacgcagctcgggggccttcaggtggcggcggacgatgctggtattggtgcgcaggctctccacaaaggcgtcccgggagcccttgagcaccgtctcgttgctgggagagctgatggatcgcttttcctcggtgcccacgttgagggagagcaccgaggattccccgggaaagaggagcagacagcagccgttcaccaaatcaaacaccgccgcgtccagccgggtacgctcctccgcgctcaggttgtagagggccccgtccttcatgcggtccatggcctgccggggagtcccgcagcgggccagcgcctcgtcctgggccagcggccggagcacgtagtcgctgacccgctccatcttcaccatgccgctgaggtagcacagggtgagcgtgcacgcgccgccctcccccagggacaccggacgcttggtgaagtccacgcagtcctggaagatctgctccagccgttccaaggtcagcggcccgtcaaagcggggctccttccggggatggggtacgctgggggcacgcttccgaccaaaaaagcccatggcgcacacctcctgttgtctattttgctgaatcgaacttttttaggatggcccgttttcgcccggttatacaaatttaaacgaaccagttgcaattttccagggatgttgatatactttataaaaactacaaagttcaatagatgaactatccactttccttctggtaattatcccatgtcctccgcaggacagggttcattttatgtgataaggaggagccccttatgaagccctttacccagactgccgacaccctggaccaggagctggcggacaaaatcgacggcattctcgccgcccatggcgaagatcccacccagctggtgggcatcctgctggacgtggaggccgcggtggagcggcactacatcccggaggccgccgcctactatgtggcggagcgcctgggggtgaagcccacccaggtctacgatgtcatctccttctataccgcccttcacgacaagcccagggccaagtttaccctggaggtgtgctcctccgccccctgccgggtgaaggacagcgacaccctgctggagcggctcaagcgccttttaaatctggaggtgggccaggtgacctatgacggccgcttttccatcgagcaggtcccctgcttcggggcctgcgacgtgtcccccgccgtgcgggtcaacggcgtggtatacggccatctggacagcgaggagcgtatcctggatatgctccagcagctcaactaagggggaacggacatgagcaagacgctttgtttcatcacccggaatttcgggaagtacgacccggacagcctgaagggctatgaatccatcggcggcttccgggcgctgcgcaaggccctgaccatggagggctgcgacattgccgatgtgctggccgccaacggcgtccagggccggggcggcgcggcctacgacatgggtaaaaagtggcggcaggcccgggaggtacccggcgcccacaagtgcgtagtgtgcaacgctgacgagggcgagccgggcaccttcaaggaccgggagctgctcacccacgaccccttccaactgctggagggcatgatcatcgccggctgggccgtgggggcggacaacggatacatctacctgcgggaggagtactcccacctgcggccccggctgctctccgccatcgcccagtgcgaagcggcgggctacctgggggaggacattctgggctccgggctgaactaccgcatccacctctactccggcgcgggggcctatgtctgcggcgagggctccgccctggccgagtccatcggcggccacgccggccggccccggatgaagcccccgtttatcaagcagtgcggcgtgttccacctgcccacctgcgtcaacaacgtggagtccctctccctggtggcccccctgctgctggacgacgagggctactataagagccagggcacgccggactgcccgggcaccaagatgatctcggtgtgcggcaacgtcaagcgccccggcgtgttcgaggtgcccttcggcatcaccatccgggagatcgtctatgatctggccggcggcatggagaacgaggactaccccctgcgcctggtgcagcttggcggcgcgtcgggccgcatctgctcccccgcccaactggacaccccctacacctacaagggcatgcgtcaggcggatctcaccgccatcggctccggcgcggtgctggtggtggatgaacgcaccagcgtcatcggctttctgcgcatgacccaggagttcttctcccacgagagctgcggccagtgtaccccctgccgggagggcaaccgccacatctccctgctgctggacaaggtggccgagggtacccacaccgcccaggacatcgccaccctcaagaaatttgccgacattatgtccagcgcgtccctgtgcggcctgggtgagacggcccagtctgccctgctgagctgtatgaagcgcttcccggaagtctttgccgtaaaagaggaggtcgccgtccgatgagcgaaatggtacatatcacaatcaacaagcagccgctggaggtgcctgcgggcacccgcatcattgaggcggccaagatgctcaacatcgatattccccacctgtgctaccacccggaccagaccatcaaggcccactgtcggatgtgcatggtggaggtggtgggctcccgcaagctgacggcggcctgctccaccgtggtgtgggagggcatggaggtcatcaccgactccaagaaggtgtacgacgcccagaccggcgtgctggacctcatcctctccgaccacaagaccaactgcctttcctgcgcccgcaacggctcctgcgagctccaggcgctctgccgccgctttaaccggctccacccggagctgcccgacatctcctccgacgagccgctgcgcatcgacaacccctccatcgtccgcgaccccgccaagtgcgtcaagtgcggccgctgcgtgaaggtgtgcgccgaggtccagggctgcgccgccctgacctactccggccgctccgccggcttcaaggtcaccaccgcctttgacctgcccatggaccagaccgactgcgtgctgtgcggccagtgctccctggtgtgccccgtgggggccatcgtggagaccgactacaccaacgaggttaccgccgccatccaggactcctccaagcacgtcattgtccaggtggccccctccgtccgggtgggcctgggggacgagttcggcatggaggccggcgccgtcgtcaccggcaagatggtcactgccctgcggatgcttggctttgacaaggtgttcgacaccaacttttccgctgatctcaccatcatggaggagggcagcgagctgctcaagcgcatccgggagggcgggaagctgcccatgatcacctcctgctcccccggctgggtcacctacctggagaagcaccaccccgagctcatcggccacctctccaccgccaagagcccccaggccatgttcggcgcggtggccaagacctactatgcccagaagatgggctgggacccccacgacgtggtaagcgtgtccgtcatgccctgcaccgccaagaagtacgaggccagccgccccgagctgggccgggacggctatcaggacgtggactacgtcctgaccacccgggagctggccaagctcatccgctatgtgggcctggacctgtccgtgctgcccgagagtgagtttgactcccccctgggcaccggctccggcgccggcgccatcttcggcgctaccggcggcgttatggaggccgccctgcgcaccgcctacgagctctacaccggcaagaccctgccccggctggagtttgacgccgtacggggcgacatcaacgccatcaaggaggccaccattgacctcgacggcacccccctgaaggtggccgtggccaacggtctgaagaacgccgaggagcttatccgccgggtagagcgcggcgaggccgactatatcttcatcgagatcatggcctgccccggcggctgtatcggcggcggcggacagcccatcggcaccaacaacgccgtccgggacgcccgtatccaggccttgtatgagatcgaccggagcctgcccctgcgcaaaagccatgagaacccggagatcaagaccatctacgaggagttcttcggcgcgcccctgtcccagcgctcccacgagctgctccacacccactaccatgcccgcaaaaagcggcacgatttttcccacctgaattaagcgcagaagggccgtggggccgccggatccggcggccccacggccgttttatgagcttattccgggataaattccgtggtgcagtccatgccgttccatacctccccgtcggagcggtagtacttccgctctgatgttccgtccttccgggtgtagcccaggacaaacacctgcccggcctcaatcggcatgggatagtcgttgcagggcagcacatcgctgctctcgggacagtcctcgaagtcctcataggccccctccagccgccagaaggcccgggactggtagtccccggcccagccggagatatcctcctccccgaagtaggacgcctggtactccttccccgccacggtgagggtatccgtccgctggggctcccaggcaatccaggagatgtcctcggtgtgaagggagtccccgtaccgctctaccagctgagcggccatggaggggacggttcccgcggagtccgccatggcatccgggtcggtgtgggccgcgccatagatgcccatgacgctctccccatccagggcgtcaaactcccggatgaagttctctgccatccggttttcccggtaaatatcggagccacgctcggcaaaggttttcccctgctggatggcctccagggtcaggcggtagtcctccgtgtccgccaggccccgctcctccagatagtcttggtaacgggccccggtgctgtcgtactggtggcccacgtcggtgccgtggaacaccgtcttggggcactgctccttgatggtgcggtaaaaatccagcgtctcggcgccggatgagagcgtgctctcccaatcctggtggagctgctccagaatctcatcgtcctccgcgtccatccacaggttgagccactgggccgtgtagtgcgagagctccacaaacaggtgccgcatcccccggtcgtagcactccttccaccgctccgcctcgtactcctcgatggcggcgattccgtggatctccccgtagaggtagatctgccccgctggaatgccctcatccgtcgccaccggggactcttgtaccggcttcccagcgcagcccgccagcatcaggagcgccagtacggccgcaaattctttaacatacctcatattcggcaccccccaaggcctttttcccagtgtagcagatcccaccctgtcaaaaaagggttctcagattaaaattttctgtaatccacccacccggcgggcccggcccaacttttacaaaaaaagagcttgacaaaccgggccgccgccgttatactgtagcaaatcaaatcggtaaaccgatgacgaagaggagtagtccggtatcaatgcctctcagagagccgcgggtggtggaatcgcggcaggcaacgctcggatgaatggacttttgagggcacagcgaacagcctttgggctcagtagcgcgacggggactccacccgttatccggggagcatgggctgatcggcccgtgaaagtgagtgggcgtatgcgctggtatacgtcaatccgggtggcaccgcagaggctgaagctacagtcctttgtcccagagaaacaatcttggggacaaagggcttttttgtacccttttcccctgcagcacagaaaaggagtgtatcaacatgagcaagatcccccaccgcctgtatctgaccgaggaccagatgccccagaagtggttcaacctgcgctccgccatggccgagcagcccgatcctctgctccaccccggtaccctccggcccttgggtgtggacgacctctcccccatcttctgtgaggagcttgcccgccaggagctggatggcgccaccgcctatgtggatattccggaacccattcaaaacgtctataagatgtaccgcccttccccgctgattcgggcttacgagctggagaaggccctggataccccggccaggatctactacaagtttgaggggaacaacacctccggttcccataagctcaactccgccgtggcccaggcctattatgccaagatgcagggcctaactggcgtcaccactgagaccggcgccggccagtggggcaccgccctcagtgaggcgtgcagttacttcggcctgacctgcgacgtgtttatggtcaagtgctcctacgagcagaagcccttccgaaaggcggtaatgaatgtatttgacgcctctatcaccccctctccctcccccacgactgaggtgggccgccagatcctgcgcgaccacccggagactacaggaagcctgggctgcgccatctccgaggcggtggagtccgccgtccagagcggcggcgccaagcgctatgtgctgggcagcgtgctcaaccaggtgctcctccaccagtccatcatcggcctggagagcaagctggccatggagcagctgggggaatatcccgacgtggtggtgggctgcgccggcggcggctccaacctgggcgggctgatcgccccctttatggccgacaagctgcgggggatacggaatccccgcatcgtggcggtggaaccagcctcctgcccctccctcacccggggcaagtacgcctacgatttctgcgacaccggccgggtcacccccctggcccggatgtatacccttggctgcggcttcatcccctccgccaaccacgccggcggcctgcgctaccacggcatgagccccatcctctccaagctctaccacgacggctatatggaggcggtggcctatgagcagacccgcgtttttgaggcggcggtgctctttgccaagcgggaaaccattctccccgcccctgaatccgcccacgctatccggggggccatcgacgaggctctgcggtgcagggagagccgcgaggccaagaccatccttttcggcctcaccggtaccgggtactttgatatgactgcctatgagaactatctcagcggaaagatgagcgattccatccccaccgatgccgacctgcagaagggtttcgacagcctgccaaaaatcccccagaacgagggtatttgaggctttacagcaaaactttaggttgcacattgtcccccggctggctataataggagggacaataaacacaaaagaaggttttgccatggaattccgcgcaaacgagggaaagagcgtcaccatagaggtgggcggaaagacctacgcccgccacgccattcagacccatttcgtccaggtgggcgagagctatatcgacctggtggagcagtatgtcaagcccctgtggcagcccggcgacctgctctcctccagcgagaagatcatcggcctgtgccagaagcgggtggtctacaagaaggacatgaaggtgggccgcctggcccggttcctgtcccgcttcgcctcccactcctccgccggcatcggcgtggacagcccctacaagatgcagttcgccatcaacgagcggggcgccctgttcgtgctctgggccgcgttctgcgccggcgtggccaagctgttcggcaaacggggcgtgttctacgagatggtgggccaggaggtgtccggcctggacggcttctacgaccacgagttccaggagtacggcgagttcggcatccgcatcccggagaaccccggcaaggtatgcgacgagatcgaggccgccactggcgtgcaggccatgattgtggacgccaacgatctgaacgtggagattctgggcaaggcgtcctccgtcaccctggacgacgagaccctcaagggcctgatccgggacaacccggcgggccagtcccgggagctgacccccttcatcctcatccgcgaggtaaaggaggagcgcgcgcctgaggaggcgcaggcataaatccgtttacagacagcacaagaggcggaatcccccccggcctgcggccggggggaattccgcctcttaattcgtcccggctcagcgccgggcacaggctggctccaccttctccgcccgcgccggacggcgggtccggccgcggctcacggccttggccagctcgcacaccaccacgggggtaatggccagggccagcaccacggcccactccagagggctcatgggaacggtgctgaacaccacctgaaggggcggcacgcacaggacggccacctgcatggtaaggccgatgagaaacgccttgttcatggccggattggagaacaccccgatgtgaaagagggacgagcgctcgctgcgcacgtcaaaggcgtggaagagctggcacagggtgagggtggcgaaggccatggtgttggcggcggcgtgggcctcgccggggtcggagagcacatactcccccaggaaataggccgccagggtcagcagccccaccatcaccccctgccaggccagccggaaggcaaagccgtgggcaaagagggaggcgtgggcgtcccggggcggctgggacatgaccccctcctccaccggctccacccccagggccagggcgggcagggagtcggtgaccaggttgagccacagaagctgcaccggcaccaggggcatctggtggaagtggaacaccgtggcgcagaagatggtgagaatttctccgatgttgcaggagagcaggtagtggatggccttcttgatgttggcgtagatgccccggccctgctccacggcggagacgatggtggcgaagttgtcgtcggtgaggatcatatcggcggctcccttggccacgtcggtgccggtaacccccatggcgcagccgatgtccgccaccttgagggcgggggcgtcgttgacgccgtcgccggtcatggccaccacctttccccgggcctgccacgccttgacgatacgcatcttgtgttcgggggacacccgggcatagacggagaacttctccacctcctgttccagcacctcctggggcagaaagtccagatcctcccccgtcagggccaggtccccgggacggtaaatgtttagctcccgggcgatggccacagccgtgagcttgtggtcgccggtgatcatgaccggcttgatgcccgcggcgtagcactgctccaccgctgtgcgcacctccggcctgggcgggtcgatcatgccgatgaggcccacaaaggtgagtccctgctccagagcggcgctgttcagctcccggggcagcatggccagatccttgtaggccacccccagcacccgcagggccttccccgccatggcctcgttccggctctccagccgccgggcggcggcggaatccagccggcaccggcgggcgagcacgtcgggggcccccttgacgcacacccgccagccgccgccgggcctctggtggacggtggtcatgagcttgcgctccgagtcaaagggcagctccccccgccggggccactccccctccagtccatttttatccaggccctcccgggccgccgcgtccaccagtgcggtttcggtgggatcgccggtggacaccggctcccgccccttccaggtcagggcggcgtcggagcacagggctccgatggtgagggccagggcccgctcgccgctccggggcgtccacacgtccaccacggtcatgcggttctgggtgagcgtgcctgtcttgtccgagcaaatcaccccggcgcaccccagggtctccacggcgggcaggcgcttgacgatggcccgccgccgggccatgcgggccacccccagggccagcacaatggtgacgatggcgggcagcccctcggggatggcggccaccgccagggagacggcggtgaggaacatgtccagcatgggccgcccctggagcagccccaccccgaacatcaccgcgcacacgcacaggcagacgaaggacagggtcttggagatctccgccatcttcttctggaggggggtctgtccctctccctcccccagcagcagcccggcaatgcggcccacctcggtgtccatgccggtgccggtgaccacgcacaccgcccgcccccgggtgatgacggtggacgcgagcaccatattgtgccgctccgccaggggggtgtcctccggcagggcggacagcagccccttggacacggggacggactcgccggtcatggcgctctcatcggcctggagggaggcggcctccagaatccgggcgtcggcgggcaccaggtcccccgcctccagatggatgatgtcgccgggcaccagccggtcggtctccagccgctgaagcgccccgtcccgcaccaccttggccaggggggccgacatcttccgcagggcctccagggccttctcggcgctgtcctcctgggagatggagatacaggcgttcaccaccacgatgaccaggatgatggccgcatccagccagtcctcgccgccgctggcccacagggacagggccgccgcggccagcagcaccaggatcatggggtccttcatctgccccaggaagcgcagcagcagcccctgccgcctcccctcctccagccggttgggcccccagcgggccagccgccgctccgcctccgccccgctcagcccccgggacttgtccgtttccagctcagacagggtctgtctggtgctgtatgtatgccatacgcccatgtcgctcgctcctcgctcactgtagtttccaatttctggctacagtatagcagagtgcctgtccgatttcaggggaaacgtggcgctaccactccaaaatccgccgggccagccggcggagaaagagctcattgctgggccgttcggccggaaggccgcccatgagggcctgatactccccgcaggccccggcctggagcttgcccaccatggagcggatgtttttctccacgcaggcgtagctggtgttttgggccgccatggcggcggcatacccctccttgagcggaatggccccctccgcgcccgtggagagcacggccgccgtccgcgcggcggcctccacccccagcccggacgcgcccatcccccgcagatagtccgccgccgcccgctcccggggctccaggcagagcgagtgaaacaggtcgggcagggagtcgaagttgaggggctttatgagatagtagctggccccaagctgaaaggccagccggatgactgtgggctccgaggcctgggaggccaccaccacagccgggcgcgcgcttcggcggcgcagggcgcggaggaaatcaagcccgtccatcccgggcagaatcagatccagcagcacgatatcgggcctggtctgctccaccagctccagcccctccaggccgtcctttgccagcgcgcacagacagacccccttccgtccggacagaagggcctccgtcagcatccgggtctccggatcatcctccaccaccaggacccggatctccagcgccacgcctactcctccgggcccagctcttgggcggcccggaacgccagatgcagcatgtgaacggccatatcccgctgcaccggagagagctggcgcaggtggcagagcaggtgctccagcacgggctcctccttctgtgcgccgtgggcgagctcatccagccctgtgtggaacacctcgcccagctccacaaaaatcgccatggacatacactttttcccctgttcaatatcatttacatattgggaggagatgcccaggcgctcggccagctcctccttgctcatccgcgccagcttccggctgtggtacacccgctcgcccacggccttttgcagcgccagctttttctccttgtcctccattgtgtctcaccctttgttccaaactttagatatagattgacacaactttggatttttactataaacaatagaatttttattataaactatagttttttaatgaaaaaccccgccggatcggcggggtttttgcctgtgcttattgcgctccgctcccggtggcatccggtgcgggctctgtgctctgtgccggggtcccggtctcaggcgcgggactggcggtcgcctgagcggcctcctcggcggccttctcctcctgccactgctcggcaaaggccaccatattcttgtagaaggaattgggatccagcttctcataggcgggcttgacctctaccttcgcctcctccacccactgctcgttcagcttgctcatggcgtaatcggggtagatggccgccatgctgtcccggagctgctggcgctcctcgtcggtaaagtcctggcgcagaatgatgtggtagccgtagtcggtctccaccggctcgctgatctcacccacggccagggccttggcggcactctcaaactggggcaccatctggccggcataggccaggtaaccgtcgggcgcatagagctggttgttctcgtcccggccgtcctcactgcgctcgttcatcaccttgtcaaactccgccaaggggtctgcggcggtccgaatctgggccaggagctggtcggcctccgccttgacggcggccttctgctcgtcggtggcggcgctgccgtcctcgttctccgggaaggccagcaggatg

SEQ ID NO: 4311 - DNA, 798 bp, Unknown
  gut microbiota DNA sequence
tccagatcggcgtcctgggcggtcagctcccccgcctcctccatctgggtctggaggctccgggccagatagggcacctggttcagcttgcggaaagccgcctcgctgatgcactgctggtccaagtactcctgaagggtcatcccgtaatagctgtccacccgctgggtcagcgtctccagctcagcgtccgcctcggcctgctcctcctcggtcacggtcagtcccgccgccgccgcgtggttggacaccgtggtgtagagcacgctggtgttccgcgcgtcctccttcagatactccgccgtggggacgccgttgagctcctcctcccaagcgtcgtcgtccgccaggtaaccgctctgcttggccgaggccacgctctggagcagccagaacaggtactcgtcggcggtaacctctgtgccatccaccgtaaagagcaccgtgtccctggtcacaccggcggtctgataggccacgtcggacgggtccacctccggcgcgccgggcgcgcaggctgtcagtccggccacgagcagcgccccggtcatgccggcgcacagaaactgtttcacgttcatgcgtgtttgtcctccttatttgggttccaaaagcctgttccagtgtacaccatttccccagcggatacaaccggaagttttgcgcgccgccctacggttccgctttgggggcgttttcggcgtagtcctccaccagcctgcggccaaatttcagggcgtcctcagccccagcccgccaggagcgggccgggggccccatttcatttcatttcgctgg

SEQ ID NO: 4312 - DNA, 26188 bp, Unknown
  gut microbiota DNA sequence
cagagcacttgcaactctagggcttctctatggtggacgatacaggacttgaacctgtgacctcccgcacgtcaagcggatgctctaccagctgagctaatcgtccagacagcgtagattattatatccgtacaagctctatttgtcaatactttttttgattttccccttttcaaaggggaacccggctggtatactcggatcaaagtggattggaaaggggtggcgggcatgctctgccgacgggtctctctggaggagctccatccggcgctggacgggggcgccccggagacggggctggacatatactgccggggccgcaccggcctgctggccgacgacggggcgcggtgggcggtgctgatcctccccggcgggggatacgagcgcattgccccggcggagggagagccggtggccctggcctttctggccgcgggggtacaggcctttgtgctgtcctacagtgtgctgcccgccctctggcccaggcaattcctggagggggcggccgctctggcctggatgcgggccaacgccccggagctgggcttccggcccgaccgggtggcagtgtgcggcttttccgccgggggacatctggcgggctgcctggccggcgggtacgccgagcccctcctgaacgagcggctggggctgacgccggagcaggtgcggccggacgcggccatactgggctatccggtggtgcacgaggcccgctatctggaccccctgggcggggcggaggtgctgcggccggaccgccgggtgggcccgggccacccgcccgcctttctctgggccacggtgggggacgccacggtgccggtggaaaataccctggactatgcccgcgccctgcgggcgcggcaggtgccttttgagctgcacctgtttcaggacgggccccatgccatggggctggccgaccgggagagtgcccgggacgaggcccactataacgcccatgcagcggcctggcatccgctgtgcatagactggctgaaaggaagaggatgatggagcagaaggtggtcctgatcaccggcggaagccggggcatcggcgcggcaaccgcccggcgctttgccgccgggggctgtaaggtggttatcaactaccaccgttcccaggcccaggccgaggccctggcggcggagattgggggctgggcggtgcaggcagacgtggccgatccggtccaggtgggaagaatggttgacaatgtgttggataaatattgtcaacttgacattctgatatgcaatgccggcattgcacagcagaaattgtttggcgatttgaccgatgacgactggcggcggatgtttgccgtcaacgtggacggcgtgtttcacgccgtccgggccgccctgccccacttcatccaccgcaaggcggggcggatcgtcaccgtgtcctccatgtgggggcaggtgggcggctcctgcgaggtggcctattccgccgcaaaggccgcagtgatcggcctcacaagggctttggccaaggagctgggcccctcgggcatcacggtgaactgcgtgtctcccggggttatttccacggaaatgaacgcccatctggaccaggaagccctggccgccctggcggaggagactcccctgggggccatcggcaccccggaggacgtggcggaggccatctggtatctctcctccgacgccgcccggtttgttaccggccaagtgctggcccccaacggcgggctggtaatttaagtgtccgtttcacaatttgttcatattttacacaagggcggtctctcacaggccgcccttgtgtattttgctagttgacaatttcaagcgcacagaatataattgtcaacaacttcaaaggaggataccactatgaaaaagactcgcttcctgtctcttgcactgacgggtactctctgcgtgtccctgctggccggctgcggcggcagcggtgacggcggcggggcagcccagacccccgacgcagccaacaccagcgccgtccaggagaacaccggctccgccttcaagctgggcggcaccggccctctgaccggcgacgccgccatctatggcctggctgcccagcgcggcgcccagatcgccgtggatgaaatcaaagaggccggcggcgacattcagttcgcgctgaagtacgaggacgatgtgaacgtccccgagactgcggtcaacgcttacaacgccctgaaggagtggggcatgcagatctccctgggctccgtcacctcccagcccggcgtcagcacctccgccctggcctttgaggaccgcatctttaccatgaccccctccggcagctcccccgatgtcatcagcggcaaggacaacgtctaccagatgtgcttctccgaccccaaccagggcctagcctccgcccagtatatcaccgagcagggcctgggtgagaaggtctttatcatctggaaaaatgacgatgtgtattccaccggcattaaggaacagtttgtgaaggaggccgagaccctgggcctggaggtggtgggcgacgccacctttaccaccgacaccgccaccgacttctccgttcagctcacccaggcccagcaggccggggccgacctggtgttcctgcccatctactatcagcccgcctccctgattctgagccaggccgacgccatgggctacacccccaccttcttcggcgtggacggcatggacggcatcctgaccatggacggctttgacgcctccctagccgagggtgtcatgctgctgacccccttcaacgccgacgccaccgacgaggccaccgtcaacttcgtgaccaagtaccaggagctctacggcgaaacccccaaccagtttgccgccgacgcctatgactgcgtctacgcctacaagatggccctggaggccgccggctgcacccccgacatgagcaatgaggagctctgcgacgccctgattgccaccttccccaccattaccctgaccggcctgactggcgacggcgccggcatcacctgggatgcctccggcgaggtatccaagagccccaagggcatggttatcgagaacggcgcttacgtgggcatggactgatcgccagtcccagcgtccacaaaacacggttccgggagggctgccggcacggccggcggccctcccgccaactgcttacacagaacaaatggatgattgcggccgggcaacggcccgccattgcccggccgcaatcatccatgacagagaggtgtgtgttatggtcttcctcaactacctgatcaacgggatcagcttgggcagcatctacgccatcatcgccctggggtacaccatggtctacggcatcgccaagatgctcaacttcgcccacggcgatgtcatcatggtgggcgcgtacatctgctttttcagcatgaacgggctgtcctccctcttcgccccgggcagcctggccgcgctggtggttcccgccctggctggcacggtgctggccatggtggtgtgcaccgtgctgggcatcaccatcgagcggctggcctacaagcccctgcggcaggccacctccctggcggtgctcatcaccgccatcggcgtgagctacttcctccagaacgcggcccagctcctgtggagctccagccccaaggtgttcacccccgtggtgagccagtctgccaaggtgaccctgtttgacggccagctctccatctcctggctgaccatcgtgaccgtcctggtgtgcgtggccatcatgctggccctcaccgcctttaccggccgcaccaagatgggcaaggccatgcgggcctgctcggaggacaaggcggcggcccagctcatgggcatcgacgtcaaccgcaccatctccatgacctttgccatcggctccgccctggcggccatcgcgggcgtcctgttcctgtccacctacaccagcctgacccccaccaccggctccatgcccggcatcaaggcctttaccgccgccgtgttcggcggcatcggctccatccccggcgccctgctgggcggcctgctgctgggcgtcatcgagacctttgcccgggcctacatctccaccgagctgtccaccgccatcgtgttcggtgtgctgatcatcgtcctgctggtgaagcccgccggcctgctgggcaagaccgtccgtgagaaagtgtgaggtggacgcgatgagacaacttggacagatgaaaaaatccaccaaaaacagcctgtttacctacacgctggtcattgcggcctttgtggtggtgcaggccctgcggatgggccccggcgtgggcgccatgctggaggggcagctcatccccatctgcgcctacatcgtcatggcgctggccctgaacctggtggtgggcgtctccggcgagctgagcctgggccacgccggcttcatgagcattggagcctttgccggctctgccctggccctggctctccagagcaccgtcaccctttcccccctgcgcctggccctggccatggtattcggcgcggtcatcgccgccgcgctgggctttctcatcggcatccccgtgctgcgcctcaatggcgactacctggccatcgtcaccctggcctttggcgagatcatcaagagcatcatcaccaatgtctacctgggggtggatgaaaacggcctccagttcagcttcctctccaacaaaaacgagctggccgacggcggggtggagctcatccgcggccccatgggcgtgatgaacacccagcgcatctccacctttattgccggctttgtactggtgctggtggccctggtggtcatcttcaacctggtcaacagccgcaccggccgggccgtcatggccgcccgggacaaccgcatcgccgccgagagcgtgggcatcagcgtcaccaagtacaagatgatcgcctttgtggtctccgccgctctggcgggtgcggcgggcaccctgtacgggtgcagccagaccaccttcgccgccaccaagtttgacttcaatacctccattctgattctggtgttcgtggtgctgggcggcctgggcaacatgtggggctccgtcattgccgccgcagccctcaccatcctgcccgaggccctgcggcagttctccaactaccgcatgctggtgtacgccattgtgctgatcctggtcatgctggccaccaacaatcccaccctgaagggcttcttctcccggctgttccaccgggagcgggcggacgcgccccatgcggcggcggtgaaaggaggcggcaagcagtgagcagcataaagcgacccgagaccaagctggtcccagtgcccagcgtcaacaggattccagagcgggacgtggacaagagccccatcctggaggcccagcacctgggcatcgacttcggcggcctcaccgccgtcaacgagttcaacatggccatcggccgcactgagatcgccggcctgatcggccccaacggcgcgggcaagaccacggtgttcaacctgctgaccaaggtgtaccagcccacccggggcaccgtcctgctggacggggtggacacccacaacatgaacacggtgcaggtcaacaaggcgggcattgcccgcaccttccagaacatccgcctgtttaacaacctgagcgtggaggacaatgtcaaaatcggcatgcacaattccatccactgcggcctgttcagcggcattctccgcctgccccggtactggaaggaggagaagaccgcccatgaacgggcgctggagctgctctccatttttgacatgcaggatttggcgggcgtcaaggcgggctctctgccctacggcgcacagcgccggctggagatcgtccgcgccctgggtaccaacccgtccctgctgctgctggacgagccggcggcgggcatgaacccctcggagacggcggagctgatggagaacatcgtcaaaatccgcgacaccttccagattgccattctcctcatcgagcacgacatgaacctggttatgggtatctgcgagggcatctgtgtgctcaacttcggccagatcatcgccaagggcacccccacggaaattcagaacaacccggaggtcatcaaggcctacctgggcggcggaaaggagggctgagagatggctgtgatgctggatgtcaagaacatcaacgtctattacggcgccattcacgccgtcaaggacatctcctttcaggtcaacgagggggagattgtcaccctcatcggcgccaacggtgcgggcaagaccaccacactgcaaaccgtgtccggtctgctccacacccgcaccggctccattgagttcctggggcagcccatccagaacgtccccgcctccaagctggtgggccgcggattggcccaggtgccggagggccgtcgggtctttcagcagatgacagtggaggagaacctggagatgggcggcttcacccagcccgcctccaccatcgcccccggcctggagcgggtgtacgaacagttcccccggctgaaggagcgccgccgtcaggtggcgggcaccctgtccggcggcgagcagcagatgctggccatggggcgggccctcatgtccaaccccaagctgctcatgctggacgagccctccatgggcctggcccccctgctggtggagcagatcttcgatatcatcaaggagctccaccgggcgggcaccacgattctcctggtggagcagaacgcccagatggccctgagcgtggccgaccggggctacgtgctggagaccgggcgggtcaccctcaccggccccggccaggagctgctggccgacgaggcagtcaaaaaggcatacctgggcggttaaacggcagcccggcggagcgcgctccgccgggctgttttccatttcctccccttgactggcgtgctataatatggtcagcaaggcaatatcgccgcgttgtgcaaggaggcgctgatccatatcatgcccaattactacgcgcacctgacgtttggccaacgggtgctggcggacctgcccgccggcctgtccgaactcattgagcaggagcgggaggcctttgacctgggctgtctgggccccgacccgctgttcttctaccagcccatccgccccaacgccgtccggcgggaggggatcaagatgcaccgccgctccgccctgcccgcggtggagcgtctgcgccaggctatcgaggacggcgtacccatgtccaccggctacggagctggcttcctctgccatttggccctggacagcgcctgccacggctacgtggacgaccgggccgccgacggccccatctcccacatggccattgagggggagtatgaccggatgctgatggagcgggacggcctcaatgccgccgagcagtccccactgcccagcgccccggccaaccgtgccgtctgggaggcggcgtcccaggcctttgtccacgcctcccccgaccagatgcggcgggcctaccgctccatggccttcttctccggcttcctggcccgctccaacggccgcatgaccggcaaggtcatcggtgcagtgagccacatgctccccattccctccgccaagggcatcgccctgaaggagacgccccacccctcggctcaggagagcaacgccgatctcaaccgtctgctggaggcggccatccctgagacagcggagcagatcaccgcctttttccaggccatttcggcggaaactcccgtgccccgctggttcgaccgggacttcaagggcaatccgccccccatcccccagcgcatccgctggcaggacatcccagagcactccgttacatgacaagcgccgcccccgcattgtgggggcggcgctttctcattgggcctccaacaggaaggtcaccgggcgcagcccgtcggtacagcacaccacattgaccccctcccgccgctgccagggggtataggaggcaccgcaggacagggcggacaccgagcggtagagatcgatccacgcccaggggcagaagccggctggcatttccgcgcccccggtatagaggaactggtccccctcccggaagaagtcgcagacgcactcctccggaggctcggtgaggtgctcccggatcagatcggggtaaaatcccttgcgcagcacagtgattttcacgttcttcatggtgcaagctcctttcgctcctccggttcgttttgaaactctgtcatggtgccccagaaccgcttgggcatctgggtcatgcggcaccgggggttctcccgcccctcgatggcgatggtgtcgtagaaccgccgccacaggcggcggaagtcccgctcctcccggccgggggcggcggcgcggaacgcctccaggggcacgatggtccaccgccggggccggtaaaacagcgcctcccggtgggtgcggtcgtagaggacgaaggactcctccggatagcgggcgcagaagtggggccggaggagggggagcacccggtttttgggggcgatctcccccaccagcaccccctcctgctcggagaagcgggtgaagcccttgagcagatgggcctccccggtcaggtggcccaccgcgcgggtcagcaccgccacccggtcgtcggtgagatcccgcaccacccccggcccccggtcgtaccccaggcggagaaaccgccacaggtggagctcccgctcctccaggcaggtgagaaagccgtacaccgccagccgccgcccctcctgccccagcctgggggccagggagcggtacacccgctgggcgcgggcctcgtcggtgtccaccgtccgctccggccagagggaaatccgcccgtcctccggggtggaaaagctcatgggctcctcccggtgggcgtagctggcaaatacacaggtcaaaaagccggcaaagctgccgtcataggcataggaaaccagtgtccagtccatggccgcctcctaacccgtctgctcgaagagggagagctgctccggcgcgccctgggccagcatgggccgctcctgggccaccaggtggcggagcaccccgtcgggggagacccgcaggccctccaggtacttgccgccgcaggtgaggaaatactgggcccgcttgagcaccacccccagctttttcagccccgcaaaggtgaggggcgcgcaccggcgggcaaccaggatgcgccgggcggaggtcaccccgatacccggcacccgcagcagggcctcgtagtccgcccggttgacctccaccgggaagaactccgggtggttcagcgcccaggagcacttggggtctaccaggggattgaagttgggattggcttcgtccagcagctcctcggcccggaagtggtagaaccgcagcagccagtccgcctggtagagccggtgctcccgcagcaggggcggcttgaagtcccgccgggcggggagaagggcgctgtccgacaccggcatgtaggcggagtagaacacccgcttgagcttgtacttgtcgtagagggcctgggtgagggtgaggatgtgcctgtcgctctccggcgtggctccgatgatcatctgggtggactgccccgccggggcgaagcggggggcgtggcggaaccgggccagctccccccggctggcctgaatgccatcccggatctgggccatgggggccaggatggcggccttggccttgtcgggcgccaggcggcccaggctctcctcgctgggcagctcgatgttgacggacaggcggtcggccagcaggcccagctgccgggtgaggagggggtcggcccccgggatggccttggcgtggatatagccgcggaagccgtactcctcccgcagcaggcgcagggcctcaatcatggcctcggtggtgcggtcggggccgccccacacggcggaggagaggaagagtccctcgatgtagttgcgccggtaaaagccgatggtgagctccgccagctcccgtggggtgaaggcggcccggcgcacatcgctggagcggcggttgacgcagtaggcgcagtcgtagacgcaccggttggtaagcagcaccttgagcagggagatgcaccggccgtcggcggagaaggagtggcagcacccggcggccagggtgctccccaggccgccgggccggcccgcccgatccagcccgctggaggtgcacgccgcgtcgtacttggccgcgtcggccagaatggtcagcttgtccagcagctccacactgccgccccctcttctttttctttagctttattatatatcgaacatttgtttcagtcaagagggggataatggaaacccaccccggagccgaggcccggggtgggttgcttggtcactctcccatgtaggagaagtgcatatagtcgtggtagccctcggaatcgtcgctgctgtaagcccaggcgtcgccgccccagctccagccgtgctcggcaaagatgcgcaccacggaggagtcgggggagatggaataggcattgctccccggctcccagcagctgccggccagcacctggccgtcgcggatctggtagttctcgttggcgttgatgtcgatggcggtgccgcagttgtgctcgccggtggcggagtcgccccgccaggcgtagccgcccacatcgtggatggggaagtgctcaggatcgttgtagatctcggcgaagatctccttcacgtcctccgccagggcggcgtggacggagagggtgagggtggaggacaccttctccccgccggagagctgccataccggcacggtgacggtggtcatagcggcggcggcctcctcctggctggcaaagcggctcttgctctcgtcgccgaagaggaggatgtgcttgcgggcgttgtccccctggaagttgagccagaagtcctgcttatagtagtcctcataggcggcctcgccccgctccaccttctcccagaactgctcctcctgaatctcggccccggtcatgggccggaaatacagggtatagctgtcgcaggcagtgctggtatacgatgccgtctcccggtcgtagtcgtagacgtagtagcccacgtccagcccgttcgccaggctggacaggtaggtactcacctccgtctccacctgctggtcgggcaggagggcctcgccggtgtcggcgttcagaatgtgaagggtgacggtctggctctcgccgcggcagctattgtccacctgctccagtacccgcatcagcagcaccgcgccgtcgcagcgctgaaggggatcggcataaccgaaggagccgtcggccttgccctggatgacgcagcggcgggccagctcggccaccgcctcctggcggaggctgtccatcctcccccagtccgacagggctgtgggatcaatcggctgatcccagaacgagggggtatattcctccggcagggcgttgcagagcaccacggccgcgtcctggcgggtgaccgccccggtcagcgcggcctcgtccaggccctccagcaggtcggcgctccgggcggcatccagccccgcctgatcccaggccgcgccggaagcggcgctgcgggcatattcctccggggcaaaggcccgggcggccatggccaggaactggggccaggtcaggggtgcggaggggctcatggtgttggctccggtgccctggaggatgccgtagcccgcggcctccgtcatggcgatataggcccagtggctggagggcaggtcggagaaggatgcggcctctgcccctgcgggggcggccatgggcagggccagcaggcccgtcaggaccagtgtgcagactctctttaccgtgtgcatgctctatctctcctttacaagcaacggattccgcggcccggccgcagcacctgttttcctccctaccggacccggtagatgtagtgctccttgcggggggcaggtgcaggggccgtgtccgcccggtagcccaggatacagtggccgatgccctcgtagtcgccctccacgccccactggcggagcagggccttaccctcctcggagtcaaacacctctttggcccggtgaacccagcaagaggccagccccaccgccttagctgcgttcatcaggttgctcatgacgcagctgccgtcatatacccggttggtgttatccctggccgccagcaccaccagcacggtgggcgcaccgtagaaggggtcggcctccggggtgcccagcactgcggcattcatcttccgcagctgctccaccacagcgggattctgcactgccacgatgatcggggactgctggccccgggccgtgggagcataggtgcccgcctccaatactgcgttcaactcctcgtcggtgatctgctccggccggtagctgcggcagctccggcgctccttcaaaaccttcaacacttcgttcattgccaaattacctgcctttcttatgagagatcggttgtattttaccggaaaatacgataagatacaatcctcagattctcttcccaccagtgttgatgaaaagaaaggcggatgcttgtgcctctgtttcccctcctatggctctttttctgttattccttcctcggctgggtgctggagacggcggtttccgccgtccgccttcaccgctatgtggaccgcagcgtgctgttcggcccgctgtgcgcctgctacggcatcactgccgttctgcttaccgtgggtctgcccgagctgcggggcaactacttcttcctcttcctgggcagcgccatctgctccacggtggtggaatggatcgccggtcacctgctggagaaggccacccacacccgctggtgggactactccaaccggcgcggcaacctggacggttacatctgtgtcggctccttcctcctgtggggcgtgctgggcctggcggccgtacagtggatcaatcctctgctcctggccctctaccgctggctgcccccgctggtgggggaaatcctgctgtgggtgctgctggccctgctggcggcggacatcgcgggcaccgtgctgaccctctgcggcgtccgcagcagcctgcccccgctggagaacctaaacagccgtctggccgccctctccgtccggcttggggagtggattctccgccgcgccgaggggcgcattcagaaggcccaccccggcgcggtcttttcccgccggcgggaaaagaccaccgtcagcccctttgcccggggggccagcttttacagcattctgctcctgttctttattggcggagtggccggtgatctggccgaaaccatcttctgccgcctcaaaatgggctggtggatgagccgcagcagtgtggtatggggccccttcagcattgtgtggggcctggccctggcagccgccaccctgttcctctacaaataccgggaccgctcggcctcctttttctttgtggcgggcaccctgctgggcggcctgtatgagtacctgtgcagcgtctttaccgagctggtgttcggcaccgtgttctgggactacagcgctattcccttcaacctgggcgggcgcatcaacctgctgtactgcttcttctggggcttcgccgcggtggcctggttccgggggctctaccccatcctggcccgctggatcgccaagattccaccgcgccccgggaaagcggtggtctggctgctcatcgccttcatgtccgtcaatatggcggtcagcggcctggccctggcacgctacagcgcccgggccgccggagagcccgccgacgcggcctgggagcagtacatggatgcccactacggtgacgacgtgatggagcgcatctacccctatgcgaagatgactggctgagtccaagccgtcaagcaccctccgggtcatgagacctggagggtgcctttacatggggcggagagagccgcgtgggagggcgtcggctctgccccgccggggcccccatctttattttatctgtccggcggaactgaattccgccggcatcaaggttttgggcccacggcccaaaacgcttggacggcgcaaagcgccgccccaccgtcggcggggcccccgaagaggccgccatataaaacgggccccggacgttttcgtccggggcccttgtgcgagcttgtttacttgtagagctccaccagtctggtgagatgctcatagcgctccttggcggcctcttcgttctgggcaaacagctccttggcgcgctcggggaaggcgcgggtcagggaggagtagcgggcctcgttcatcaggaactcctgatagccgccggcgggggccttggagtccagggtgaacgggttcttgccctcggccttcagagcggggttgaaccggaacaggttccagtagccgcactccacggccttcttcatctcaacctggcagttggccataccgcccttgatggagtgcatctcacagggggcgtagccgatgaccagggaggggccgtggtaggcctcagcctcggtgatggccttcagagtctggttggggttggcgcccatggccacctgggccacgtagacgtagccgtactgcatggcgatctccgcaaggctcttcttgggctggttcttgccggcggcggcaaactgggccacctggccgatattggaggacttggaggcctgtccgccggtgttggaatagacctcggtatcgaagacgaagatgttgacgtcctcgccggaggcgatgacgtgatccaggccgccgtagccgatgtcgtaagcccagccgtcgccgccgaagatccacacggacttcttaaccagatactccttctcctggagaatctcagcggccagcttgcaggcgtcacactggcagagcttctcacccttggcctgcagctctttgccaaacgcctggatctcgggcttggagctggccagcagctcgtccaccgtgcacaggccgtcctccagagcggcgatgtaggccttggtggcctcggcgttggccgcgccgtcctccatggtatccagccacttctgggcagtctccttaatggctggagtgcaccactccacggccagcagggcgcgggtcttgtcggccaggcggctgcggatggccttctggcccaggtgcaggccaaggccgtgctcggcgttatcctcgaacagggagttggcccaggcgggacccttgccctccttgttgacggtgtagggagaggtggcagccgggccgccccagatggaggaacagccggtggcgttggaaatatacatacggtcgccgcagacctgggtgaccaggcgggcataggcggtctcggcgcagccggcgcaggagccggagaactccagcaggggctgcttgaactggctgcccttgacggtattggtgtcctccacgtcggccttgggggccaccttggccaccatgtagtcaaagacctcctgctcggcagcctgggactcctggggcttcatggtcagggccttgacggggcaggtgctcacacacacggagcagcccatgcagtccagcggggaaatggcaatggcaaacttgtatacacccttgcccttgccggccttgatgtccacgatcttggcctgagcgggggcgttcttggcctcctcctcagtgagggcatagggccggatggtggcgtgggggcagacataggagcactggttgcactggatgcacttggtctgatcccactcgggcacgctgacggccacgccgcgcttctcataggcggaagcgccctggcagaaggtaccgtcctcgtggccgttggcaaaggcggagacgggcaggctgtcgccgtccatgcggcccacgggctccatgatctccttgaccatcttcacggtggcggcgttgccctccacgtgctcggccacggtctcgtccttggcgtccttccaggaggcgggcacctcaaacttgtggaacgcggtggcgcccatgtcgatggccttgtggttcatatccaccacgtcctggcccttcttcaggtaggagtgggtggcggcgtccttcatgtagccgatggcctccgcctcgggcatgaccttggccagcttgaagaaggcggactggaggatggtgttggtgcgcttgcccatgccgatctcgatggccaggtcgatggcgttgatggtgtagacctggatgttgtgctcggcgatgtagcgcttggccacggcgggcatgtggtgatccaactcctcgtcagaccactggcagttgatgaggaacacgccgccgtccttcacgtcgcggaccatggggaagcccttgacgatgtaggcgggcacgtggcaggcgacaaagtcggccttgttgatgtagtagggggcgcggatgggctggtcgccgaagcgcaggtggctgatggtcacgccgccggtcttcttggagtcatactggaagtaggcctgcacgtacttgtcggtgtggtcgccgatgatcttgatggagttcttgttggcgcccacggtgccgtcgccgcccaggccccagaacttgcactcgatggtgccgggggccgcggtgttgggggagggcttctcctccagggaggtgtgggtcacgtcgtccacgatgcccacggtgaactggcgcttgggggcggacttggtcagctcctcatacacggcgaacacgttgctgggcggggtgtccttggagcccaagccgtagcggccgccgatgatggtggcctgccggccggcgttggcgaaggcggtgaccacgtccaggtacagggggtcacccagggcgccgggctccttggtgcggtcgagcacggcgatcttggtggcggtggcggggatggccgccagcagcttgtcggcgcggaagggccggtacagacggaccttcaccaggcccaccttctcgccgtgggcgttcaggtagtcgatgacctcctcggccacgtcgcagatggagcccatggcgatgatgacccggtcggcgtcgggtgcgccataatagttgaagagctggtagttggtgcccagcttggcgttgaccttgcccatgtactcctccacgatctcggggagggcgtcatagtacttgttggcggcctcgcggtgctggaagaagatgtcgccattctcgtgggagccgcgcatcacggggcgctcggggttgagggcgcgcttgcggaaggcctccacggcgtccatgtccaccatgtcggccagatcctcgttgtcccagatggcgatcttctggatctcgtgggaggtgcggaagccgtcaaagaagttgataaaggggacgcggcccttgatggctgccaggtgggccacggcgcccaggtccatgacctcctgggggttggactcgcacagcatggcaaagccggtctggcggcaggccatgacatcggaatggtcgccgaagatgttcagcgcgtgggtggccacggtacgggcggacacgtgaaacacggtgggcatcagctcaccggccagcttgtacatgttgggaatcatcagcagcaggccctgggaggcggtgtaggtggtggtcagcgcgcccgcggccagagagccgtggaccgtaccggcggcgccggcctcggactgcatctcgatgacattgacggtggtgccgaagatgtttttgcggccctgggcggcccactggtccacattgtcggccatggggctggacggggtgatggggtagatgcccgccacctcggtgaaggcgtaggacacgtgcgctgccgccgtgttgccgtccatggttttcagctttctcgccatagaaacgattcctccttgttcatggttccagggcaatgggaatccgtccccgtccatcccccggactgaccgggcccgattcccattaccctggctgattacagctgcctccgggcggagcctgtccccccggggcgcatacattttatcaccttcattgacgtttgtaaatcaaatcttactctgaattattatttttctttttgttcctgaattagaagaaataattggattttttcccttctcctttgagaaaaattatttagttatatataactaactaaactgagcatgctaaaatatgcagttttaaaagcagtcctttgccgtatcatgttctcccctttccctccgccggtacagggccgcttttcaccctttcggcggcgggtccggtatgctataatggatgcaacatgacgaaagggaaaggaggcggcacccatgctctgtgaagtgcgctccctggggctgagcgggatctccggctatgaggtgcgggcagagtgcgacctgtcggccggtctgcccgcctttgagatcgtgggcctgcctgacgcggcggtgaaggaggcccgggaccgggtgcgcgccgccattaaaaactgcggcttcaccttcccggtgtcccgcatcacggtcaacctggctcccgccaaccagcgcaaggggggcacggtgtacgatctgcccattctggcgggtattctggccgccgggggacagctcaggctggacgggccggacagcgcctacgtgggggagctgtctttgtccggctccctgcggccggtggtgggcatgctgcccatggccctggccgcccggagggcgggcatcaagcggctgtacgtccccgccccctccgccgccgaggccactctggccggcgggctggaggtctacccggtggagagcgtggggcagttggcggcccatctgaggggggaggcccctctggagccggcggcggcctggacgccggggccggaggactttgcctgccccgactttgccgacgtgaaggggcaggaaaacgtgaagcgcgccctggagatcgccgccgccggcggccacaacctctgcatggtgggcccgcccggatcgggcaagtccatgctggcccgccgcctgccctccatcctccctgatctgacccggcgggaggccctggaggccacggagatccactccgtcctgggcctcaccacctctgagcaccccctgctggtgcggcggcccttccgctccccccaccacacggtgtccgccatgggcatggccggaggcggctccagtccccggccgggagagatctccctggcccacaacggggtgctctttctggacgagctgcccgagttctccaaggaggccctggagaccctgcgccagcctctggaggacgggcgggtgcagatcagccgggtgtcgggcacggcggtgttccccgcccgcttcatgctggtgtgcgccatgaatccctgcaagtgcggctggtacggctattcggaccgctgccgctgctcgccccaggcggtggagaagtacctcagccgcctgtccgggcccctgctggaccgcatcgacctgttcgtggaggtgccgccactggactttgacgcgctctcccgccggaccccggcggagccctccgccgccatcaaggcccgggtggacggggcccgggcggtgcaggccgcccgcttcggccccggcggcccggcctgcaacgaccagatgggcccggcggagctctcccgcttctgcgccctggacgacgcctgccgcgccgtgatgaagggggccttcgaccggatgggcctcaccgcccgcagctacgaccgcatcctccgtgtggcccgcaccatcgccgatctggacggggcgggggccgtcgccgtggagcacctggccgaagccctccagtaccgcccgccggagtacctgcggcggtaggcccccggacgcgggtggagacaggcccgcccctctggacaacaaaaagcaaattggatataatagtgaaactttgggaaaggaatccagactacatgaacgagattattctgttaaaactaggggagctggtgcttaaggggctcaaccggcgtacctttgaggaccgtctcgtggctaacgcccgccgccgcctccaggcccacggcaaattcaaggtatacaccaagcagtctaccatgtatgtggagccgcagagcgaggactgcgatctggacggcgcgtgggaggccatgaccaagctcttcggcgtggttggcctgtcccgggcccgggcctgcgcgaaggacaaggacgccatgctccagaccgccgtggagtacctgggggaccggctggcggccgccaagaccttcaaggtggagtccaagcgggcggacaagagcttccccatgacctccatccagctctcccagtacgtgggcggcgagctggacgagaagtaccccaacctgaccgtggacgtgcaccacccggagctgaccgtctacctggaggtgcgggactacgccgcctacgtccacgccgacccggagccgggagccggcggcctgcccgtgggcgtgggaggcagggcggtgagcctgctttccggcggcatcgactcccccgtggcctcctggatgatcgccaagcggggcattgccctggaaatggtgcacttcttctcctacccctacacctccgaggaggccaagcagaaggtgctcaccctggccaagctgctcaccccctggtgcggacggctcaccgtccacgtggtgcccttcaccgccatccaggaggagctgcgccgcaagtgcccggaggagctgttcaccgtgctcatgcggcggttcatgatgcgcatcgccgaggcggtggcccagcggtgcggcgccggggccatcgtcaccggcgagtgcctgggccaggtggccagccagaccatggaggccatgcgggccaccactgccgtcaccaccctgcccatcctgcggccggtggtgggcatggacaaggaggagattgtccgcatcgcccggaagatcaacacctttgagacctccatcctgccctatgaggactgctgcaccgtcttcactccccgccatccccggctgcgccccgtgctgggggagctggaggccgccgaggccgcgctggacgtggagggcctggtaaaggccgccgtggacggcatcgagcgggttcaggtctgaccacggcggcgggaaacggcgggcggccataaaggccgcccctacgggttgtccccctacggaggagaactcccaattactacatcctcgggcggagtgaatccgccctgtggaaatgctgcgctgcgcatttgcggcggcacccgccgccgatgccggtgttggcgacaggaggtcttttttatgtctcacactgcggagctgatcgcggtcggtacggagctgctgctgggcaacatcgccaacaccgacgcccagatgctctcccagggcctgtcggccctgggcatcaacgtctactaccacacggtggtgggcgacaacccccagcggctgcgggccgcggtggagctggccaaaagccgggcggacattctcattaccaccggcggcctgggccccacctgcgacgatctgaccaaaaacgtgctggccgagtgcttcggcaaaaagctggtgttccacgcgccctccgcccgccgcatcgaggcctactttgagcggctccacgccggccgccccatgacggagaacaactaccagcaggccatgctgcccgaggggtgcacggtgctggacaacgactggggcaccgcccccggcgtggccttcgaggcggacggggtgcgggtcatcatgctccccggcccgccccgggagtgcagggccatgttcacccaccgggtgatcccctacctgaagagcctggccgacggggtcattgtctcccggacgctcaagctcttcggcatcggggagtcctccatggaggcccagctccgggaggagatggaggccatgaccaaccccaccctggccccctatgccaaggagggggagtgtgagctgcgcatcaccgccaaagcggcggacgaggagtctgcccgggccctgatcgccccggtggaggagcgcctgcgggcccggttcggccccctcatctacggcgccgacgtaccctccctggaggcggcggtgttccagcttctgaaggaaaagggcctcaccctgggctgcgccgagagctgcaccggcgggctgatcgccaagcgcatgaccgatttgtccggggtatccgccgtgttccgcggcggcgtggtgagctacgccaccgaggtgaagcacaccgtcctgggggtggagcaggcgctgctggacgagttcggggcggtgagcgagccggtggcccgcgccatggccgagggagcccggcgggtactggggtgcgatctggcggtggcctccaccggcgtggccgggcccgatcccgacgagcggggcaacccggtgggactggtctacctggccctggccgcgccggacggcacctgggtgcggaaaatccagcagggtctgggccgggagcgggtacgccacgtgtccgcctcccacgcctttgacctgacccggcggtatctctccggcctggaggtaaaataaaaacagcgggtattctgccagagacagaatacccgctgtttttgtataggggcggacaattgccatccataggggccgggcggccacaagggccgcccctacgccggtgctgaaacggcccgcctctagcccttcagggtgacagccacagcgtaagcccgatcgtactggttgagattggccaagtcggagaacccgccgggcagtgggggaattcccacgccctccccgtcatcatagatctccagatagagcggtgtgcgctcccctatggtcatggcctgatcttcctccagccagaccgaggcccggcctgtctccaggccgcggtccatcccgtccagccggggggcgtagctgtattgggtgccaccgtcctggacatttacggtgatcttatccccgctgaggacgacccccagccgccgcgtcccggcggcgctgatggacacgcccccctccgccacggtctgccaggccccgtcctcccaggacagtacctccacggtgcagtcgctcacaccctcgccggccgcgcactcaaacaggccatactccgcgtcggagccccccaccagcttcagcagggccgcctcctcctcggtgagctccagggggcggatggtgttgtcccccagctcctcccccttgtctccgccccgggcgccgcagcccgtcaggagcagggcgcacgccagggccaaaccaagcagctttttcatgtccatcgtcctctctttctctctcatacaatccaggccgagcccaccacggcgtcgccgtcgtagaacaccgccagctggccgggggtgggggcgcgggcgggggtgtgcatccgcagaagcacgccgtccccctccggctccagggtggccgccagctgggtcttggagtggcgcagccgcaccgtgacctccatagggccggttaggctatccacggccagccagttgggctccgtcccccgcacctcgtcccggcccagatcggagccgtcggagagcaccacctcgttggcgtccggccgcagggcggtcacatagtaccgatggggccccgacacccccaggccccggccctggcccagagtgtagcagtggatgccccggtggcggcccagcacctttccctctttatccacaaagttcccctccggtgtggaaaacccgcgcctctccagccaggcggcgtagtccccgtcggggataaagcagatctccatggagtccggtttgtccgccaccgggatgccaaagtcccgggccagagcgcgcacctgggtcttttcgtaatctcccagcggaaatattactctctgtaattgttcctttgtcagccgggccagcatataggactggtcattggcgggcatgccctttttcagcaccctgttttccacacgggcgtagtgtccggtggatacatacctggccccgatgcggccggccagggcaaagagcgcggggaacttcaccgccggattgcagcgggcgcagggcaggggggtgcggcccgcccggtagtcggcggcgaagggggcgcacacctcccgctccagctcggcccggatgtcggccgtctcgaagggaatgcccagccgctccgccacggcggcggcgtccgccgcccccgtaccgcccaggccgatgtccagatagaggccggtgacgtcgtaccgctcctgcaagagccgggccgccacggcggaatccaccccgcccgacaggcccagcacaatcttttccttcatagcgtctccttttcctgggattttgcggggtaggggcccgccccctctccgccctggggccgctccagatggatcatgagcgcggcgatgtccgccggggagacgcccgagatgcgggaggcctgccccagattgagggggcggatcttgtccagcttctgccgggcctcggtgcgcaggccccgcagggacaggtagtccagatcgggggggaggggccggttttccatcttccgctgctcggccacctggcggagctggcggtcgatgtagccctggtatttcacggcgatctccaccgcctcggtgacggcggtgggcagcggccgccggtccggatccgccccggccagaccctcataggtgttctccggccgtcggagcaggtcgcacaggcggccctccgcggtgccggtgtgctccaggcgcttgatctcccggtccacggcggcgtacttgtccaccacccgctgataccgctcgtcgctgatcaggccgatagcatgccccacggggcacagccgccggtcggcgttgtcctgccggtggagcaggcggtactcggtgcgggaggtcatcatgcggtagggctcattggtgcccttggtcaccagatcgtcgatgagcaccccgatgtacccctggtctcgccgcagaatgaggggctcccggttcagaagcttcagggcggcattcaccccggccacgaagccctggacggcggcctcctcgtagccggaggagccgttgaactgcccggccccgtagaggcccgccacccgcttgtgctccagggtggggagcagctcggtggggtccacgcagtcgtactcgatggcgtaggccgggcgggtcatctccgcccgctccaggccgggaatggtgtggagcatctgcacctgcacgtcctccggcagggaagaggacaggccctggatgtagagctcttcggtgttcagccccatgggctccacaaagagctggtgccgctccttgtcggcaaagcgcaccaccttgtcctcgatggaggggcagtaccggggcccgatgccctcgatcaccccggagaacaggggggagcggtccaggttggcccggataacggcgtgggtggcggcattggtgtaggtcagccagcacaccgcccggttctccggcggctccgccgtctcaaaggagaaggggagcacccgctcgtcccccggctgtacctccatctgggagaaatccacgctgcgggcgttcacccgggggggcgtacccgtcttgaaccgccgcaggcccaggcccagccttttcaggctctcggtcagggggagggcggcggccaggccgtctgggccggaggagcgggtcacatcccccacgatggtgcggccccccaggtaggtgcccgaggccaccaccaccgcccgcacccggtacaccgccccgtaggcggtgcgcacggcggtgatccggccgccttcggcatagatatcggtgatctccgcctgcttcacccacaggcgctcctgctgttccagggtgtgcttcatgatctcctggtatctccgccggtcggcctgggcccggagggaccacaccgccgggcccttgccccggttgagcagccggtactggatgcacgcccggtcggcggcctttgccatctcgccccccagggcgtccagctcccgcaccaggtggcccttgcccgtgccgccgatggccgggttgcacggcatgttgcccaccgcgtccagattgacggtgaagcacagggtgttcagccccagccgcgcggcggccagggctgcctcaatgcccgcgtggcccgcgccgatgacggcgatatcataacttcctgcttcgtaattcatgtatgttccttctcgcttcaaagtatccaacgggccaggcagcggaaaaaacgccaaattcggctcagcgggccgatgtaggcatcggcccctacattttgcgggaaatacctcccttgccgcagacccgtaggggcgggtgcccacacccgcccgcagcccccgcactccgccagagtccccggcccagccgggcggccacaagggccgcccctac

SEQ ID NO: 4313 - DNA, 7274 bp, Unknown
  gut microbiota DNA sequence
ccgtagacgatggtcaccgctttctggcggttgacgatctcggcgacagcgggtgcgccgccgaactcgccgtccagagtccagggcagctcctggccgcaggcgacccggaggcggctggtgcggaagctggtcaccagcccgccctcgtcgggggacatggtgagcagcgccttgatcaccgcctggagctggaggggattctggggctggcgcaccagcaccacctcaaagagcccgtcgtccaggcggacgggctcggcgggcatgcccttgaagccccccacggacacggtgttgctcaccatgccgtagcagaagccgccctcctccacgccgccgtcgtgctccacggtgagggggtaggcctggatggaccccaggcgggtggccccctccagtacgtaagccaggtggccgaagatatttttcaccggctggggcgtgctgtaagccacgtcggtaaaggccccgaaggcggccacatagatgaaatagcggtcgttgaaggagccgatgtccaccggcctgggcacaccggcggcggccaccctggccatggcctccatcccccgtgggagggagaggtttttggcaaagtcgttggttgtaccggcggggatgtagcccacctccggccggttctccaggcccatcagcccggccaccacctcgtggagggtgccgtcgccgccggagcagacaatgcggtcaaactccccggcccgggcggcggccaccgccgtggcgtccccggccccctgagtggggtggatggtcacgtcccacccggccgccgccagcgcgtcctgcaccgcggccagcctgtttttcagcaggcccttgcccgcgtgggtattgtagagaaagagcagctttttcatgggtgtcctccatctgtttgtgcatccattataccggattgtgggcaaaaaacaacctccgctgtggacggaagcgccaaaaatccgccatccctcttgcttttccatgctaaagtgtgtaaaatagagactccactgtttggcaaaaggggtgtatcgtatggaccgcaaagcgctctccgcggcattcccggtgacggtgccggtgctgatgggctacctggccatcggcatcgccttcgggctgatgctccaggagattggatacaacttcatctgggctttcttcatgagcctgaccatctacgccggttccgggcagtacctgggggtgaccctgctgggcgccgccgcctccctgggcacggtggcggtcatgacgctgctcatcaacttccggcacctggtatacggtctgtccatgctggagaagttccggggcatggggccccgcaagctctatatgattttttcccttaccgacgagacctatgccctgctgtcctcagcccgggccccggtgggggtggacccccggaatttctattttgccatcgccctgctggaccagagctactggattctgggctcggtcatcggcgcagtggccggggcgctgatccccttcagcaccgagggggtggacttcgccatgaccgccctgttcgtggttatcgccgtggaccagtggaggagctaccggaggcacctgcccgccgttctgggggccggggtgacggtgctgtttctgattgtcctgggccacttcttcggccaggatcagatgctgctcatctcgctgggcgtgattgtgctgtgcctgctggtcctgcgggacaggctggacgagaaggaggaagagacatgctgagcaccgcaggggccgtcgccgccatcgcggtcatggccattatcacctttctgacccgcgccctgcccttccttctctttgaccggggggagtcgccccccaagctggtcctctacctgggccgggttttgccaccggccatcatcgccatgctcatcgtatactgtctccggggcgtgtcctttgccgcccccggcggctgggtgccccagctcgtgtccgtggcggcggtggtgatccttcacctgtggcgcagcaataccctgctgagcatcttcggaggcaccattttgtatatggtgctcgtccaggccgtgtttccctaacgcaagcgcccgcccccaaaagggggcgggcgcttttgcccggttcagcgggtgcgcaggcacatcacccgttcgccgtgggtgtcccgctcgccggtaaagcggaagccgaaggactcgtacagcgccgcagccggccggttggcctccaccacgctgaggtagatccgctttttgtggtactcccgctccagccgctccagcagggcggccagcgcggcccggccgtacccccggccctgaaagcggcggtcgatcagcagccggtccagccacagccgtccaaagggcaggtactcccagaaaaagccgtacatggcgaagcctatgagggcatccccatcatagacccccacgggccgccagcaccgccgccggtccgcctcggccaggcactccgccacgctctccacaaagccctcctgtccgggggccgtctccagccgctccacagcggccctggaagccacggtcaccggctccaaccggattttcatcgtctcacgctccatatacgcgaaaacacaggcccgccgcctttcgcgggcctgtgccttcgtaattgaaagaagagaggaaagagagggggcgtggtcatctctgaccacgctgttatcctattccatccctgtgaaccccttttgaaccggatatgaatattttgtaaaggaatgacccgcttactccgccagcagttcggccacggcggtcagatagttgggatctagctcctcaatccggcccgcgtcgcaggcggcggccacggccggatcaatgggcaggcgggccagcaccttcaggcccagatcggcggccacctgctcgatgtggctctcgccgaagatggcgtgctccttgccgcagtcggggcagcggaagtagctgtagttctccaccaggcccagaacggggatgtgcatcatctcggccatcttgacggccttggtgacaatcatgctcaccagatcctggggggtggtgaccaccacgatgccgtccaccggcagggactggaacaccgtcaggggcacgtcgccggttccggggggcatatccacaaacaggtagtccacgtcgccccagatgacatcggtccagaactgcttcaccgccccggcgatcaccgggccgcgccacaccaccgggtcggtctcgttctcggtgagcaggttgaggctcataatctcgatgccggttttggtctccgccgggtagatgcccagctcgctaccctcggccttggtgtggacgccgaaggcggtggggatggaggggccggtgatgtcggcgtccaggacgcccaccgtcttgcccatgcggcgcatggccaccgccagggaggaggtgaccaggctcttgcccacgccgcccttgccgctgaccacggcgatgaccttcccgatgtgggacaggccgttggccggggcgcggaagtcctggggcgcggtgcgctccccgcagctctcgccgcaggaggagcagtcgtgcgtacaatcggacatagttttcgttccttctttcctatgtgattaacagggttttgggcgggacatacggacggcggactgggacacggccgcgatgtatcgcggccctaccccgccgcgccgcccatacaatccgcggggctcgcggccgcctgacgggcgcacacgcaggtgcgcccctacgggtggcctcctgatacggcacagagggcggcctatgtgccgccccgccggtcagtagtggtagctccccccgccgatgaactcccgcagcagggagtcgggggccaccagggcgggatccaccggctcaaaataccggaaggcgtccaccagatcgtggtactcctgccagcgctcgttgtcggggggcacctgctccaccgccgcgcgcagggcgtcggcgtagtgggcaaagaccggcacctcatagcgcagggaggagtcgatgatcacatgggcgcggcccttgtagggcgagatatactttttctccccccggcggacattataccacatcagcagcgtttccaacaggtctgtcccgcggaaattgtagtcccgcacggcgcggcgggagatgcgcatccaggtgcccttgaagcgcagctcctccccctccaggatgttggagcgggcggagatatacatgcccgtggcctccgggtggcggccggcaatgtcgtcgttgagggcgtgaatgccctcgaagatggcaatctcgtccttccccagccgcaggggggtgccccggctgtcgttgcgcatctggcgggcgaactcgaagtgggggacgatgacctcctccccccgggacagccggtcaaaggtctcgtccagcagctccatgtccagcagtttcggggactcgtagtcgatgtccccctccggcgtgcggggggcagtcctgcggttgagggtcttgaagtagttgtccatggacaccgtgtgggcgttgaccccccggcgctccagctcccgctccaccttcatggccgtggtggtcttgcccgagccagaggggccggacagaagcacgatggggctctccttcatccgcgccaggatcttgtccacggcggcgtggatgcgctcctggtagtgggcgtcacactcggccagaaaggcggccgggtcccgccggattttttcgttgatctcactgagctgatagggcatgtcttccctcctttaccttccgtgcgcggcgtaaaattgggccaccctggccttgtccgcgcagatagcgtcgatcttctggatgtactcctgggggtatttggcgttggccaggcgctcgatgtacccggtggcgcggtcgaccagcttggtcactccgccgccccccagggagacgatggtgtgcagctcctccatcatgcagatgttgtagaggctctcggcgccaggccggcaccagcccacgttctcaaaggagccggacatgtacttctggcggtagaggtagtagggcctctgcccggccgcccgcagggcggcccaggcgaaatccagcatatccgccaccgccgcgccggagggcaggccgcccccctcctccatcagccgggagccctttttcagggccagggtgtgcaccgtcacattctccggccccagggcaagcacctgctccagggaggcgcggaagcccgccgcgctgtcgccgggcagcccggcgatgagatccatgttgatgcagccgatgccgctctcccgggccagggcgtaggcccggaggatgtcgtccgcccggtgggcccggcccatccgctccagcaccgcgtcctgcatggtctgggggttcaccgacacccgcgagcacccccggcgggccagcaccgccagcttctccgccgtgatggtgtccggccgcccggcctccaccgtgtactcggtgcagcccgacaggtcgatgtggtccgccagctcccccatgagccggtcgagctggggggcggagagggtggtgggggtgccgccgccgaagtagacggtgcgcacccgcagccccgcgtccgccagcatggcccccgtggcggccagctcccggcacagggcgtccaggaaggggtcaatgagcttgagggcccgccccacgtcggcagagacgaaggagcagtaggcgcaccgggtggggcagaaggggatgcccacgtagagggagacctcaccgggggccaggctgcgcagggccgccaggctggccccggcgcagtccatggccagccgccgccgtccctccgtcacccgataggtgtcccgcagcagccgctccgcctgggccgggccggccccggccagcatggccttggtggggatcttcaccggccgcaccccggtcagcgccccccaggggggctcgccgccccgggcggcggtgcccgcgtcgtagaaggccagcttcaaaatccgctggagcgcccggtcggtggacagcgggtcggtcagctccgccgtccggcatcggcgggcggcccggtattcccgtcccccatagctcagcgccgccgtggcggtggcccagaccgccccccggtgcagggagagcaccagcgcgtcctcccccggcgccgggggcccggcgggatactccggccgctgggcggggaacagcgtcagcagcatttgctcggcggcatatttgtagtcgtgtccgtataagtacagcttcatggccgcctcccttccccatgctgctgacgctcccgcgcccaatggcgcggagccgggcgggattcacttccgcccggcgatacataaaaatcagacggggcccccgcaggagcaccgctcccgtggggaaccagcagcatctgctcggcggcgtatttgtagtcgtgtccgtgtaaatacagcttcatgggccgtgtcctttctccggggggcggcggccttccgccttatccctccatggcctcccgcaggtagtagttggtcttgcgctcctgctccagggtggaggcccccatgtggccgggaagcacgtggtagtcgccggagaggcggcccagccgccccagggaggccatgatctccgcgtaggagccgccctcgaagtcggtgcggcccatggagccctggaacagggtgtcgccggtgagaagcacgtcccccaccttcagcgtcaccccgccgggggtgtggccgggggtgtggagcacctcaatatccatcttccccagcttcaccacgtccccgtcctgatagggcgtcgtctccgcgccgacggcggggaacacgtcgccccccaccagggccgcgtcggccgggtggagatacaccggcaccccaggcagggcggcgcacagctcggccacgccgccggtgtggtcgaagtgggcgtgggtcagcaggatgagcttgagctccatcccgtccgccttcagttgggccaggatacgcgccccctccccgccgggatccaccacggcggcggtgcgggtctcctcgtcctccagcaaatagcagttggtgcccagctggcccacctgcatcactttgatctgcatcctttttcacctcatcaatggttgtctgtgcctgcgcctccgtgggcggccacaagggccgcccctaccgggcggaatgcctcctgatatgacatcgtattcggcggaattcgtaggggcggcccttgtggccgcccgcaaacgccggggcgcgttcggccctacatctggtcggtgtccagcagaatggtcac

SEQ ID NO: 4314 - DNA, 11542 bp, Unknown
  gut microbiota DNA sequence
tgccgaatcgattttttgaaaatcttcattaaaatccgtgcgcaggaaattgtcctccggctcccactggtgcaggtgatagtgttccgtataagctgccattttcattcctcccgcagggggggcgggcagcgcctttgctgtactggaaaacgcggcccctgcgggaaaggaaccccgcgtccggctgtctaccggacgcgggggtggccttgcctgcggagggggtaatatagatggcaaactatacagcgcactatcacctgcaccagtgggaaccggaggacagctttttacggagagacttcaacgaggattttcagaaaattgacgcgggcctcgctggacggggagattgcagcctgctgttcggctcttacgtgggtacgggaacttgcggcccgtccgagcctaccgcacttacactggggattccagccaaggcgctttgggtaagctgcggttcatgccacgctgtctttctgagggggaacacgcaggcggttaatttcagcaccagcgatggagagctgcttgaggtggagtggacgcaagacggcctgagctggaagctggggggaggactttacaatcacgactaccagcagctcaatgaaaagggaaccacctattattacgcggcgctataccaagaaagcaaggaggccccgggaaatacccggggcctccttgcttcttggggtttggtgatcagaactcagcggatagtgaaggtaccgccaatcagctcatcgccggtggtcgtattgacaatcgtccaagtataagtgccatcgacaagcgccttatcgctcatctcatagcccttggaggaattattgatgccttcaccaatgacctgcacatagaagtaatggaaaccagtggtcacacctttggcatcttccttgtacatcagattacccttgctgttcttgatggacagagcaacatcctgagcatccttgtcagtaatgcggaaggtgaagaacatgttgtcggtgatttcaccgccgatgtcatccttcttatcctcaggcatcttggtcagaacataggcaccattggcttcgctgctcagatcagaggcgttaacaacggtagcagtatttacaccgctgccggaaatctcagccttgtcgctgccggaggaggtggtggagccgtagaagatggtgacgatctcgccgttcttcacgatggcggtaaccgtcatgcccttctccacatcactcagagagccagtctcgatcttcttgcccttggtgacggcatagacctctacatcgtcggaaacagcgtagctcttgccgcccaggtcgatgataccatcctcggcctcagccttgacctccacgccgagaagctgataggtatcatcggtagtgaccttgctgtactcctcacaggcggaggcgtccagaatctcgttctcagcatccgcataggcgataacgttcagcagaatatcggtcttcaggacattgccgctgggatagctgtccttcagctcctcatccatcttgacagtggtgatctcgccgttgacaacagccttgtactcgtagtaggtgttgtcgctgtccttcaccttggtgccggccttggagctgaggacatacacgatgtcgtcagagctcgcggacacatcggagatgaagaccatggtagccacagtgctaccgctcttgcagtagtaaacaaagttgccgctgttgtccttcaggtcgggaacattggcatagccggtgtaggacttataggtggccttgctgccggtgccggtctgcaccaggaagacggtcttgctgttggcgtagacagtcttagtgtccagagtcatggcggactcgcccttgttgatctcgaccttcttgttctcggccagaccagaagtgctgacgcccttgatggtgtagatgtccttggagttcttgctgtactctacgatgtagccccgcatgtttttcagagcggtttcctttgcactaaagttactgccgctcagacagtcctcatcgacctcggcctcgaccacggtgccgtcggccagcagaagcttggcatagtaggagctctcgtcgtcatagcggccctcatcggcaccggtgttcacgacgtaggcgtagtcgctggaggccttggatacgtcgaccttaatgacatagccataggaatccaggtacaggtccagcacgctgtcgaccttgacatcacccttattggacatcttcgcgctgtacttgtaggtctcgccgtcagccacgaagctggaatcgccggtggtcttggtgacctcgacgccctcaaccacctcggccagggtcatggtctggatctcaccatcagccatggtgtagagaaccacgtcgtccttctcgaaggactcagtctcaaacttcttgccgtccacggtgacatagcggtcatcgccgtccttcgcggcggtaaccttggagatctcgcccacgtaggtgttgatgaccaccagggtcacgttgtcgtcgttgtccacaaaagcctcgaccagaacgccgttgccgccgagctcgtcgtcgctgttgcccttttcgatggtgaaggtgccattggccttgccgtcctcggtcacatccacagtagtggtcttatccaggcccaggtcggagtacagggtcttggagctgaccttctcggagtaagaggcatcggcggtggaagcataggtgccgatctccttggtgccgttcttccactggtcggagggacggccgaaatcgtcgtggttattgctgttcagggtcaggtcagagaagtacttctcgcagaactgctgcacctcgtccttgtcgcccttcacggtgcggtaatcatcggtcgtgctgttggcgaccttcacgggggcggaagcgcccacgataacctgcatgccgtcggagccgatgacagtggtgcccttgttggtgtagtacacagtgtcggcggtcagggtctggaacgccatctgggcggcctgctcacgggtcatggcgtcggccagcacgatgcccttgggggcgatgcccgcgttcaccgcgtcggcggccacgttgatggcccagtcgttgcccacatagttagcaaccttcgcgtcatagcccagggccaccagcatcatcttcgcaaaggccaggccggtcagctcgccctcggggtcgaagttgccgttgccggtgcccgccaggatgccctgctgcacgcagtagccgatgtagcccgcggaccagcggttggcggccacgtccttgaaggtggtggagttagtgctcagcttattggcgtcctcctcgcccaggagcatgacagccacgatcttggcggcctgctcacgggtcaggatgccggtggggttgaaggcgcccttgtcggtgccctcgaacacaccgatggcggtcatcacatcaaccgcctcagtgttggtgatttcagcagagtcgttgaaatcactgctcacagcgctggcggagacgaccatcatgcccacaatcagggccatggccattaccaggctgagagtccgcttgaggtttctcatttggatttcctccttctgaattttgagccagaggggcgtatgacgccccttacaaaggagaaataggtacaaatatctgctcgttttcacctaaaaaactcggtgacggcatgaaaaggtttacttggtaggcatttggtagacaatcctgacagggaaaaagggctgaggccctgaaaccagaagggtttcagggcctcaggtggtagacatttggtagacggaatctccaaacacggctgtagactgtccgggtttgggcgtgcggcggatagtggggtgtccttacatggggaggagatgtaaaaaatatggcaaattatacggaacactatcaactgcaccaatgggagccgtccgacagctttttgcggacggacttcaatcaggactttgccaggatcgacacaggcatgcgggccgccaaggtccaggcggagcggctggaacgggagaaggccgagatcagcacaggagcctataccggcgacaatgccgccagccgcacgattcacctgggattccggcccagggcggttctggtggagatggcgcttggcaaccgctatggaagcaacggcggcgaaagcatcagcggcggcctggcggtagacggctggccagtgttctatcaggacatcaacggaccatgcacgcccgccatccagatccaggccagcggcttcgccgttacccaggacagccggaaccgctcctatatgaactacagcggcaccaaataccattatttcgcggtgaaatagaacatccccccgggcatagcccggggggatgtttcaatatgatcaggcgtaagtgtaggtaatatcaccaggggtcagcgtaccgccagcctcataggagatagtgatgctgaaggtaatggtattgcccgtagcggctccgctcaggtcaacgccatcgctcgtgaaggtgagggcaatctcgttggaagcaaaggcaacggaattggtgtccttgccacctcccagagtcgcaccgccaacagtgctggcagttgcagtcagcttggtaatcttggcgctgatgtcagcagagatgtcaaacttaaactgcgcggtggccagaccgttggaagcgtccttatcgttagcgccagcctccatgacggtggaaccgtacacagcggtcagagtaacatcgctaccgccaagagtcacagtagcgccgggcttgtaaaccttgctgttggtggcatcataccagcccaggaactggtagccagtctcagcagcaggtgccgcaggagcggtcacagaggtagcatcgaactcggcatcgggagccgcagcgcttgtatagggagcgccgggaacctcataggtagccttatacacctgagtgaaattgctggagctaatcggggtgtcaccgttagaaagatcacccacatttacagtgatgcacttgtcggaatccacttcgtagttcttgccattaaaggcgtagttttctccagcattccagtcagagttctggatcgcaacggtggtggcatcagcggggatggtcacctgcttgccggaacggctgtcctcctcggtcagaggagtctggctgttgccggcataaacagcaaatttggcggcatccgcagtgctgtagctgatggtcttggcggtgtaagtacccacggtcacagtggcaagattgctgaccacgacgctctcgattttgccggtctcggtgttggtcaccttcacatagaagtagtgggaaccggcagacagggtgttggcggcaacactcagagtgttggtcttggcgccggtgtagccagccacattgaccagagaggtgtcgtcgttgggggtgttggtactgttgtcagcgctcttgaaccactcgtagctcagagtgccgggagcggtggcggtcacagacagggtcagcgcctggttctcggtaatattggagttcgcggcaggctgaacagtaatgttggcattggcggcatacacgccgtccagggtgctcagaatgtaggcggcgcggacaatgttcttgtcgctgtcgatgaccatgacaacctcgcggcccacgttctcggagaaggagccgacaggagccttctcatagctgttgtccacgtcctccacgttccagatgttgttctcataggtgaaggtgccgtcgccgtaagtaccggtaaccaggttggtcatggtcttgtcggtgtagagggccacggtgccggtgcgcagctgacgggcatagccgcggacgatctccaggttgctggcctggttgtcatcgctggagaagttgggcttggtcaggtcggaaacaccgttgccgtcagtggtgtaggcatagggaatgctgaaatcgtcggaggtgttgaagatactgttgtagtcgtcgcgggtgatcttcagggtggtcacagtgccgtccatcagaaccacgttcagggtggcatacttgctgtccacgctgctgcggctcagaacgaaggcatagtccttctccacggccacgcccttggcgtcaaacagcacggtggaggccagggtaccggagcggttgttcagatagcgggcggaaacagtcttgccgttatccacatgagccatctcattgtagccgacagccacgccgtaggtgatatcactgggattgctgttgtcataatagaaggccacagtgttcttgtctacggtgatctggctgttgttgctgttgtagcggatacgggcggcgccgttctcataggcgctgctcatgacctgctgcttcacgtcggcggggttgaagacgttggtcaccgcggaaacctcgtcgttgctgcccacgatggacttaatagtcagcacattgtcatcgttcagggagtaggcgatgacatagccggcggcgcggccgtccttgtagtcggcggcgttgataccagcagtaccattcgtatcaatgttcttgttgacaaaggcgccggtattaccagtctcaacaggagtcttccagggggcggtagcggagttgtcggagtcggaggtgcccaggaagcccttcagctcctgaatgccctgatttttgctgtatttctcagtatggctgttagcggtgagaacgtcagcaacctgctcgcccacgttcttggcggaggcggagaagttcaaggtgtagacgccctcggtgccgtcggccagcaggaccttgatcttgccggaggcgtcggaggcaaaggcgccgggctcatagccggagtccagaaccagggcgtagtcgtacaggccctgctcggagggacggtaggcaatgacgttgccgttgctgtccaggataaagtcgtagtcggagtcgaactccacgccgccgttgtcgcacttgagcacgtcgaactcataggtgttgtcggcggtgtcagccttgtactggatgtaggaggggtggtactcggtgccgcccacggtgatggtctgctccttctccttgttggcagcataggactccatctggccggtgatcacctggggctcggagacatagtagcggccgccgtaggagacggtcagaaccaggtcgccctcagctaggtcggcctcagtcacgatgtcctcgttgtcaatggccttgttggagttgaaggtgttcagagtggtggtctccttggagtcgctcttggcgatgacctgggacagggtctcctggaggtacagcacgtactcaacctcgccgtcgttatcgttgtcgatggcggtcagctccacgccgtagccgttggtcttgcccttcacgctgttgaagcggtcgccggactcgaagcccatggccttggtggcggcagcctcgtccttcattacgccgtagttgacgtagtaggcggtatcgccgtccacgctcaggccggtacccttcaggaagtccttcatggtgtcctgggtgtcggcggtggtcttgaccacgttgttgttgccgttcacgtacacgcccagaacctcggagttggccagaacggtagtcttgcgcacatacatggttacagtctgacccagcatgtcgacgggagtggacacgttgaagataacggggttcttctcctcctcatactcgcccacaacggtgttgctggtggtggacttgtagacctttacgtgatccatcttggtcttgccggtggccagggaatcctcgctgtcggtatcctccagctgggcccactcgttgccggtgaccacgccctccaccttgtaaacgccatacttggtggacagcagggtacggtgatcctcaaaggcaatggcgtagccgttctcgtacttctggatcatttcgatgtccagagcgttgtagatcagcagcgccgcgttgtcgcgggtcagaggatcgccggtgggagcggtcaggtcatcaaagatgcccagggtagaggccagggaggcggtcttgatggcccagtcgttgccggtcaggccctcgagctgcgcgtcgtagccggcggccaccagcagcatcttggcggcctcgttgccggtaacggtagcggcggggtcaaacttgccgttgccgcggccggcgatgatgcccaggctgtagcagtagttgatgtagctctcagcccagtggcccttcacgtcggtcaggccggtgttcatcccgacatacaggccgtccacatcggcgccctgattcaggacggtggcgatcatcttcgccatctcggcacgggtcacattgcccgcggggtcaaagaaagacccatcttccttgccgttgatcacacccagaatggtgagcatggaaacggcatccttgttgacgatctcatccttgtcggagaagtcgtcaaagcccgcagcgctggcggagacaaccatcatgccgatgagcatgatcgccgccagagccaggctgagagcccgcttgaggtttctcatttggatttcctccttctgaattttgagccagaggggcgtatgacgcccctttcaggggaggaaacaatgcacatttcgggggatagagatataaaaggcggggaaacagaatcaaaaggttgctatggtagacgtttggtagacaatacgggagcgggaaaagtgaaaacgccttggaacccaaaggattccaaggcgtttctggtagacttttggtagacaaaaagtaaaaacacaaaagaaaggtggacggaaatgggccactttttcggggatgcggagtggaggtgaggagggaaacgcgtgaagaacgagcgggcacggctgctgcggaggatggagcggctggcaggttgcagagtaaatgacgcggtaaagctggcgttcctggacggagaacagctaggagagatcgacgggctggatctgggagcgctgaaggagttcaagcgcagcggaaacggcgcggtggagctgaagctggtggatcgggcggccgtgctggagcggctggtggagctgtccggcggccgggaggacggggcggaggagtttttccgggcgctgcgggagagcgccgatgcggtttagggccttttcccggcagcagaggcgtgtgctcacctggtggtgttccgccgaggggcaaagccgggaggcggttatttgcgacggagcggtacgcagcggaaagaccctgtgcatggggctggccttcttcctgtgggccacggcctgcttcgacggcatggccttcgggctgtgcggcaaaaccatcacggcgctgcggcgcaacctgctgcgggaggtgctgcctacgctgggggcgctggggttccagtggagggagcaggcatcccaaaaccggctgacggtacggctgggcgggaaggagaacaccttctacctctttggcggcagagacgagggaagcgcggccctgattcagggcatcacgctggcgggggttctgctggatgaggcggccctcatgccccgctccttcgtggagcaggcctgcgcccggtgctccgtgccggggagccggatgtggttctcctgcaacccggagcacccggagcactggttttacaaggagtggattttaaaggcggaggagcggcgggcgctctacctccacttcaccatggaggataacccggcgctgacgcctcaggtgcgggagcggtacgcgcgcagcttcagcggcgccttctaccggcggtttgtgttgggggagtgggtggccgcccaggggcgggtatacgatttcttcgacgagagctgggcgaggcccgtcccggtgggcggcatggagcggtggtgcatctcctgcgactacggtacggtaaaccccacgtccctggggctgtgggggctgcggggcggagtgtggtaccgggtgtcggagtcctactatgacgcccgggccgaggggcggcagagaaccgacggagagcacgccgacgccctggagcggctggcggggggacggcccatctggaaggtggtggccgacccgtcggcggccagctttatcgagaccctgcgccggcggggatggcgggtggaaaaggccgacaacgacgtgttggccggtatccgaaccaccgccgaactgctgcggcgggggaggctggtgatctgccagggctgcgccgacgccctccgggagtttaccctctactgctgggatgagaaggccgggggcgaccgggtaaaaaaagtccacgaccacgccatggacgacatccgctattttgccgccagtgttgcggcgggagagcgggggtacgttggaggcctgtgtgtggagcgggggcggttttagcgcggagcgcgccgcggcagaggatgggaggagagcatgggtatatttgcaaggaaaagagagaatggggccggggcggcggtgcagctccgggaggggggacggcaccccttcggcgtgctggacgggtatgtgccgctgagccagggggagatggagctctaccggagcatacgggaggccgtccccattgtggacgccgccctgcgcaagctggtgcggctggcgggcggggtcaaggtgtcctgccgggagagcgctgcccaggaggggctggactggttcctccagcatgtgaacaccgggcgcggacagaggggtatccagtccttcctggacggctatctggactccatgctcaccttcggccgggcggtgggggagatcgtccctgaccggcggggccgggagatcgcggcggtgctgtgcggcaacccggcggacgtggagattcgggagggggagtcgccgctggagtttaccctgtggggaaggagtggggacgggcagctccgggagctgccccggcaggagctgctgctcttcaccccctttcagccggaggtgggcagcccctacggcgtgagtctgctgcggtccatgcccttcctgaccggaatcctgctgaacatctaccaggcgatggggatgaactgggagcggatgggcaacgtgcgcttcgcggtggtctacaagccgggggacgcgcccctggagcagtccatggcccaggagcgcagccgccagatcgcccgggagtggtccgcagccatggaggcggggcgggacggccgggtgcgcgattttgtcgccgtgggcgacgtggacatcaaggtgatcggagcggacaaccaggtgctggacagcgaggtgccggtgcggcagattctggaacagctcgtggcccggacgggcataccgcccttcctgttgggattgagctggtcgtccaccgagcggatgagcacccagcaggccgacatgatgaccagcgagctcaccgccatccggcgggggctggagcctgtggtggagcgtatctgcgagctgtggctggccctccacgggtacgaccggagggtgacggtggattgggaggacatcaacctccaggatctggtcgaggaggcccgcgcggagttgtaccgcgagcaggcggaggagctgcgattggcgcgagagggcaaagagggctgaagagtgccggcgcgggcagaggagaccagatcgggggcaccgggaaagagcggcgcatcaggg

SEQ ID NO: 4315 - DNA, 11988 bp, Unknown
  gut microbiota DNA sequence
cagcgcgccgggggatagggcgcagaggaagatgaggggagcgatgggatgaacgtaaacaaggaggcgggcgtggactgcgggctggaggtcagcccggaggagctaaaagcgatcaacgccatgagcaaaaaaaagctgcggcctgaggaggtatacgccttcgcggtgcggctgtgcgacaatgagatcgaccgggacaacgagcggttcccggccgctaccctggaggagctggcccccctgtttgtgggcaggagcggtctgtttgaccaccagtggagcacccggaaccaggcggcccgcatctaccgaaccgaggtggtgcgggagagctggatgacggaggcgggcgagccctactgctatctgaagggctgcgcctacctcctgcgcaccgagggaaaccgggagctgatcgccgccatcgagggggggatcaagaaggaggtcagcgtgggctgcgcggtggagcggtcggtgtgctccatctgcggcgaggagttccacacctgcccccacgagaagggggcggagtacggcggcaggcgctgctgggccgagctggtgggggccaccgacgcctatgagtggtccttcgtggcagtgcccgcccagagaaacgcgggggtgatgaagcacatgcggatggagcaggaggccgcccttgggcggaaatacctggagagcctgcgcggggaggtggcccgcctgggcggcctggccgggctggggctggagcacgccgtgctccggggcatcgcggacaagctgggctatgacgagctgctggccctcaagggcgcgctggagcggcaggccgagcgggtgttcccggtggagacccagctgcggtatggcggcgggcgggagaacgacggagagcgggacggggcatttttgatctgagcggccccatgcgcagagaggacagaggagaaaggagaggcagcatgagcaggatttcatttgagggaattggagaggtggcggccacctttgcctgcggcgaaggggtaaaggcgggccagatggtgaagctcaccggggacggcaccgtcggcccctgcggcgacggcgagcgcttttgcggcgtggccctgagcgccggggagggcttcgcggcggtacagctgggcgggctgatccgggtggccgccagcggcggcgcgctcagtgaggggtggaaccggctgctggccgacggctccggcggcgtccggccggacagcgccgagacgcccaccggcggcgaatatctggtggtgcgggcggagagcggcggcgccgtcatccgcctgtgagaaagggaggtatggaaatatgggatatcgttttgacaacctgagactggaaaagggcatgtataacgaggcgggccgctccttcacccaggtgctggagcgggaggacccctcggagcagtataagggcacggcgctggaggggctggacgcctatcagcggcagctcaagcgctttgacatcaaggtgaagggcgcgggcagcgacgcggtggagaagttctttgccaccagccagtccgccgtcctcttccccgagtacatcgcccgctccgtgcggcagggcatggaggaggccaacctcctgccccacatcaccgccgccgtcacccggtttgacggcatggactaccgctccatcgcctcggtgccggacgacgaccagagggccctgcgctgggtggaggagggcgccgccatcccccagacccaggtgaaaacccaggagaatctggtgaagctccacaagcgggggcggatgctggtggcctcctacgaggccatccgctatcagaagctggatctgttctcggtcaccctgcggcagatcggcgcccacatcaaccggatgcacctggaggacgccatcgaggtgctcctcaacggcgacggcaacgacaaccccgccgaggccttcaccgtgggtaccgatcccatcggcggcaccgcgggcaccctcacctacgatgagctggtggacttctggggccagtttgagccctatgagatgaacaccctcctggtcagcggcgacatgatgcgccagatgctcaagctggaggagttccagaaccccctgaccggcctcaacttccagggcaccggcaggctggacacccctttgggcgcagctctgctgcgcacctccgccctgggcggcggcaccctcatcggcctggaccgccgctacgccctggagatggtgcagggctccgacgtgctggtggagtacgacaagctcatcgaccgacagctggagcgggccgccatcaccagcatctccggctttgccaagctgttcaccggcgcggccaaggtgctgaagctgaaatgacggagcagattatggacatggcccgcagcctggggcatgtggacgggggacaggaggaggcgctggaggccctgtgccgtgcggctcaggcggagctggccgggcggctgcggccggaggtgcggtcggaggactgcgaagacgcctttatcctggcctgcgcctggctggccctggcggggctggccgccggggagaccggcggcgggcggttcaccgccggggaggtcaccattcaggagggggacggggcggcccgggcggccgccctccgcctccaggccgagacggtgctggggccctggctggccgaccgggggtttgcctttcagggggtaccgggatgaccgggacctgggggcggattctggcgcggtacgggcagagcgtcaccctgcgtcggggggaggaggagcgggcctgccgggcgttcctccagccggtgcgggagcggcgggaggactggtaccaggagttgcccaccccgctggggacggtgcggcgggatcagtggctctacctggggccgccggagctctcactggaggaaacgaacggcctgtgcgtggagtggaacgggctgcgctttgcggtgcgggcggcccagcccgtctgcgtgggggaggagacgctgtactggtgggccctgctggcggtggaggacggagaggcgcagacagagcagacgtgagggggaaaacacttggattttcaggcggtgcgggagcagatggcggcgttcctgagacagcagggggtggacgcggtatgcgcctacccggaggagcggcggcggcaacggagcgggccggtggccgctgtgtccctgcgggcctgccagggcgggccgggcggctttcgggattacctgggagagcggtacgacgagagcaccggccagtggcaggagctgtacggccgccgggtgaccctcaccttcgggctggacctctatggagagagcgctggggagctccagacggcctacgaccggatggcggaggcctttcagtgggagggacccgccgggttggcgctgcgggagctctcctgcggggagacggaatttgaccgggcggccggcctctaccgcagggcggtgacggcggtgtgtcagggatacctgtacgccgtagccgacgagggcggcactttcctggactttgttgtgagaggagagggacatctatgagcgtgacaaaccatgagcggccgggggtatactcccggtacgacgcatccacggtggtgaaaggccgcggcggcggcgggtgcgtgggactggcggccctgtgcggcacaggaacggcgggaacgctctacacctttaaccgctatgaggaggcggtgaccgccttcggcggagaggaaacgctgacggagctggtgcggctgctgttcctcaatggcgcggcccaggtcaaggcggtgccggtggccgaagaggcgggctacaaggcggccttttcggtgctggaagcggcggaggacatcgcagtggtggtgtgcgacagcggcgagctgaccgtgcagcaggccctgcgggacagtgtgaaggccgcctctgaagcgcggcgggagcgcatcgccgtggtgggcggcaaggcgggggagaatgccacagccctggttcagcgggccgaggggctcaacagcgagcgggtggtgctcaccgccccggtgggagaaggcggcggcgcggcggtggccgcggcagtggcgggagccatcgccggggagagcgacccggccattcccctgggcggcgcggagctgaaaggagtggacgggctggaggcccggtatggggatacggagatcgacaccctggtgcggggcggggtcaccccggtggagcaggcggccggggtggtcagcgtggtgcggggcgtgaccacccgcaccaagaccggagaggcggcggacgccacctggcgggagctgaccaccatccgcatcgtggacgacgtgatccccaccgtgcgcgacgccctgcgtgcccggttccgccgggccaagaacaccgagcagagccggggggccatccgctcccaggtggtgctggagctggaaaacaagctggcgcgggagatcattaccggatacggcgaggtctccgtagaggccgatgcggacaaccccacggtgtgtctggtggatttttcctttaccgtggcccatgggctcaaccagatctggctgaacgcgcatatcactgtgtgagaatgggggaggaaggaacatgaaggttgcgggatttccaaccagcagcgacatctatctggaggtggacggcaaaaaggtggcggtggtgcagagctataccgccaagtccagccgtaccagccagaccgtggaggccttcggcgaggacgagccggtggccaccataccgggccaacgtacccacgtcatcgaactgacccggctgtacgccaccgatgaggccatccgggatgggctgaacttccatgcgctggaggacttcagcctggtcatctgcaagccggaccggaagatcatctactccggctgccagtggagctccatcggcgagacaggcgcgctgggggccatggtggtggagaagatcaccatcgtagcggccaggcggattgaaacggcggtgtgatatgctggagagacgggaacggctgaagctggaggacgggagggagctgcggcttctctccgccctggaggtgctggaggcccgccgggaggcggaggggctggcccggggggaggcggaggccgccctgtgcgccaacgcctgcctgctggcccgggcgctggagcggggcggacagccggtgttcgcggacggcggggcggctctggcggggctgagcgcccgggagatcggggcgctggcgggccggtgggccgcctttgaccgggcggaaaacccctcccccgaggacggggaggagcggctggaagggttaaaaaaagcctggagcacgcgccctatgagcgccttcgctggcgcgtgctccaacgctttggcgcgcttccgacggaggagcgggccaaacagatgaaggcgcgggactatctctggtgcgccctccacctggcgctggaccgggaggaggagctggcgcggctgtgtcccgcctgccgaagcgaggcggcggaggagcggtgcccggcctgcggcgcgctccggacagagacggcggcggggcagaacgcggcctttgacgaggcgcggtttgaacggctgaaacggggggagagcggttgacggactatatcgcggtattgctggcacagcaggaggagcaggaacagggcgaggccccggagctggagaccggccccctgacggtatggctggaggagaatacgcggcccgcagaggccgcagcagcgcggcgcagagtggagcaggacgaggccggcgcgtgtgccggaccgggtgcggtgatagggaaccgatatgtgccggaggccccggtcggggactccagcggacagccatcggaccggggagcgaagcagtgggcagacggcctccagaccgccggtacgttggagacggcgggaaaaatgggggagcggacggctcaaccggcccggccggagcacaccgcagaataccggagcgggtcaggggtggcctggctcgacggtctggtgcgcaggagcatggagcgggagtggagcggcggaacggagaggcgggtggtgacggtggagcagtacggcggagcggtgggcgctccggcggaggccgaggcgctggaccggctgtttcgccgggacgcccggcggtatgatggggggttccggctgctgtgagattggcttccatgcggtacaaggactatgtatggccccacaacccgcgggtttacaccattgagtataaacggaccatgggtgcgcggaaggtgcccttcgggcgctaccacctccaggatctgggccccgcccagcgggtcatgcggggcgagggggaattcgtgggcgaaggggcctacggggagtttaagaagctggctaccgtattctacgccgggggaccggggctgctggttcacccggtttggcagacctccaacgcctactttgtggagctctcactccggcaggagcccagggcggactatgtggggtattcctttgctttctgggagggatacgacggacacagcaccggcgtacaggtgaccgggggcggaggagaaccggagacaggcccggccgccggtacggcgggggagcggcggcacacggtgcgccggggggagaccctgtgggggatcgcccgggattacggcctcagcctgaccgagctgatcgtcctcaatccccagattaaaaatccaaacctgattctggcaggggaggaggtgcgcctggcgtgatgcggggagaactgctgtgctgggatgggcggcgcatccgcctgccagacgcggtggagtggcggtttcaatacggctgcggcacgccctgcgacagctttcagctcacctgcctgtgggagccggacagcgggaacgacctggccgaggcggtgagctttacggcggaggagaacggggaacggctcttcaccggcgtggtggacgagtgcgagcggggctgggacaccgcggggggcacccttaccgtggcgggccggggaatggccgcccgcctgctggacaacgaggcgctgggggcagactaccaagtggccactgttgaggatatcctgcgggaccacgtggccccctacggcattgagaccgtgcggggggcggagctgccgccggtgccgggcttctcggtggacgcggggagcagcgagtggcaggtggtctatgaattctgccgctattatgggggaattgccccccggtttgatcggctggggcggctggtactggccccctgggaggaggggcggcggctggtgctgggggcggacgcggcggtgacgagcttccgcctgcgggagcagcgatacggggtgctctccgaggtgctggtgcgggaccgcaccacagaggaggttcagcgggtggcggacgaggacttcctgcgccggggcggccggtgccgccgtgtgcttaccatgccgggaaagagcagctatcaggccatgcgctattccggggcgtatcaactggcccgcgcccgggaagagctgcggcaggcagagctggagctgccggaagcctttgccgcgtggccgggggagctggtggagctcaacctggccaagggtacgggacggggcctctggcgggtacgggagagcgtatgcggcctgacggcggcgggaacctacacccggctgacgctgggggagccatagcggaggagtggttttatgtggatttcggagcaggggcggagaaggacagagccggacggaacagcactggtgggccgggtcaccttgcccggcgacccggccggggtgtatctggccggagagcggcgggagctgcccgtgtttggcccgggcggctatgtgtggcggccggaggagggcgagcaggtgctggtgctcaagaccggccaggcgggagaggccccctgtgtggccggccaggcctgcgggcaggactggaacctggcggcgggcgaggtgctcatctacagcggttcggcctccattcgcatcggcggcgggggtatccggctgaccggagatgtgctggtcaacggcaagccggtgcttacaggggagggctgagcgtggaactaatggtgcggaacggcgactacgtcaacgacggcgcgggtggcttcctgcgggcggaagggacggacgagctgctgcagcgggtgttgtggaagctgtccatcccgcgggggagctttccgctgctgcctgcgctgggcagtgagctccaccggctcggccgggccaagcccgctgagcgggccggactggcccggcagtatgtggcccaggcactttccgatgaggcggagctgtcggtggccggggtggagctgtcggccgggggagaactgacggtcgagctggactggcggggcgaggcgctccgcctgatacttgggacgggaggcgtatgacgggatgacggtggaggagctctacgggcagatggtggacacctttcagcgggagacggggctggcgctggccggggacggagacatggcggtgcggctttacgccgtggcggcccagctctacgccctgtatgtgcaggccgactgggtggggcggcagtgcttcccccagacggcccagggggactacctggataagcatgctcaactgcgggggctggagcgccgggcggccacagcggcggtcggggtgctctccttcgagacagaccatccgccggaggccgatctgagcatcccggaggggacggtatgcatgacagcggcccaggtgcgctttgagaccaccgaggcgggcgttttaaaggcggggcagacctccgcccaggtgcgggccagagcggtggagccgggcgcggcgggaaatgcggcggccgggacggtgcgtgccatggcggtggcgccggtgggggtgagccggtgcaccaatcctgaggccttttccggaggactggatgccgagggggacgagagcctgcgggagcgggtgctggagacctttcggcggatgcccaacggggccaacgccgccttttaccagcaggaggccctctcctttccggaggtggcggcggctaccgtggtggcgcggccccggggcgtggggacggtggacgtgtttcttgccacggcggcgggtctgcccgacagcggactgctggaacaggtggcggcccatctggaggaacgccgcgaaatcgccgtggatgttcaggtgaaggcgccggaggtaaggacggtggatgtgtcagttcaggtggcggcccggccgggggcggactttgacaccgtccggcaggcggtggagtccgccgtacggggctggtttgacgggcggctcttggggcagagtgtcctgcgggcccagctgggggcgctgatcttcggggtggagggcgtggagaactacgccctcaccgccccggcggccgatgtggcggcagcggtggacgagctgccacaactgggcacactgacggtagcagcactggaggggacggcatgagctacggggcatacctcagggagctgctccggcccctgcgtatctatgggctggagggcaccgccaatggcggtgagctggaggcccaggggaaggcgctggatggggtggaggccgccatggaggaggtacagcgggagatgctgatctgcaccgcagagggacgggggctggaggccgtcgaggcactgctggcccgaaagccggtagctgccagcctggagcggcggcgggcggcgctggccgccctgctgcgcatcggcggggacagctttaccttgacggcgatcaacgataatctaaaaggctgcggcctcaacgccgtggccagcgagacggaaacgcccggcgttgtggaggtgcggttccccgatgtaccaggcatcccggacgggtttgaatcaatgagggccatcctggaggatattctgccctgccatctggacatacggtatgtctactggtacatcacctgggccctcatggaggagcgctttgccacctggggagacattgagaagctggggcccacctgggaggagctggagaagatggtgcgggactagcctgcctgtcgcataaaaatgcctggaaccatatggttccaggcattttttgcttaaaagggagctcaccagtgctccagaagatagggaatagccgggacagggcggtcaaaaaaacgggcgagggcctgctccagctcctccggggagagggtgccctggggctccggcctgccgtccgcgccccacgccagcaggccgatgccggcggcccagtagagggagtcgtccgcccagggagagatcccctcaaagtcgttacaggcggccactccgctgggcagaaaggtgtcccgccccaggtggacggcgtagcggcggagcaggacggcggcctcctcgcgggtgatggggcggtcagggacaaaaagtgtgccgccggtgccccgcacgatcccaagatcataggcccaggctacagccgtggcaccgggggagttgggattcacatcggagaaagggccgttggcatcgtaggggacagcacccgagcaggtccacagggcggccacaaactggacacgggtgaccggggactgggccgctgccgccgcagggagcagcagggtgaggagcaggagtgcaggaatgagctgtctcatggcatatcctcctttgggtatagcataccatatactggaagaatatgccgtcgaattgaggtcagatgatatcgtgttcgtcaaccatggtacgctccaccgtatagagcacctgcccctggccgtccagggcctgagcggtgtagagcgtgtaagttggaagccgctccggggcacaccagagaaacagcccgccgctgtcgggagagacctccgccgtatgggtccccccatcgccggtgcaggtgatgcggacggactcaatggccgggtcggagcagaggccaaaaaagagatcataatggatgccgcagacggagaggggggcgtcctccaccggggcggcgatcagtcccctggcatcgggccgccaggtgtgcccgaggaaaaagggctggcgctccagggagcagacggcgtaccagcggtcatagcggagggcgtagatcgcctcctccgggtaccactgggcggcgtccaccgggccgaagtggaagcggctctggagccgctccagggccgcctggtgggtgaagcaggggcggaggacgagcagcagggccagggggagcagcagcaggagcaccacattgcggcgcaggcggcccctgggcgtgagccgcaggcgggagagcgggcgtttcacgactgtacaccctccttcagaagtggaatttctacccggaaggtgtggccgaacacgttcccctcgagccacaagtgctccgcatcttcggggggaagctggggcaggatgatccagcggttgactccggagtgaagggaggtggcggggatgcactcccagccagtatcggcgacaaagcggtagaacacattgcccggcacgttttccacaaagtgcatcttcaggcgggggctgccgttatcaggcaaccagccgtcggccgggtcgcaagttaggtagatctcataggcgaacggttgcccggtcgagctcatgacaccgatggtgtggaagtggagccgcaggccgtccacctctgcccactcgtctatagccagcgggtattcgtatcgctcctggtagtgcgcccgggtatcctcaggagcagcacgccgggcaagaacggtttttgcggaatccagcgaccagagggctagggcaaggatgcagacgaccagaagaaagaccaatattatgttggtggccgccacagagaggcacagcagaggcgggtgagcgcggtcgagctggcggcctagttcctccggctcacccatggcggtcacggcctgggcggcggcctcctcggaagacaggccccgcgcctccagagcagcagcgtgatcctccagatgggcggtcagctcggcagagaccggcccc

SEQ ID NO: 4316 - DNA, 5209 bp, Unknown
  gut microbiota DNA sequence
aactcgtttagagtctcaaaaagttcagcagcctgtcgaaaagaggtttcgacaggctgaggccggcccgtcgtgagacgggccggccttttccggtgaggacagttgaaatcagaattgatacacgccgtcggcggtctgggtaaactccgcctggaagaaggcggcgcaggcccgggccatgtactccggatcctggctgcccgccgtctccacggcggagtgcatggcaagctgggccatgccgatgtccaccatggggatgctgacctggtggcccagcaggttgcccagggtggagccgcccggctcgtcggcccggttggcaaacacctgcaccggcaccccggccttttggcagatggcctggaacaggccggcggtgaggccggtggtggtgtatttctggttggccgagtacttgatcaccacaccgccgttggggtagacccggttggccggatcggccttctcggggaagttggggtggacggcgtggccgttgtcggcggagaggagcaggctgcctgccagggcctggcggcgggcctgggcggagaggcccagcgcctccccgatgcgggtgagcacgtcggggaggaaggagctcatggccccctggcgggtgccgctgcccacctcctcgttgtcgaagaggcagtagagctgtccgaagcgctccgtgcccttcgcgctcaggaacccctccagggtggcgtaggcgcagcccagatcgtcaatgcggggggcctggaagaattcgccctctggcccgatgcgcaccggcgcctgccgggggcagagcaccaggtcggtggccaggatgtcccccgcgtccacccccagctcctccgccagcaggacggtgagggaggggccgccgcccagggcgtagaggggctgcatgtccttctgggcgttgtagtcgtggccacggttcacgtcccgctgctggtggatggccaggctggggatggtgagcagatcccggtccagatagaccagacgcccctccacccctgccggggtgcgcaccactgcccggcccgccacggtgaggggccggtccagccagctggcgcagttcatgccgccgtatccctccaccgccaggcggacgtagcgcttgtccccctccagcgcgtcgtttttcacatagaaggtgggcgagtcgctgtgggcggcggtcatgcgccagccctccggggtgccgccgggcaggcggaaggcgatcaggctgctctggttgcgggtggtgtagcagcactggccgggagagagcgcccaggggtcgctctcctccaggcgggtaaagcccgccgcctccagccgggcggccgcggcggcgaccgcgtgataggggctgggactgtcctgaatgtattccatcagcttgtcggttgtctgcatggcaaagcctcctttttccactattatagagcaggaggtggaaaaataaaaggttgacattgtctacctgccgtgttatgttacaggtagacaatgtctaccagatggaggtgatgaaatggacggagaactggtgcgcctgacgggaaccgagtgggcggtgctggactgcctctgggaggcgtccccccagaccatgacccagctggcccgcaccctggccgagcgtgaggggtgggccaagggcaccaccaccaccgtgctcaagcggatgaccgaaaagggactgctcacctgtcggcagggggagcgggccaagtggtacgccccggcggtggagcgccgggccgcggtggtgagcgagacccgcagcttcctccggcgcatctgccgggagagcgtgagcatgctcacaaacgccgcggcggagccggagcgcctgagccgggaggagatcgacgccctctacgacgttttgaagggactggaggagaaggaacgtggctgagtggattctgacgtcgtccctgctgatcgtgattgtgctggccgtgcgggccctgttccgggggcggatgggcctgcggctgcggtacaccctgtggctgctggtgctcctgcgccttctggtgccgggcacggtgttccagaccggattgagcgtgctgaactatgtgcccctgccccagacggccgcggtgcaggccctgccgccccaggacggcggaagtccctccgccccggaggcggagcccatgcccgtccggccggagggggaggcggaaccccggccctccggcccggcggccgcgccggactccgcgcccgccgggggggcggactggaggggcgttctgaccgcggtgtggcagggcggcgcgggggtgctggccgccgccctgctggtgtgcaacctgcgcttttatctgcgcctgcggcggatgcggcgggcccaccccatcccgggggtggccgtgccggtctatgtggcccgcgggctgccctccccctgcctgtacggctttccccggcccgcggtctatctgaccccggcggcggccggcgaaccggagctgctgggccacgtcctgcgccatgagctgacccaccgccgccacggcgaccacatctgggcggtgctgcgggcggcggccctggccctccactggtacaaccccctggtctggctggccgccgttctgtccaggcgggacggggagctggcctgcgacgagggggccctccagggggcggatgaccgggagcgggcggcctacggccggacgctgatccggctggtgacggccgggccgtcggcgggcgagctgctgtgctgcgccaccaccatgaccgcggggtcatcgagcttaaaggagcggattgccatgattgcaaggaaacccagaaccctggccgccgtcctggcggcggtggccctcctggcggggctggcggtggggtgcaccttcaccggcgggcggagcgacgcctgggagccgctctcggaggaggagctggcctacttcaacggggatgcgttcttcaatggaacggacggcatcaacatccgcaaccagttcctcagctccacctatgccgcgccggaggagatcgacctgttccagctcttctactgcggcgacggggacgccgactacgccgccccgccggacggcgccgatccggtggccctggaggcggccatgctggccgccgagggcggcgaagaccccgactgcccggccaccattctgaccaccgcccagatggacgcggtgctggaggagtatctgggcctcaccctggcggagaccggccaggtggggctggagcactttacctatctgcccgacttcgatgtgtatttcttttaccatggcgacaccaattaccgcagctccgtcaccttcaccggcggggagcggcgcggcgagctggtgcgcctcacctacgacgacaccttcctgggcggcggatataagcaggtcaccctgcgggagcgcggggagggctggcagttcgtgtccaacctggccgttcagaccgaggagcgggttcccatggagagcgggctgaccgccctgccggcggagctggcggacaaggtcgtggtggtggaggaacacgacctcaagtcctatagctccggcgtgctggccacctattattacgcgccggactacaacaccgactggggcggactgctcctccaggtggggcgctacagccaggtgggctttgagcagtcctattacagctgggagctgaccggcaactgggcctacctgggctggaacggggactggtactacgcctgccacgcccccaccgatgtgaacttcaatctcgaccactacgacgactaccatgctacagggacagccctaatggcgtggctggaggaactggccgccggggccggactcacccctatggaggaggatcccttctaccagcgggtcaccggccccctctcctatcccggcggggagcatgtgacggtgctctactatccctattacggcctgtccggctatgaagaggcggcggacacggtctacaccctggtgctctcccagcccgcaacccagggggaggaggggatctggtgcgtagaccgctgtgtggatcagaacggcacgcgctatctggtggtgccggaggccgaccagcccatggacgactattacgccgccctccaggaggcctgcgatgccggagagcggcccgagctgcgggatccggtggcggtggccctggcctttgaggaggactggagcggccgggagctgtcccccgacgcctttgtgctggagggtacaagcgacctctcggagttcttcgacctgcatctggccacggtggagctggagaacggagtcggcggttaagaggccagggcagcagctgcccgcaaaaaatccaggcgcacgcccagaatgagggcgtgcgcctgtttcctttttaggagccggatggggcggcaaaggttacgccggtgtaataccagtcgatgatgaccgaaacgcgggcgcctgccgccgaggcaaaggtagtgatctggcacatggaccagagcttggtggcggggtcctgctggcggagccgcatccagtgagtttcctgggagttgtcgtagagaatatcgtcgattatctgggcagtggaaaaggatacgctgttccaggtctgagattcaatggtgctcccgtcgtagattgtggttcgccggaggtccaccagtacgggggccgcagtgtccgctgcccggaggctcagacgaatggcgctggtaccggcgttctgcacattgagaatcagcttgcccagggtgatttccctggcgctccccgtagatgacaaattcatgttatagacttcggggctcgcgcggaggttgggggaaaccacgtcggccccgctgccgtggaagcgcacacggtaagcggtgggggaactctcctccaccgtgatggtgggcgcggggccggtagcgccgatgtcacccttgacgccggtacttcccgtcggtccggttggcccctggggcagcacaaagtccagcgccacgccggtgtcggagggggtggcggtgacagcggcggtagagcccgaggttacattccgcaccgtgacggatggggtggctccggtcagcccagtcggcccggtgacgccctggatgccctgggggccagtcggtccagtcggcccggtgacaccctggctgccctgaggtccagttggcccggtgacgccctggatgccctgaggtccagtcggcccggtgacaccctgg

SEQ ID NO: 4317 - DNA, 66464 bp, Unknown
  gut microbiota DNA sequence
tccggtgacgccctggctgccctgaggtccggtcggcccggtgacgccctggatgccctgaggtccggtcggcccggtgacaccctggatgcctttaggtccagtcggcccggtcggcccggtaagaccggtcaacccttgggggccggtggggccgacttctccggcagggccggttggtcccattggtccctgctcccccataggaccggggcagccgcgctctccctgaggaccctgtgggccggtttcaccctgtagaccctgttctcccataggaccttgttcaccaaccggaccgcgggctccgggatcaccctgttcccctttcggacccatggggccggccggaccgggatcacccttcggaccaaccggaccgcggtcgccttgcgggcccatagggcctggaactccacggattccctggggacccatgggccccggatctcctttcggcccggcatcgccccgcacgccctgcggtccgcgggcgccgggcagcccggccataccgcggggcccgacaggcccaggacagcctggatcgccctttggaccacgtgggccctgcggaccccgctcaccggggatcccttgggggccctgcggcccgcgctgaaacagttcgtcatctgaggtatcacaggagcaggggcagccccttcctgtgtaataacatccataatagttcataagggtacactccatactggattgggcgcaatggccctgccttagactatgacgcagaggcgcagagagcaacacaggggggaaacgccaaccggcgtttcccccctgatcgtctgtttgaatgatccgggaagcagcgctgtgtccagccctggtctgcaaaaatacatcgtactgcgctcctttcagggcgaaagaccccgcttttccgactgctggtactgcctcggtgtcataccggtatatctgcgaaataccttaacaaaataactctgctcacaaaatcccaccaggtagcccacatcccctaccgtgagggcagggttgaggagaagcggcttgctctgttctacccggatctggttcagacagtaagtaaacgtgcaggagcgttcggcctgaaatttcctgctcaggtaggcgggagagcagcccacgtgccttgcaacctttgtcagtttgagtggtctggcgaaatggagcctcatgtaggcgaccgcctctgccaccaggtcactttccgtctgctttttcattcggattcccccagttcaccctgcaaaaatggacagccatacctgttaggaaaaccgcgctgactgcgccgaacaccgggtagatcagactaatgagttcaccgaagcccagcagagacgcgccccaggccaccagggagacagcgaaaaaccggaggaccctctcccggccgtgcagctctgttccggcggagagccgctccataccagccagaaagcaggaaaaggcggtgaccaccatggcgatcagcaggagcaaaagatagggaatgccgagtcctggggagatggctgtgaccaccgtcagcatgggaaattccgtctcggccgccccgggatagtggttcaggacaagcagaatcggcgcggccaccatgaaaagcatggtacagcccaagccaattccccttggagtgcaccttggcgggacctgccgccccaggggggccaggattgccacagcgctgaacatgttataggccgaaaatgccatagcggagggaagccacccaacaccgccctggaacgcaggcggcggacaggcaggcagcaggagcagggcccccgcccctaaccccaccgtacagagaaccagcgcgggggccgcaaaggaaaagatagagatcatcccccgcagccccgacagagagagggctgcgatcagcagagcaaagagcaatccgcatagccaggggggcagtccaaaggcctgatgaagcgccgcccccgtccccgctgtcatgatggttaccaccccgaacaggagcaggacagagaaaagagccaggagatgtctgagcgccgggcattgccaggggaccatcaggaaggacaactcatgccggccggtccgccggaccatggtaagcagaagcagccccgccccacccagcagcgcgatgctcaggcacagccccagccagcccaccgggccaaaccggccgaaaaactgccacatctccctgccggagacatagccggcccccagaaaacaccccgaaaaggcagccccaagctggcgggcggaaatggtctgttccaaaggctcctccacaggtctccctccgtgctcaatatacgctttttcccagagccgactggatcagctcagaggcaagaatgccgctcttattggcggtatccaggaagggattgacctccaccatgtccatggagatcagcttcctgctctccgcaatggcctctgccgccagaaaggcttcacggggggtcaggccgttgtaaacaatcactcccgtgcctggcacagcctccggagtgatggcatccacatcaaagctgaggtggatgccatcggtgccctctccggcgatctggatggcctgctcaattaccgcgcccatcccgagcttgtcgatcatattgatcggaaacacagtgacccccgcttgcgccatacgctgccgctccaaatcgtcaatgtcccgtccgccgacctgcacgcagtgagccacgttaaccggcgccgctccctggccgaactccaccatacagtcaggtccgtaaccacagacagcggaaaagggcatcccgtgcatattgccggtgcatgtgctctcctcgctgttccagtcgccgcgggcatcgatccagatgacgccgatgttgccgctgtgcctcttcgagaccgccgcgatgctgccggcggcgatactgtggtcgccgcccaggataacggggaaacggccctcctccagggtttccgtaacggagaggtacacccgccggttcacctctgacacctgttcatagtgcagcagcttttcccggctggcccctgtccggggagcgaggatatctcccctgtcccgtacgtggtggccctgccgctccagaccctccacaagccctccaaaccggatggcggctggccccatgctggctccccgctgcgaggcgccccaatccgactgaacgccgatcaggtcgagtttccgtaacatatctgccactccctctccgcagagacctgcggctcagatgactttttccacataggggctggtaaatgccttgagcatgctgccgtaaccaagggtaaactgtatccggtcccccacttggtatacagtggtgcagtgggtcagatccagcagcaggtgatccgagcttccgcccaggatttctatctgcggatccctgggctgcaggctgtctgtgtccacatcctgccggcccaccgccgcgatggcccggcgcatgatccccttatcctcataggtgggccggtgtccgaaagcatccacgccgatctcgcctaccgggagggagggcttttccttgatttcaatgacttccgcctccagctccagtgcgtcccccacggttcccgggattcttgtgccataagcagtgtcattgcccagcaggaaggactcgcccaggcgcagattattgatgccctccggcagattcccctgttcaatcagataaatggagctggaattcccgccggagaccatggggagccggatgtggaagcgctgctccagctttcgcgcaagccccaccagcagagagagattctcattcttcggaatgatggccccgtagcaggtgaggttggtgccaagcccatacaggcgtatgtgcttgagcaaaaggatctctgccaccgtggaaaagatctcctcttccttttggtaaaagattccctcccggagatcgcccaggtcgatcatcagcaccacattatggcgcttgcccgcccgcccggcggcttcgtccagcagcctgatggtggacagctccgactggaagctgacatccgcatactccaccacttcggatacctcgctgggcatggacaggcggagcagaaccgtctgcttaccggcctgacgcgcctgtgcggcataggatttcaggttctggatgcgggagtcggccagaaaatcaacccccggatgctccgtgagcatgcggacgatggggggataggcgcacacgcccttggtcacgatcataagggtgcagccgggaaccttttggattatgccggcgcaggcgtccaggttccggcgcagtttgtccatgtgaatacgcactctggggtacatggcttacgaactcgctccttcctgtgtaatgcggttggggcagtggaggcgggtacagcggctgcactcatggctgcagtcccctgctttcggcttgttctcccggtaggagctcatatcatagcccatggcctcgcactcctcaatgtgccgccgcagctcctcttcccgctgctgccgctgggtctcaagccgggagagctccttgttgcagacgggtaccggctcctccgctttccgctccggaaaggtcatgcccaggctctgctccagcagccgggcggccgcctgtgggtaccgcttggacagcacgcccagcgaggccataatgtagtcgtgatccaccaggatctgggcgtgctccccgggaagcagcagcatgcccgactcattacagcgggtgatctcccgcatgatctcctcacggtggggcagccgggtaagggcgcctccggtgcccacgatgtatttgacctgcgtcaaatccttgccctcggccaccgtgctgcgtccggaggggccgtagatataccgcagcctgccggcgtgccgctccgccgcctttaccacggcctctcgggtaagcagctccaccagcttcacttcttcctccgttttggggatggcccgataggtctccagggcatgctccatggaaaagccctgctcccggcattgctcccggagcttctcctcgccgatggactccaccaccttccagcggttgacatacacgcccagatccccttcaaccgtgcgcttggccttcggctcgggtgaaatcatgaggcgggccacctggtcggactccaccgtgacggaatgcagatctgttgtcgctccgcccacgtccaaaacaatgaggtcgcccaggtattcatacaacagcttggtacattccatcaccgcgcccggcgtggggatgatggggcctgtcaccatctcccggacgtgctccatgcctggagcatgggtgatgttttgttcaaacgcatcctgaatgaccttccggcagggctctacgttcagcgcgtcgatcttggggtagacattctccacaatgtagagctgctccccctcctcctccgggaaaatcaggcgcatctcctcctgattctccacatttccggcgtagacgacggggattttaaggttcatggagcggatcatctccgcattggcgatcgccgtgtcccgttcgccgtagtccacgccgcctgcgatcagaatgaggttggggcgtatttccttgatcttggccaaatcagtccggcgcagccgtcccgccgtaacgtagtggagaatccctcccgcgcccagggccgcctccctggcggccttggccgtcatgtcgtataccaggccgtgtaccgtcatcttgaggccgccggcggcagaggatgtggccagcatctcgcggtactccagggactccgttcccagcttgccgcacaggtcggagactgcgctctgcaggccgatacgtacatctccgtccagtacagaagtgggggcctggccttggccgagatagaccggacgatcgccgtccaggccgtggaaagcgtttaccactgttgtggtggagccgatctccgctacaaggacatctactttcattactgtcaccgcctttctgctgcattggaaggcagcaaacatactacagatttgctttgcaaacaggcaaaccagggcagaaggccgcagcgcctctgcccctcggtttgcctgtttgcccgacttgtttcgttcggcgcgctgttgcgcgggacaggacgacattcagccgaatcagccgagcggattgatcctgccggtggccacaaagtagatacaaataaccagaagtgccagaagggcgacaaaaacggccttatcaacctttgtctcgaatacttttagtcccttttccttttgtcccttggcatagacaaagataccgggcacataaagcaggacggttgccagcatgacgctgatgccggcggcaaagaccatccagaccgcgtaaacagcgttgaaaataccaattcctttgatcagcccgttctcctgcttcagcgccaccttgcagaaatacattgcgctgaggaagtacggcaccatgatcatgccggtggcaaagaagtaaaatacctgataggtcgattcattgaaatagagcagaaccagaaatacctgcgcaatgatgctggtgaggataatggcgaagacaggcgcgccatttttattggttcgggtaaacgccttgcagaacgcaccgctcttggccgcctcatatgggcactccgtgcacatgatggtgtggcccagcgtggcccccagcagggagataataacggcgatattcaccagggcagcgccccaggggcccaccacgtgctccaggataccggccatggggggattgcccagggcggccagctcctcattggtcatcacgccggcgctcaggaaggaaatgataatgtagagaatcagtacggaaaggaagccgatcaccgtggcgcggcccacgtcgctggaacgcttggcgcggccggagattaccacggctccttcaatgccggtaaacgcccacactgtggtggtggtggtcgccatgacctgcttgccaaagctcattccgccctcgctgcccgagaagttctgcataaaggtctcgaaggagaaggcgcgggcaaaaataatgacgacgatcagcaccagaatggggataatttttgcgatggtggaaaccaggttgaccgcagtggactcctttgtgccgcggagcaccaggataatggcaatccaccataccacggacatgccaatgaccgacgggatgttgtttcctacaccgaacaggggcagaaattgtcctaccgaggcgaacagaagtgtcaaaaacgagatgtttgagagcagctcacttaaccaataaccccatgcggagttaaatcccacataagaaccaaagccggcgcgggcatagctgtaaacgccgcccttcagctcgggcttcagtttgtttaagtaataaaaggccaggcagagccccagcataccgatgccggttatcagccagcccaccagaacagcgccggaaccggccccggccgcagcaaagtcgcccgggaatgcaaataccgcacttgcgattgttgcgccgatgaccaggccaagcaatccgataaaggaaacgccgcctgctttgttcgtcgtttcttgactcatgaaggctcctcctaaatccaaaatcaggttggggaatggggttggggtccgttcatttcatttgactgcattttagacgaacctgaaacctatcctgccccggctccccttcaggccttcgccggggcatggatagatatcgagcaatccagccgttcggggattgctttgagcttacagctcacctctccggcgcatggcctcctctgccaggaaggtggccacgtcgatcccatgggaatcccggccgaagccctggtcaatgccggtcttgacggcctcatccgggatgacctgggtgccgccggcggcgatgattacccggtcacgaatgcccttttccaccgccagctcgttgatgcgcttcatattcttgtagtggacgttatcgtgggagatgatggtggaggccagaatggcgttggcgttcagctccaccgccgcgtccaccagcttttccaccgggacggaggtgcccaggtagtgaaccttgaccccccacttttcaatgccgccgtgcttgatattgataatctcccgcaggcccacggagtgctcatcctcgcctaccgtgccgcagaccaccaccatggggtgctcctcgaactctttgtaaagcacggcgtcactcagatggtggggctcgggggggacctccagcttggtgggatccacgtcgaaggtcagcttgcctttcatctcgatgcgggtaccctccgcctcctgaagaacctccttgctgatcacctcagggtgatccagacccagccgcttgccgatctccagggccgccgcctcggccacacgcttctcagcggggatacacatggtcagcaggatggtgccgtcggcgcaccactccacctcgggcttgatggcctctccgtccagatacttctttaccttgtccagacggacgtttacgttgtcctcctcatccagctcgtcgatgtagacgatcttgctgcggtcctcaaacgtgcagccgccaatcagggcggaggggttggccggatcgccgccgtactgctccacgttgttgtagccgtagtgggcggtgacgggggccatgtagtcctcagcgcgctcgaagatgtagccgtagcccacgccgccctcaatcttgcgggcgatgccgtcgccgttgcgctcggggtacttggcggagtccacgaagaagccctcctgaacggcgttgaagtagccgccgacctccacgatctcctccatgaacagacaggcgcgctccttgagctcacgggccatctcgcgcagggggccatcctttttgagctccaccatctccatcaggccgtccagaccgatgagggtctgcttggcgttgtcgatggcctcgatattgtagatgtgccaggggacgttgcggccctcgtcaggggtgatggtggactggatgtccgcgctggtcagctttgaaatgagcatgttcagcacgtgggtcaccgtcgcctcgcgggtggaggagcagatgtacttcgtgttctgctgggcccgcatcttgtagcgcccgcagatgtcccgcagcgccacggcgtagggcaggtcggtatagacgcagggggccggagtggccgtggggggcacggtggacaggctgatgttctccggcttcatgcccacccgctcggagaacagggaattgatggcatgctgcacgatcagctcaggcatgaccttccacgcctcacgggcggtggcgtttgcgttgtgggcgccatcaatctgcagcatcccggcccaggccataatggacttggactcgcaggcgtccacgaaggagcgcacgcagttgatgtcgcggtagaggacgttgtactggggatcctggtgggcgccgttgatgccttcctcggcaaacatgacagccacatcggggccagccacgccggagacgtaggagtggtagttgatggggcggcccacctcttcctcgatgagatccagcgccttccgctgtgcgcgaacctgcttgcgggtgatggggacgccgccgattccctggggggtgccctccatcaggccgtcgatgtgggactggcccatgtgccggatgaccatgatgtggtcggcgccgtgccaggcggccatgcgcatgcggcggatatcgtcctcaaagcggccggaggcaatctcggtcgtgatgaccggaagcggctgggggtcgatatcgccgaagtacttggccgggggaaggccgacgctttgcttcagcggctcggacacatcgtggtaggtaaaggggcccatctccaggttgggggcgggcttgcgccaagtccatccccggcgcttgggctcgtacttgtccagatccttaaggatgttgcgcacatccagcttctcgttgggcttcagggtcatctcagacatacttacttcccctccttgaacagcgcgacagcttcatcccagcacttcccctgggccagcaggtggccggcctccgggatggagagattcttctccctggacagcttgtagacgacatggccggcgccgtggctcatcaggctgtgatccatacagccctccacaatcttctgggtctccagcgaggagatgcccatccgcagcagcacggcacgctctaccgaaggggtggtattcctgcggcccagctccagcagcggggcaaccacctgctcggtcagcgcccagaagcggtcatacagctcctggtcggtcagattggcgatatgctttcttctctcagcaaaatcatcggcacgcttcatggatgtcacgctcctctctcaaagtgtgggcacgatggcggccacctgctccctgacccaatccacgctcttgttggtctcctgggccaggaactcatagtccgcctcggtgggggtggccgtataggtctttagcgccgtcttgatgagggaatggcgcatcttgtccagatccagatccctgacctggaactgatagggatcggcgggcaggatcacgctgacgccgggcacctcctcgccgggcttgccaaagcgcacctcgatgccgttctcccgggcaaagtccagctggggctgcacgtgcttgcccgcgccggtgtactcggtctcgctgactaccaggatctgatcctccggcagctcctgggccaggcagaaggcggcggccagagaggtatttccggcggggccgcgctccaggccctccaggtttgccagcagctcggtgatgcacataacttcgccctgcgtcacggtgacatagcgatccatatagcgcaggggacgggcggcagaacggggcacgtcggagcggtccggccagttggcaaacgggacgccgaagccggtgtggccggtggtacaggacttccggttgaactgggtgtcagaggccatgtgcaggccggtcagatcaattgaggcggctacgatctgcgtatggccggcccccgccttccgcaggccccgggcggtgccggtaaccatgccgccgccggcattggtgcacacaaccatgtcgggatccctgccaaactgggcgcggcactgaagggcaatctcatggcccagtgtttcgatgccggcgatgccgaagggggaatagagggaagcattgaagaagtcggtgtcctccagcagggagagggactcatagaagagctcggggcccacggtgatctgcaccacctcggctcccatggcctcgcaggcccgggccttctcaatgatctcgggctggcccacctcccgggagtcgtaggcttcctggacgatgatgcacttgaggccctgcatcgcggcctgggaggccacggcggcgccgtagttgccggaggtcgcggcgatgacgcccttatagccgtgagccttggcaaaggccaccgcacaggcggcccggcgggccttaaaggagccggaggggttggtcatctcatccttcacacagatggtggcgccatagccgggcttggcgcacttgcgggccagggcggtcaggttccgcagcgtgaagagcggggtattgcccactccggtcagcccctgcacccgttctacctcctccatggagaaccccgtagaggacatcatcttctcgtagtcaaaggcgatagagccgctctcaaaggcggagaaatccatgcccagggccttcttcataatttcgcccttgcggctcatcacggaggcgtaatcctttgccagtgccatcacttatcacctccatacaggaatgctctgtaattgcggtcgatctgcaccagctcgggcacgcacttgccatagctgtgggtgtaataggggtcgacctccaccagcgtgccggtctccacccggtctgcggccgtggtgacctgcacctcgtctcccagattggcgtcggccgccaggaatccctttgtccacatcaccagcggggtatttctggtgtcctcaggatcctgaggggcacgctggcccactggaagcaggatcttcttaatccgtacccatgttcctttttgaaccatttcacagcttcctttctccgcgggtccggaggagaaagctcctccgggcccgtaaccgtttcaagtcgattggacggttccttacttcaccagcttgcagtcctcgtcgatcatgtcccgcatgtcgcccatgatggcgtggggcacggggatgtcgaccatggttttcaggccgggacgggcgttgatcacgtgggggatgcagttcatgatcatggccatggtgccgattccgccctcgatctcgggagtattgaccatgttgaccgggggaatgccctgaatttccacatagtcgccggtatggatgcccacctgctcgggttcgatctgctgagggtggtccatttcgatcttcacctggccgtccacggtgccccagcccttcatggcaacgcccgccacatggccggcggcggcaaagccatagggggacttgcggtccacgtcggtgacgatgggctccatgtcctgctcgaatttatccagcttccagcccagagcgtcggtgatcatgcggatggactcggcaaagcccacgtggccggtcatggtgcccgcggccttccgcttctcaaattcggccacctccaggccgataccctgctcctccatgacggcggggccgaagggagacaggctgttcacccggcgggagacgatgtgatccacgctctcgcaggcgccggtccacaggatgaccagcagatccatgataaggccggggttgatgccggtgcccagcacggtgacgccgttcctcctggcgatctcgtccagcttggccgccagctcaggctcctgggcctggggataagccatctcctcggcggaggtgatgacgttcatgccccgctccataacaaacaccagtttgtcatagacatcacgggtaaaggagttggtgcacaccaccacgatatcggcggcgccgggccggatgacctcctcggcggtgcccacgatcacgtcctcgcggtcgccgcgctcaatgccgggcaccacgtcatacaggctcttgcccagcttggcgccgatgtcgatggcgcccacaatatccacgccctgctttttgcagagcatcttgccgatgccgccgcccatggcgcccagtccccagagaattaccttcacatttttcatgctgcattcatcctttccgttacaggtcgtgtggttcaggttctgtgtcctgtctgcggatagaaaaagcaaagggtgtgccagtttttccggcgcaccctttgatctgtataatatttcaattaaattcttatattttccatttatatggacaattagccggggtttagaggacatccacaaagttttattctgaaacggcctgtgagctgctctggcaaacatgcaccaaaacaggttgacaaggcgcaaaaaaatgggcattgtgcccacttttttgcgccccccaagaagccgttaataaagaattccatattttttcagcttgtgctgaagggtctgccgcttcatatgcagacaggttgcgcactgggatacgttcccccggcagcggtcgaacatggtgcgtatcgtttcctcctcaatgcgctcgatatagtcctgcagggactcgcccgcctgaaagtctgtgccacgccggtccacggccttgccgggcgcgggcaggtccaggagctctgttgtaaagccgctgtccccatccatcatgaacatggcctggatcaggatgttctccaattcccggacgtttcccgggtagtcgtattccatgagctggcgcagcacatcccgcggcagctccgacaggcgctttcccatcttcgcatggtgcttttcaatcagcgcctgggccagataggggatatcgcccctgcgttcccgcaggggcggaatattcagggtgaccacgctgaggcggtagtataggtcctgacggagttttccctggcggatcaggtcgacagggtcttcatttacagtagtgattacccggacatccaccggaatatcctctgagcccccaacccgccggatgtaggactcctgcaagacccggagcagcttgctctggagctcatagggcatggagttcagctcatccagcaggagcgtaccgtggttggccagctcaaacaggcccgcccggtccaccgctccggtgaacccgcccttggcggtgccgaacagaagcccctccagcaggttgctgggcagggccgcgcagttctgcgcaataaagggcttcccgctccgcgttccaccgtagtggatgctctgggcgaacagctcctttcccgtgcccgtctccccgtagatcagcaccggcatgtcgttttgcgccgcccgcttggcccgctccatgctcttctggaacttgggatcacgcccgatcagatcggaaaagtgatagcgtttgagcttctgttttttggatgtctcctgcgtccccacctgactttgcagatgggccagccggtcgcacagctccgacagctgagttacgtcattggctacctcgatcacggcgagcagcttcccgtcggcatctttgaccggaatggtagtattaatggtgtgaatatatttgccgctggcgttgatgtaccgctgcggctgattgacggtggatgccccggcctggagcgcacggtaaatcgtactggactccagatccatgtgagaaaacgcatcctcaaaacgccggccgaccacatctgccggctccatctgttccatcctggccataacggaattgtaaaaaatggaggtcccctgcccggccacaatatgaaccccttcattcaaaaggcctaagagcgccgacaggatctccttatattcattttcacgcactatgatatctcccagtacacgctgtgcctctcttttgcgagagcccgtaaaagtaatcaaagctaatataacatataaagtcacagaatttcaacgtaagattttgaccacttgaaaaacccggctggaggcagatgacgcttaagaccacaccgtgcgggcagccataactcggaggcaaaagaggatagtatgcgcagcagccggaaaatccgctccggatttgatgccggcgggcaattttatttggtctaatcaaataacttttttagctgttacaaattcttttcaatctggatcgggcagggaaaacaccgtatcctctatggacaatgatgacagtcaaaatagaaagaaacctgtctttgaccgaagtcaaaaacaggtttcttcgccgggtgatggctacaaaaaagatgcagtggttgcaggtctgcaccaaaaaccaaatcgcaacccagcaaagcggttgcggtttggaaaggagccgcggacgatatgacgtccgcggcgacatgtcctgtgttgataaaaaatgcattttgataagggcttgggattaaggttgattctataaagaaaaccgtttgaattcctcaagtgtcgcttcaagtatctgtctgttttcgtgctcaggctttaaatactgttgcatttctttaaatatttgatcgagattttgcaggtctgagtctgtatatattaaagtaaaaatattaaactttcggtaatattctttgtgcttctgcatctctttttcaaaattggctctggcctctaaattgatttctttttgatttttttcctttgtcctggataagtacccatgtgttgaccagggagaaaattcaaatccctgtttctgcaatgtatagggattaataatcgtgaaatccaaccgatacctgtgctgtgtctgaagaccgccatatcgcaattctgggatcaagagcggaatttcgtatggctgcttgctgcttaacaccaactcgcaatactttttggcaatctccatttcatagggtgatctcgtttgtcgaaccataatattttgaaaaaataccaggtattgttctatcgtaaaaaactctattctttgcggtgaatggggaacgacaagtcctgtctccaggacatgtccgatggtccagtagtttggtttaaaatgtcgaatttcactgacatcgttttcccattctccatttttaaaacgaggggtgatgagaagtccgtagcttgcatttgtttgcccaatccaaagtgctgcttcttcctttttagggcgtttttttgccaaggcatcgcagttgcgccaatatgtgcgctttaaaaaaagagtcacatattctaagagttccggatcacttgtcagttgctgctgaaacttatacgccgccctggatgcctcttttcccgcatcgacggtctttatgtggtttataagcccctggaaccaacgggcggcaaattcctcaggtgagcttatcacgttatctgtaacattaagatacgtcgtgtgcttccctccgatttttgcgtggagggataattgctgagatttgaagtcatctggattgtctttgctgaaggcatggcgccgcaagatactaggaagcagtgcgtccagttgacatgttagctgcgcaatctgttcttttttctgtcgcgcaaaccactgctttcctgtcataacagccaccctttacacatttttctcccagagtattgctgtaattatatcaagtattcctattttatgcaactcaatattaatctaatgtggttatgacacagggggcagattccaaaaatcttccattttgtatttcgatttcagctcgtttgcactttcatgcctcatctccgaagtgaatacagaaatagctgaaagtcctgtcatgataaggctttcagctatacccccctatccgccagtctcatgtaaactgttcgaattgggtgggggcattcaaaaaccttggcgcaggcggaattcacttccgccgggtatgtgaagtcctcacggtatgcataaaaataaccacaccgaaaggtgtggttatttttatgcaaataacggttaaaaccgatatttctgcaaaatcgaaaaacgccgcagagcggcgatcccaaatcacaacccagcgcagcggttgtgatttgggaaggaggagcagcaaaataaatgcgctctgactttttaaaaaagtcggagcaaacgatttgacgtttgctccgacgtggtctgagtgtcatgaaaggatctgtggaaaatacagtaatatcaatggtttgtaaacgggaagcaaggagttttatccaatcaaatcatataatcggaaatatcctccgcctttttccctttttctaatgcatcaaactgcgccttgatttgctcattccgtttaacattcatgccattaggaagatatttaaggtcctcttccttgatgtcgatctctgcaatatcgtttttctcaccgtattgcgggaaattgaccagccaataaccgtctacttcttgttcataacagatccaaccctgcattcctttgtgtacgccttcccgggcatagctttctttttccacaatcacttcaacacaatccatcatctgcattttattcacctccgtacggtgttgtcagtcgtatctcgccggtaggctcaaccatccaacctgatataaacgatactgttccatcgccatttcttctcgggatttcaattctgatacttattctttgacctgcgaaatttaaccttcccaattcataatttccagatacatacttttcccttgcctgtcgttctatttctttttgcagccaaaatgcatccacaactgtatagccccattcatgaaacagtttatctttcccgtgtggatgttcacctctggtattaaacaaatatgggtcaaatttgctgtatgcgctatgtgctgcagcgttgctgacaacaatggtataaggaatcgggtctaatgtgcagtgacagtatggatggtgcggacaaagcggagctttttccttctgaaaccaacagtcatccagcctcaagcattcctcacagtgagttttgccctctgaatggtgcgtccatttgacccagcttggtagtcctgcactcttttgtattgtgccgaaatatcgcttatagtacaacagttattcccccttaaaagtacaagaaaattatttttcataatatagggggaaacaggcaaaaagctgcatgtttctgtacaacttttttagaataattttagaaataaaaaaatcggagtatcccggaggatactccgatggtgcgggcggcgggagtcgaacccgcacaccatgaaggtaacggaacctaaatccgtcgagtctgccagttccaccacgcccgcatgataactcagtatactattcccgtgcaaaattgtcaattgcactctgcggagcgggcagttataatagagaagaacgtaaaccgcaagggggaaaccgaccatgaaacgtgctccgcggattgccgcgattcaggatatctccggcttcggccgctgctccaccacggtggtgctgccggtattggccgccatgggcggggaatgctgcccgctgcttaccgcctgcctctccgcccacaccgcgtttccggccagcgagaaggccacctttctggatctgaccggccagatggcggggacggcggcccactgggcggagctgggggtgacctttgacgccatctacagcggctttctgggctctgccgggcagatcggactgattgaggacttctaccgccagttccgccgggaggggacgctggtgctggtggacccggtgatgggggaccacgggaagccctaccgcacctacacgccggagctgtgcgggcgtatgcgggatctggcggcccaggcggacgtgatcacccccaacctgaccgaggcggcgctgctgctggaggaggactacgccgatctgccccgggacgaggaggggctgcgggcgtggctggagcggctgagcctggatgggcggcgctcggtggtgctcaccggggtgagcctccggccgggcgccatcggcgcgggctgcttcgaccgggccacagggcgcatccgttttgctatggccagacaggagcccgcccagttccccggaaccggcgatcttttcgccagcgtggtgctgggggcgatgctccggggggagccgctggagacagcggcccagcgggcggcggagtttgtccagcggtgcgcagcccacaccctggcgctgggcaccccggttctggagggggtccagttcgagccactgctgggagagctgatgcagagataagggaatccccatgccgccgtacttcggcggcatggggatttgtctattgggcggactggtccaggcgggtgagcaggcgctccagacggacggcctgctccagggtgcagtactccaccgggcggccctccaccagatccaaaaacgccgcggcctgccgcgcaaagcggagcccgggcggctcggcgaggtgctccgaacgcgcctccccctccggggcgtagggaccgtccggggctttgggccagtaagtgaggacgccttcctccacactggcgcggagaagcccgccctcgccggagatgcacaggtggatgccgtccagccctacccggctgacggagacgctgcacagcgccccgccggttccccggccgcagaacacgaaggcgtcgtcgttctccacacaggtgtttccctgaccgtccggccggcgggtggggagaaaggtgccgccgtagccggcggcctcggccagctccacgcccgccgcatattggagcaggtccagcaggtggctgccgaagtcgcccagagcgccgctgccggaggcggagcggcgcatccgccactccagagggaccgcgggatcggctaggcgggtgccgccctggctggcctgggccagatagacccgccccatccgctggcggaggagcgcgcgcagccgctccaccacggcggtatagcggtagacataggccaccatcaccctggcgtcccgccgggccagcagccgctccgcctgccccggcggggcggtctggagccccaggggtttttccagaagcacggccttgccccgctccaccgcgcgctcggtatagggcaggtggaactggttgggagtgcagagcaccactgcgtccaccacgtccagcagctcctccaggcgggtggtcatccgtaccccgtcaagcccgtgccggatacacagccgccggcagccctccagggtgcggctgcatacggcggtgacggtacagcgccccgcctgggccagaaagccctccacgtgccggtcggcgatggccaccgtggtgcccgcgccgacgattccaatccgaattcccatatgtccgctccttttttcagcttcactccatcatagcacggagcgggacgtttgcaaagcggtttcagcgcaggcggaacaggcggcgcaggtggatgccctgggcctggagggcggccaggtagagcacgccgccgaacagcaggcaggccagggcggcggggagagcctccaggccggcgcggcggagcacctggaacagaaggttgatcaccagccccatgagcagggcggagagggcgggggcggtgcaccactgaaaaatctgggcccgcaggccggtggcccggcggacggcccaccagttgaggagtacccccagggcggcggaggcgagaaagcccgccacatagcccctgagtcccacgccgggcaggcccatgaggaagaaggtacagccgagctgcaccacgccgcagaggatggagttgcgggcggcggcccccggacggcccacgccgttgagggcggaggcgaggacggactggtagcaggacaggagcaccccgacggacagggggagaatagagcggcccacggtgggttcccggaacagggcggcgcccagggtggggcccagcaccaccagaaaggccatggcggggaggatcagcaccgaggtggccagcatggagcggtccacccggtgctgcaccagaccccgctgccccagggcggcgccttcagccagcttgggcaccagcaccaggcccagcgccccgatgaaggcggtgggcaggcagagcatgggcagggtcatgccgcacagcacgccgaaggcgctcatggcctccgagacctccgcccccgcgtggaccagccgctgggggatgagcacagaggtggccgagcccatcaggttgcccagcaggctggtcagcccgatggggacagcgatggaggcgatgcggcggttgagctgccggtgctccagcggcgcgccggtcaggccgcccgcccggttcaggtgccgccgggccagcaggagcagggtaacggcggagaacagctcgcacaggatcatgccggtgacaatcagccccaccgtccgctccgggttctgggggagaaagaccaccagcagccccagcaccgctccggtgcggatgaactgttcacacagctccaccgccgccggcggacggatgttgcccgtgccatagaagaagtgcttgtgcaggttttccaccccggtgagcaggatgcagggcagcaggagcagcaggcccaactgggtgcgggcgtcccccagcagatagaccgagatggggtcgtagagcaggaccaccaccgcagccaccgccgcaaagaggaggagaaataccgccaggcagcggcggagcacctgggcgatggcggcccggttgcccctggcgtgatactgggaggagaggttggacactgccaccgtcagacccacggcggtgagggccatgatgacggagaacaccggcatgatgagctggtacagccccatgacctccgcgccgatcagccgggagagcaggatgcggtacacgaacccgagaaattgggagacgatactggtgcccgtgaggatcagggtaccgtagagcatagaggtacggtcgagtttcaaggcgcaccctcctttccctaaaccctattcaccacgggttgtcccccatacgcgggaaaatctttgacaaaacggccgcaagcgcgtatgataaatccattcatactttgtagtatggaagaaagggccaaccgtggcggccaaagtgatccatgtgccctgatgttccccagcagcgcgccggctctcctgttcaaacactgcgggagggcaccgggcccagcataccgggctttccacgtggcaatggataccgccccatgttcctgtccttggccgatctgcctgtgcgggatgcgctgccgggtctgcgggtatgggtggagaccgcccggctggcctgccatgaaaaaccggccggtttgctgattatcctgagagatctggagtggccttttcctgatttatgcatcctgaccacaaattttgataaaaaaataacgcttttttcttgcatttcacttgcctgttggcgtggaaagcagtatacttattaggaaggtttgtgttaaaaaaataacgattataatcgcaggctttgatattggattaaggaggcagaacaaatgggatttgtgaagctggaaaagcagggtcatgtgggcatcgtgacgatcgatcgtcaggaggctctgaacgccctgaacagccaggttctgagcgatctggacgcggttatcgaccaggtggcggcggacgatgagatctatgtgatgattctgaccggcgcgggccgctccttcgtggcgggggccgacatcggcgagatgaagggcttctcctcgatcgacggcaagaagttcggcgtgcacggcggcggcgtgttcctcaagctggagaacctgtccaagcccgtgattgcggcggtaaacggcttcgccctgggcggcggctgtgagctgagcatggcctgcgacatccgactggccagcgagaaggcccggttcggccagcccgaggtgggcctgggcattacccccggcttcggcggcacccagcggctgccccgcatcgtgggcgtcagcaaggctatggagctgattctgacggccaagaccatcaaggccgacgaggccaaggccatcggcctggtcagcgaggtctaccccgccgaggagctgatggataaggccatggagctggccaacgcgatctgcgccaacgcccagatcgccgtgtgcgaatccaagcgctgcatccgcatgggcatgcagaccgacatccacacaggctccgctttcgaggccgaggccttcggcgttacctgcggcaccgaggacaagaacgagggcatgggcgcgttcctggagaagcgggctgagaagcacttccagaaccggtaagcggtacatatgacgcctgtcatcgcaaacctgtccgaccaggtatggaatgttctgatcaaaccaatagaaaagaggttttttactatgaagaagattgtggtcatcggcggcggtaccatggggctggacatcgcccaggtatttgcccgcaacggctatgacgttgtggtgcgcgacatcaaggacgagatcatccaggccagcgaggcccggctgaacaagggcctggataagctggtgagcaagggcaagctggacgaggccaagaaggctgagatcctgtcccacatgagcttcaccaccgagctggccgccgctgccgatgccgatctggtggtggaggccgccatcgagaacctggacatcaagaagagcatcttcgcggagctggacagcctctgcaagccggagaccatcctggcctccaacacgtcctccatctccatcaccgccatcgcggcggccaccaagcgggccgacaagttcatcggcatgcacttctttaaccccgccaccgtcatgaagctggtggaggtcatccggggcgcccacacctccgatgagacctacaagaccattgccgagctggccgccgccatcggcaaggagcccgttgaagtcaatgaggcccccggctttgtggtgaacaagattctggttcccatgatcaacgagggcatcgacctggtctacaccggcgtggccagtgtggagggcgtggacaccgccatgaagctgggcgccaaccaccccatgggccccctggccctgggcgatctgatcggcctggacgtatgcctggccatcatggacaccctgtacgacgagacccacgatcccaagtaccgcgcctccctgctgctgcgcaagatggtccgcgccggcaagctgggccgtaagaccggcatcggcttctacgactactccaaaaagtaaacagggcagacgcagttccctatgcgagcaacgacgggcgggagcccctgactcccgcccgcccgttctgaaatataaatcttaggaggaaggcaacaaatggatctgcacctttccagagagcaggaaatgctccgcaagatgtaccgtgacttcgccgaaaatgaagtcaagcccctggccgagtgggtggacgagaacgaggcgttccccgaggagaccgtcaagaagatggcgaagctggggatgatgggcatctatttccccaaggagtacggcggtgccggcgcggacgttctgtcctatgtcatggccgtcgaggagatgagcaaggtctgcggcaccaccggcgttatcatctccgcccacacctccctgtgctgcgctcccatctatgagaacggcaccgaggagcagaagaagtattacctgcccaagctgtgctccggcgagtggatcggcgcgttcggcctgaccgagcccggcgccggcaccgatgcccagggccagcagaccaccgccgtgctggacgagaagggggagaactggatcctcaacggctccaagatcttcatcaccaacgccggctacgccaacgtgttcgtgatctttgccatcaccggcgttaccaccgacaagcgcggccgcaagaagaaggagatctccgccttcatcgtggagcgcaccgaccccggcttctccgtgggcaagcacgagaagaagatgggcatcaagggctcctccacctgtgagctgattatggaggactgcattatccccaaggaccgcctgctgggcaagcagggcaagggcttcggcatcgccatgaagaccctggacggcggccgtatcggtattgcctcccaggccctgggtctggccgagggagccatcgaggagaccatcaagtacaccaaggagcgcgtccagttcggccggcgcatctcccagttccagaacacccagttccagctggctgacatgcacgccaagaccgaggcggccaagtggctggtgtactccgcggccatgaagaaggagaaccacgagccctacactgtggacgccgccatggccaagctggtggcggctgagacggccagcgacgtgacccgccgctgcgtgcagctgttcggcggctatggctacacccgtgagtaccccatggagcgcatgatgcgcgacgcgaagatcaccgagatctacgagggtaccagcgaggtgcagcgcatggtcatctccgccaacctgggcgtgaactaaaggaactggagggaaaattacgatatgaaatgcatcgtttgtgtcaagcaggtacctgatacctccggcgtggtggcggtgaaggaagacggcaccatggaccgcgcggccatggccaccatcaccaaccacgacgacctggctgcggttgaggccgcgctgcgcatcaaggacgccaccggctgcaaggtggttgtggtctccatgggcccccctcccgccgaggggatgctgcgtgagctgctggccatgggctgcgatgaggccgtgctggtctccgcccgcgagttcggcggttccgatacttacgccacctctcagattctcgccgccgccatcaagaaggtgggcgtggacgaggacgacatcgtgttctgcggccgccaggccatcgacggcgacaccgcccaggtgggcccccagatcgccgagaagctgcacctgccccaggtctcctatgtggcggagatcgccgtggagaacaaggccgtcaccgtgaagcgtctgctggaggacggctacatgaccatcaaggttcagacgccctgcctgctgacctgcgtgaaggagctgaacgacgcccgctacatgagcgtgggcggcatcatggagtgctacaacaagcctctggagatctacaactacgagactctgaaggacgatcccctcatcgacgtggataccatcggcctgaaaggctctcccacgaatgtgtacaagtccttctctcccccggtgaagggcgccggtatgatgatggagggcgccgacaaggcgaccgtcgagaagctggtctccatcctcaacgacaagcacatcatctgatagagtgaaaggagagcaacacaatggcttttgatagtaaggataccgccgccttcaagggcgtatgggttttctgtgagcagcgcgagggcgtgattatgtccaccagctaccagctcctctccgagggccgcaagctggccaacgacctgggcgtggagctgtgcggcgtggtgctgggcaaggacatcaaggaggactacctgaaggccctgggcggctacggcgccgacaaggtgtactactgcaaccacgagttgctggacgtctacaccaccgacgcctacaccaaggtcatctgtgacctggtggaggacaagaagcccgagatcttcctcatcggcgccaccaacatcggccgtgacctgggcccccgctgcgcggcccgcctgcacaccggcctgaccgccgactgcacccacctggacgtggacgtggagaagtacaaggccttcctgaagaccacctccaccatcgacgtggacaacaccaagttcgaggagaacaccaacctgaagatgacccgtccggccttcggcggtcacctgatggccaccatcatctgcccccgcttccgtccccagatgtccaccgtgcgtcccggcgtcatgcagacccagccctatgacgaggccggcgccgcgaagacggagatcgtcaacgtggacgtgaagctggacaagtccgacatccatgtggatgtgctggaggtcaagaaggccgccaagaagctggtcgatctgatcggcgccgacgtggtggtttccgtgggccgcggcatcagcaaggacgtcgagggcggcatcaagctggctgaggagctggcgggcgtcctgggcggcgtcgtgggctcctcccgcgcctgtgtcgacgcgggctggatctccgccgaccaccaggtgggccagaccggcaagaccgtgcacccccgcatctatgtggccctgggcatctccggcgccatccagcacctggctggcatgcaggactccgagtgcatcatcgcggtgaacaagaacgagtccgcccccatcttcgacgtggcctcctacggcatcgtgggcgacctctacaaggtcacccccatgctcatcgaggccatccgcgccgccaaggccgcgaagtaagaggcacattgcgccaccaatacagcggaggccctccccggagggcctccgctttctatcacagcgggggaggggttccatggcggagcggaacgcaaaactgattctcatggtgggtgtgctgggcgtctccgcctcggccattctggtgcggttttcccaggcgccgtccggggtgaccgcagcctaccgcctgggctggacggtgctcctgttgcttccggtagtgctcctgcggtgccgtgcggagctgaggcgggtgacggcgcgggatttggtcctgtgcggggccagcggcgttctgcttgcactccacttcctcacatggtttgagtcccttaagcgtaccagcgtggcctcctccacggtgctggtgagcaccgaggtgattttcaccgccctgggcttcgccctgttcctgcatggaaaaatcccacggctgggggtgtgggccattgccctggcctttgggggcagcgccctgctggccctctccggaggcggcggggcaggggagctgtccggcaacctgctggccctggctgcggcctcggccgccgccgtctataccctcatcggacgggtacagcggggccatctgtctaccacggtctacacctttctgacctatctggcctgctttctcaccctgctgttgggcaccgccgcggcggggacgcccctgacgggctacggcggccgggagtggctcattggtctggcgttggcggtgctgtgcactctcctgggacacagcctgtttagctggtgcctgaagtacctgtccccatcctatgtgtccgccgcaaagctgtgtgagccggtcttctcctcactggcggccatccccctgttcggagaggtgcccggtccactccagcttgccggaggcgcggcggtgctgggagctgtcctcctctacacctgggcggagcgtgaaaaaactcctgccggatgagtccggcaggagttttttcagtcgttaggtgccgagggcggccacgataaagggcttgaacttgtcccagtagcccatgatgaagatgatgagcacaatgacgggcaggacgtacttgaagtagaggcggaactgggcggggaagcggacgcctctgccctggtttgcttcctccaggaagtggtcgtagccccagccatactttttggatacacagcagaacagcaggtagatcatggagccgatggggagcaggttgttgctcaccaggaaatcctcccagtccataatgcccatgcccagggccttcacgccgctccacaggttgttgcccagcagacagggcaggctcagcaggaagatgagcaccagattggccagtaccgccctgccacgggagataccgaagcggtccatccagcaggcgaggatattctcaaacacggcggttacggtggacagggcggcaaagaacaggaaaacgaaaaacagcgcgccccagagctggccgcccggcatggcgttgaacacattgggcagggtcacaaagatcaggctggggccctggccggggttgacgccgaaagcgaaggcggaggggaagatgatcaggccggagacaaaggcaacgcaggtgtccagaacgcccacgttgatggcctcgccgaacaggcggcgctccttgccgatgtagctgccgaaaatggccatggcgccaatacccaggctgagggtgaagaaggcctgtcccatggcgtcatagatggcgcggaacagccgaaagctgccgtcggcatcgtacatcaggttgtggaagttgggcaccaggtagaacttcacgccctccatggcaccgggaagggtaagggcgcggacggccagcactaccagcagggccagcaggcagagcatcatggccttgttgaccttctccacgccgtttttcaggccgcggctgcagatcagcatacccagcaccaccacgatgcccatgaacagaagctgaattcctacgttgccctgcatggcgccgaaagcgttttccacaccggcggcatccaggccccggaattcgccggcagccaccttgaagaagtaaagcagcagccagccggcgatggtggtgtagaacatcatcagcaggtaattgcccgccatgccgaaccagccgtaccagtgccacttgctccccttgggctccaggacctgaaaggaggccaggatgctcttccggctggcccggcccacggaaaactccatggccatgatgggcaggcccatgatgaccaggaacagcagatagatcagcacaaaggccgcgccgccgtactgccccacgatgtaggggaaccgccagacgttgcccaggccgatggcgcacccggcggagatgagcacaaagcccagccgggacgcaaaggtctctctctctttcacaattgcataccctccttggatcagccgccacacgcgcagcattacacacataatagcggattttggaaggtatgtcaatcaaaagcggcgcgtaacccttgtgtcatggcggaacgggtacttttaaagccaatcaagaaccacgtcccgcagggtgacgggggagacgcagttgcgccggaggagctccagaagctggtcaatgcgctccacgctgaccgtgatgttgggcaccgatgcctcctctccgtccggtcctgccaccttaactccatagctctcgcaggacaggccgccgcccagctccatctcgtccaccagaatgtaatactggaaggagtgtgcagtgccgtcctcctcttcccccgtacaggtatcgactaatagttccctcatcttgtatctgctcccttcttctttgatccgtaagaccattatattgtattttccagcatttgtaaaggagcgatcaccgcaggtttcgacacgggagggcggttatgtcacccgcagagaggacttctgtcaacgaaagcgcgaagaaggggagagaacggcgagaatggtcgaatttgagggagtgaatgtggaaagaaaagaggcgtccgccggcagcggacgcctctttgtggaaaaaaggggctaggagaggggaaaagccgcctccacggcctcggaaatggcctcggcaaaggtaggatgggggcgcaccgggcggagcagctgctccgccgtcagctccagcgtgaccgccaaggcgagctcggagatcagatcggtggcccggtaacagcacaattgagcccccaacagggcgcggctctcccggtggaataccagcttgacaaagccccgctttcccccctcgatgagggtacgggcgttgccccccagcacacacttgccggcggcacaggggatgccccgggctctggcctcgtcggcggtgagtcccacctgggccagctccgggctggtgtagacgcaggcggggatggggaccactccgcggaggggggggcggcccagcaggaggtcggccacaaagcgcccctccgcctctgccttgtgggccagcatggccccgccgatggcgtccccgatggcatagagggaggggatggaggtgcggaactgtccgtccacccggaggaacccccgctccagctccggcaggaggtccccggtaaagaggccgccagtggcgggccgccgcccggtggccaccaggacagcgtcggcctccagccggcgcgcctccccccgctgggtaaaggcgacggcagggccgggggtgacgccggtgacgtcggctccggtgaacacctccaccccgtcctgcctgagctgcgcggccagactctggcccagctcccgctccagggtgggcaggaggcggggggccgcctccaggatggtgacgcgggcgcctgcggcggcccagacacacgccagctccaccccgatcactccgccgccgatgatggccagacggtccaggggacgcagaccggacagcaggccgtcgctggtgactacaccgggtgtgtccaggccggggatggggggcagggcgggctcggagcccgcggcgaccaggatgtgggccgcctcgtaggccgcgccccccgcctccaccgtgtggaggccggtgaccaccgcccggtgggagatgagctccaccccggcggcccggagctgcttctcctggccggcgcggagggtggacaccacccgctccacctctgcggccagggcgggccagtcacagcccggccccgccccgtggaggagggccttggtggggacgcacccccggttgaggcaggtgccccccacctggcggggctcaaagagggccacggacaggccgccctgcgcggcccggagggcggcggcgcagccgccgggccctccgccgatgacaatcagctcatacacggctcagccctccgggaaggcgtaccgcaccaccgggcggcgggcggcggcggtctcgtcggggcggcccacaggcgtgctcgccggggcggcgtggagggcctccggctcctccttcgcccggcgcagaatctccgccagcactgccgccgcctcgtccagcgtctcgggggactcggtctcggtgggctcgaacatcagcgcctcgtggacgatcagggggaaatacatggtgggcgggtggatgcctgcgtccagcatggccttggccacgtccagggcggatacccccgtctcctttttcagctcctccagggtgagcacaaactcgtgcatgcacaggccggggaaggcggcggtatagcccgcctcctccagcttccttttgagatagttggcgttgagcaccgctgtgtgggcggcctcggccacaccggtgtttcccagccgcagcaggtaggccagggccttgacgaccaccaggaagttggcgtggaaggcccgcacctggccgatggagtgctctccgccgttgcggcacagggcggagccgggcaggaagggggccagaaaggccttgcaccccaccgggccgctgcccgggccgccgccgccgtggggggtggcgaaggtcttgtggaggttgaggtggcacacgtcgaagcccatgtcgcccggccgggccacccccatgatggcgttgaggttggccccgtcgtagtagacgaggcccctggcggcgtggacgagggcggtgagctccaggatgtctttctcgaagagccccacggtgttgggattggtgagcatcagccccgccgtgtcggggccgcaggcggcccgcagggcctccagatccaccagcccctcgggggtggaggggatgtttttgacggtgaagcccgccatggcggcggaggccgggttggtgccgtgggcggagtcgggcaccaggatcaccgtgcggcccgtgtccccccggctgtggtggtaggccttgatgagcagcaggcccaggaattccccatgggctcctgcggcgggctggagggtgacggcatccatgccggtgatctcacagagcaggcgctctgtccgattcaggacggcctgagcgccctgcacggtgtgggcgggctggagggggtgcaggccggtaaagccgggcagggcggcggcctcctcccccagcttggggttgtacttcatggtgcaggaacccagggggtagaagccgtcgcacacgccgaaggcccggcgggcgagggcctgatagtggcgggacaggtcgctctcccccagctccggcaggcgggggaccgttttccgccggtacttctccggcaggggggcggcgggcacgtccagagacggcagaaggtcgttcccccggccggggcggctgcgctcaaaaatcagcttcatctgtccagcacctccttgacaatggacacggcctcgtccagctcggctcggctctgcttctccgtggcgcaccacagcagcccgccctccaccggccagccccccaggatgccgcgcgactccagggcggaaagcaccttctggggttcgggcagatcggtgacaaactcgtggaagaaggggccggggtagcgcagggacacgccgggcagccggcacagctctgcggccaggtagtgggccttggcgtggcactgctcgcccacctgccgcagcccgtccggccccatgagggacaggtagacggaggcggtgagggcgcacagcgcctcgttggagcacacgttggacgaggccttctcccggcggatgtgctgctcccgggcctgcagggtgaggacaaaggcccgctctccccggctgtcccgggtctctcccacgatgcggccgggcagcctgcgcatgagggactgggaggcggccatgaagcccaggtagggcccgccccaggacagggggaggcccaggggctgtccctcgcccacggcgatgtccgccccgcaggcgccgggggactccagcacccccagggcggcggggttgaccccgacgatcagtctggccccggcggcgtgtacctgcgcggccagggcggacagatcctcaagctggccgaagaagttgggctgctggacatagacgcaggcggtggtctcatccagcagtccggtgagattggtgacgccgttttccgccggggccgccgccacctcggtacccgcgccgaagctgtaggtccggatagtggaaatcacgtccgggtgggcggcggcggacaccacggccctcgtccgcttccgctcccggcacatggccaccgcctccgccgcggcggaggccccgtcatacaccgaggcgttggccgcgtccaggccggtgagctcacagatcatggtctggaattcgaaaatggactggagcaccccctggctgatctccgcctgatagggggtataggccgtgacgaactcctccttagaggcgatgcggctcaccgccgcggggatgtagtggtcgtaagccccggccccccgcaggatggtgcggaagcggatgttctgctccgccagggcctccagggtgcggcggacctccagctccgactggggagggggcaggttcaggggggcggtgaggcgcacggactccggcacgtcccggtacagcgcctccgggccggacaggcccagggcggcgtactgggcggcccgctccgccgccgcggcgggcagatatccggccatgtcagccctcctccgcggcacagtgggcctcgtaggccgccgcgtccagcagctcctcctcatcggtcatctgctccacctggatcagccaggccccgtaggggtcctcgttcaccagggcgggattgtccagcagctcctcgttgaccgcctttaccacaccggacacaggggagagcacgtcggacaccgccttcaccgactccacatcgccgagggcctccccggcggtgacagggtccccctcctggggcaggttgacaaagacgatatcccccagggcgtgctgggcgaagtcggtgaggccgacggtgcagacgccgtcctcctccttgagccactcgtgggatttggtatagcgcagttcctcgggaatgttcatagtaataacctcctgtataatttaaaattgtttttataaaatgagctgggaaggggcggcagccggcgtggccggtttacccttatccccgccggtagaagggcgttttgaccacctgggcgtccacccggcggccccgcacgtccacctggagcggggtgcccggttccttgtacgccgcgtccaccagggccagggccaccgcctgccccacccaggggcagtgggtgccggaggtgaccacgcccacctgccgcccgccgtcgtacaccgggcagccctcccgggcgatgccgcgcccggtcatctggagacccacccggcggcgggacacggggcgggcccgctccagggcggccttgccgatgaagtcgggcttctcaagcttgacgaagatgcccagccccgcctcgtaggggttgatggagggagagagctcgtggccgtagaggggcatggcggcctccagccgcagggtatcccgggcccccaggccgcaggggagggccccggcggccgtcagcgcgtcccaaagggcgggggcgtccgccggggcgcagtagagctcaaagccgtcctcgccggtgtacccggtgcgggagaccaggcagggccggccgtccaccgtgccgtggagcacggcggtgtagttcttcgccggaaggtccgccgtcagggtgcgcagcagcgcctccgcaccgggcccctggagggcgagctgggccgtctgatcggagagatcctccaaagtgcagtccccggccaggtgggcggtcatccaatcccggtccttgccgatgttggaggcgttgaccaccgccagccaggccgtgtccgaacagcggtagacgatcagatcgtccaccacgcctccgtcctcgtagcacatgggggaatagcgggcctggccgtccgccatgccggaaaagtcgttggtcatgagccggttgaggttggccagggcgtcggggccccggaggagcagctctcccatgtggctgacgtcgaacaggccgcagccggtgcgcacggccctgtgctcggcgatgacgccggagtactgcaccggcagcagccatccggcaaagggaaccagcttgccccccgccgccgtgtggcggtcgtagagcggagttttgcgttccatttccatgccctcctttaaaattggggtcaaaaaaagcgcatggcaatgctgccatgcgcctctgttcggttgcctgagagttttgcccccgtcggcgcggactgcggtccgctttccagagcctcgtccggggccggtccttctgcctgagagatcactgcgctgccccttcggcggcggcggtgtgccgcgctctccccaccccatcatccgaccatatgaacttcagtaggacttctatactttatagtatacgggacggaggggaaaatgtcaactaccttctgccggggagtggagggcggcttctccccggtgcttcccccggcagataagctgggtcatggtgcccatagggcaatacacacaccatgagcggggtttgaaaagcaccattgtgaccagccccagtaccgtagaggtgagcatgacgctgtaaaagccaaaggcgaattgggcaacgccgggggaaaagagggttccatagtaggcccagtgccaaggcagccggaacgtccaaagcagagtgacggcctggcgcagctcctgcgcgccggcaaagaccagatatgtgctccagagcatctggaagaacatcagcagaaaaaagcccaaaaacccgtagcggaacgccttgtttttcatccaccggggaatatcggcccgccgggagaggccgaagcgtccacccagcaggctgaacaactgtccccgtccacaaaagcggttgcagtagcccttatccccgcccgcaaaggcgatgaccagagggatgaaaaagcagaggaggcccaaccaggcaaagaggatgttgaagaagcccaacaccagatagaggagagaggcgatccagaggaagtcataccagcgctttttcatgggcgattctcctccagtgtaattatggtagccgggcactccgccgcgcacttgccgcagccgacgcatcggtctgcatccacccgggctgtgataccgttccagattcggatggcggagaggggacagacgcggacacagcagccgcaggccacgcaatccgccccgatctttgccgttcttcggtggtgtttttgcaaatccataggcaacctccttactgagatgcgcccagtataggggatggacggggctgccgtctgtgataaactcacacagatgtgcggaagtgtacggcctgccgttcggggcggcatctggcgcgggccatttttccgatgacagatgccccatgtaacgcaaaagcgccgcagactgaaaccaatctgcggcgcatgtgtactcagaagttgtagtcaaggatcagccagtccaggtcgttgaaatcctgctcatccagggaccagtagttgtcgtcgcccagggtgatctgcaccaccttgctctgggcctccagatactccgcctcgggcagcttttccaaggtcaggtcgatgaccaggcggcaccactccgcgtcataagcggcgtactcctcatcggtcatggagtccacgtcctggctgtagagagcttcggcgcgggcgtcgggggtgtcgccccacagggcctcggcaacccggtcaaatacgtccagaggctccacagtgactttgacgccgaaggtgctgtcgtccacctccgtggcggtatccacggtgtacttggccttggcgtagacctgcttatacatgtcaactacctcggccttgagttcgtcggtcaggtcgtcgatcaggaaggcggaggcgaaaaagtcagcctcggtctccaggctggacaggtaggtttcctcagcctcattctcggtaatgtcgatcagctccaggaagtcgggatcataaacgcctttgtagttctcgtccagaataccctgaacatacgtggtggcatcgtcggcgctgagaccgccgccgcaggcggaaagggataggacgaaggtgagggacagagcggctgcggtaacacgtttccagattttgcgcataggggttcctcgctttctcttctcttttttgagttccggttctctttattttatatagtacgcgccggggcgcggaccggatggggaacggcctgcggcggaattgccgcagcaaagcccatgggctttgctcaagggggctgaaggcggactcagccgcacaggtcgatgatggcctgggtaaagatcttggcggcggtgagctggtcggcaatgcaggtgtgctcgtcggcgccgtgcatgttgccgttaaaaccgggcatacagcagccgaaagccacgccgccgggaatatcgtggacgtaggtgcctccgccaatggccaggcactcccccttgtagtcggtgtactgctcgtagcacttgagcagggccttgaccagcggggagtcagcgggggtgtggtggggagcgtccatctcgccggagacggaaaagccaaacttggaaaaagatgcctctgcggcggcgcggcagttctcatcgctggcgcagatgggtacccggctgtcaaactggccctccaggccagtaccgttgacggtcagcagggaaaaggccagagtcagcgccccggacagctcatcggactgggcgatgcccagggccttgccggcgcagtcgccgtgggggaagagggcgttgagcgcgtggagggcggcggtggagcccaccttagccaggggaagggagcagagcagatggagcaggccggtgatggcgttgacgccctcctccggcagggaggcgtgggcgcccttgccgcggcagaggatgtgcaggctgtccccctcctcgcgcagctcgtagcgcacgccggtctcggcggcggcccggtcgcaataggggcgggcggcgtcggcggacaggccggccaccaagcactcggcctccggcgggagcacgttgatgcggaagccaccgcggaactcggtcacccggggggtggcggtctccgcgggccaggacttggtgaacaccggcttatagctgcccttctcgatgttgatgagggggaactccgcgtcgggggagaaggcatagggggcgtagggctcccgggcgtagtagtaggcgatgtcgctggaaccgctctcctcgtcggtgcccatcagcaggcgggcgttgcgccggagggggacgcccagctccttcacggccttcatggccagcaggacagcggccacggggcccttgtcatcgtcggtgccccggccgtagagcatgccgtccacctccttgggcacatagggctccgtcactgtccagccggtgccctcgcccaccacgtccaggtggcagagaatgtgaagggcggtctccttgtcgttgagatcagcggtgcccacgtagttatcgtagttgcgggtggcaaagcccagctcttcggccagcttcagaccctccgccagggcggcggcggggccggggccgaagggcatgccaggcaagggctcctcccgcacgctgcgaatgcgtaccagccgggagatggcctccaccagctcagcccggcgctcaggggcgtcaaaataggcgttgattttttcctcgtacatggcgttattcctcctcgctctcctccgcatgggcgccggtcagctcacccaggtatttatagaccgtataccgggagacctggagccgcttggccacaaaaggcaccgacttgcggaaggagaaagcgttcttttggtccagaagggcgatgatcttcatccggtcccgcttgttcagggcgctgaccggcttgccaacggcggccagacactcgtcaaagacatcggccagacggctgtccccgccgtgccacagggcgctctgaaggtcggcctccgcgctcatgaggtccaccagaatgcggttggcgtacaccagggagctgtagtcgaagttgatgccaagggccaggttgtatccctccccgatgaggtggaaggtgctgctcttgatctgctggcccgatggggtggtggcgtagagattgacgaagtcggttaccagagcgtcctcgtccagctccttggcggtgcccaggatgtccagggtggagcccacggtccggccggagacgtgcccgttgtagatggacaggatggggtggcgggggtcccccatgtcgtggaccagggtctcacaggtggagccgaacatctccgcgatgccgcgggccgtccggtccagaaattcaaaggcttcctcacggtccattgccacagctcctttccagcaaacgatcaaccttattctaaccggacgccggggaaaaagcaagatgatttacagatggagcgggaactggtatactgggagaagaaagggggaattgtcacatgtcaatgtcagccgcgcaggccaggcggcaggccgtggcccaggcgctggaggaggccgtggaaccggtgagcgccgccgccttggccgagcgcttctccgtcagccggcagatcatcgtgggcgatgtggccctgctccgggccggagggacggatatcctggccacgccccgggggtatctcctgggcggacggggaggcggcgtggagcgcaccgtggcctgtgttcacgctccggaggagatggagcgggagctcaacgccatcgtggacgccgggggcgaggtggtggacgtaatcgtggagcacccggtttacggccagctcaccggactgctgggggtgcgctcccggtacgacgtggctgagttcgtccggcgggtggaggagcacggagcccgtccgctctcagcattgaccggcggaatccacctgcacacggtccgctgccccgatgagaaaacgttccgcagagtgaggaaatcactggaagctgagaactttttgcttaatatgtgaaatttgacttactaaagtgtgatggtatatattaaatttgacgaaaaagtattgccaaattgtgaatgatggtgtatcataaggtacgaatcctagggttggggaggcttttaggattcgcattaaataagggagggttattatgaactcaccacgcatgagacgctttgggaaactcttgctcgtcgtattcgcccttgcatgtgttcttaccacagccgcattcgcagaaggtgacgctgaggttgtcagcgcggttcacggtaccatcgcgtccctgctgccgcccgtcgtggccatcggcctggcgctgatcaccaaggaagtctactcgtcgctgttcctgggtatcctggttggctgcttcctgcaggtcaacggcaatcccatcgacgcgttccagttctttgtcagccacctgtgctccaatgccggcggcaacatgggtatcctgatgttcctggtcatcctgggcaccatggtggccctgatgatccgggccggcggctccaaggcctacggcgactgggctgtgtcccacatcaagaccaaatccggcgccctgtggtccaccttcatcctggcgattgtgctgggcgtggatgactacttcaacaacctgaccaccggcaacgtgatgcgccctgtggccgacggccaccacatctcccgcgccaagctgtcctacatgtgcgatgccactgcggcgcctgtttgtatcatgatgcccgtctcctcctgggcggcggccgttaccggcgtaatcggcaatgaggaggtcggcttccagatcttcctgcgggccatccccttcaactactacgccatcctgaccctggtgttcatcattgtgatgacctgcctcaacatcgactacggccccatgcgtacccacgagctcaacgccgccaagggtgacctctataccacgcctgagcgtcccttcgccgatgccaaggagatgaaattcaaccccaacggcaaggtcatcgacctggtcattcctgttatcatcctgatcatcggctgcgtgtcctcgatgatctatgtgggcttccagaacggaggccatgacctcatcaccgcctttgccaacacctccgcctttgatgccctgcctctgggctctctgatcgccctgatcatcaacatgatttatttcatggtgcgccgctccatgaagttcaccgaactgatggactgcctgcccgagggcttcaagcagatggtgcccgccatcctgatcctgtgcctggcctggactatcggcgacgtgaccaagggcctcggcgcccccgagttcgtggccggcatcgtggagaacctcagcggcagcctgtatgccctgctgcccgccgtagtgttcatcatcgccgcgttcctgggtttcgccaccggtacctcctggggcaccttctccatcctgctgcccatcgtcatcccggtgttctccggcggtacccctgctgtggatctgaccgtgggtgacctgaacaacaacctgctgatgatctccatcgctgccactttgggcggcgcggttatgggcgaccactgctctcccatctccgacaccacgatcatggcgtcctctggcgctcagtgctaccacctgaaccacgtggccactcagctgccctacgctgtgaccgtcgcggttgtggccttcgtcaactatatcatcaccgcgtttatccaggttcccttcatctgcctgcccatcgccattgtctctatggtgcttgtcatgctggtgatcggcaaggtcaaccactccatgaacgcccactctcagcgcgattaactcttacataacccccccccgctcttggagcgggggggggtttttgcgcagcacatgactttttttacaaaaatttagcgattattctgtcggatattgacaaagtgtgttaagatttgcaaaaatctattgtcaaactgttaacaatcttgtatgatagccctcgagtccttgggttggggagcttttaggattcacaatttcataggagggccattatgaattcaccacgtatgaaacggttcggccaattcctgctggtcattttcgcacttgtatgtgtcctgatgacagcagcatttgccgagggcgacgtggagcataccagctttgtctggggcaccgtcgcatccttgctcccgccggtggcggccatcgtcctggctttgatcaccaaggaagtgtattcgtctttgttcctgggcattatcgtgggctgcttcctgtataccaacggcagccccattgatgcgttccaggattttgtctcccgcctgacatccaatgccggcggcaacatgggcattctgatgttcctggtcattctgggcaccatggtagccctgatgattcgggccggcggctccaaggcctatggcgactgggctgtgagccatatcaagaccaagtccggcgccctgtggtccaccttcatcctggccatcgtgctgggcgtggacgactacttcaataacctgaccaccggtaatgtgatgcggcccgtcaccgacggccaccacatctcccgcgccaagctgtcctatatgtgcgacgccaccgcggcccctgtgtgcattatgatgcccgtctcctcctgggcggcggctgtcaccggtatcatcggcaacgaggaggtgggcttccagatcttcctgaaagccatcccctacaactattacgccattctgaccctggtgttcatcgttgtgatgacctgcctgaatatcgactacggtcccatgcgcaagcatgagaacaacgccgccaagggtgacctctacaccacgcccgaacgcccctttgccggtgtggaagagatgaagttcaatcccaatggcaaggtcattgacctggtactgccggtgcttgtgctggtggggtgctgcgtgggctccatggtctatgtgggctaccagaacggcggcaccgacctcattaccgccttcgccaatacctccgcctttgacgccctgcctctcggatccctggttgccctgatctttaccatgctcttcttcatggtgcgccgggccatgagcttcactgagctgatggactgcctgcccaacggcttcaagcagatggtgcccgccatcctgatcctgtgcctggcctggaccatcggcgatgtgactaaggccctcggcgcccccgagtttgtggcggacctggtgtccaagttcggccccggcctgaagaacttcctgcccgccgtggtgttcctgatcgccgcgttcctgggtttcgctaccggcacctcctggggcaccttcaccatcctgctgcccatcgtcatcccagtgttctccggcggcattcccgctgccgatctgacctcggaactgatcaacggcaacgatatgctgatgatcgccatcgcggccaccctgggcggcgcggttatgggcgaccactgctctcccatctccgacaccacgatcatggcgtcctccggcgcccaatgctaccacctcaaccacgtggcgactcagctgccctacgccatgacggtggccgccgtgtgcttcgcaaactacattctggcatcctttattcagaatgtggttatcaatctggccattgccattgtgtgtatggtagtagtcctgctggtgatcggcaagctgaaccactccatgaaccgccactcccagcgcgactgaaatccgcagagctgatcaaaaatcccccgctccttagagagcgggggattttttgcggcttatttcgcaatccagagcaggttgctgtcggtgacgaagttgggcacgctgtagagcaccagagcctggtcgatgccgttctgggcgatatagtcggcgatggagagcttgtagtagcgcagatccagcaggtggatctcagagaagtggggggtgaggaagggcaccagggagtcggcgtaggagtcccggattatcagcagcctggggccgtcgggattgttggcgttctttacgacgcccaaaggctggttgccgcccaggaacatggagtacttgtccttgacggagaggaaggaggtgtcgtagagctgccggggttcctccaccgggttgcccttgttgtcgtaggtgtgactcgccacggtgatgccgtcgtcgggcacgtaggtagagatggtgtccgggcgcacccaccgcacgccggaggaggagaacacggtgccgtagaactcggtggagcggacggtctcggtgtagtcgttcaggggtacgggggtgtagcccagggcggtggccagtccggtatagccgtagtaagcccccaggctggtccagtggtggtcggtgcggtagaagatgtcctcgcccttgtgctcccacaggggggtgtagaggtcggcccaggacgcaccgggcacggaagccttggcctgctccagaatggcggtctggctggcgttgggggctccggcgggcagccggtcggcccagatgcaggcttgggtggggatcagggagaaggtcacagggatatccacattttccacaaagttgttcacataatccagattattcgtcaccttttccccgtctggctcgtcgaagcgggagatcagggtgtcacctgcggcaaaatagacattgttgttctctttcttgcccaggacacgctcggtggtggacttgagggcgatccagccgtcccgccccacaaactgatcggtggtgtaggtttcgaagtccttcataaactgcccgttcagcagggttttgacactggggacggggagctgctccaggttgcggttctccatctgggagaaggtgcggtcgggcgagacggcattggccaccaggaacaccccgagaaaggcgcagaacagggcggagaggaagatgcagtatttctttgtcatggcttgcctcctgagtcagaatcggaagtagaggaaggggttgtaggtggcgtccaccaggtaggcggtggagaagaccagccctgccagcagcagaatggggaggagcgccagcctgggcttttcgggcaggcgcttccacagcttggcggccagcggggtggaggccacagcggcgatgataagcatggggagaaaagagaaaaaataatacgatacgttgtcgtttgtcaggccgccgcccaggccgaacatggccttgaggtaggctcccatatggccgaagtcctccacggcgaagatggcccagctcaccagtaccagaaacagggtgtataggtgctggagggcggcgggaagcttctggaggagcttgcccaggaaagccttttccaaaatcagcaggacggcgaagtagagtccccagatgaggaagttccagctcgccccgtgccagatgccggtggccgcccacaccaccagaaggttgaaaaacagccggggcttgctcacccggttgcctcccagggggatatagaggtactcccggaaccaggtgccgagggagatgtgccaccgccgccagaactcggtgacggacttggcgatataggggtagttgaagttgcgcatgaactcgaagcccagcatccggcccaggcccacagccatgtcggagtagccggagaagtcgaagtagagctggaaagcgaaagcggccacgcccagccatgccccagcagtggtgagctccccggcggggagggccagaatggtatcccacagcttgccgatgttgttggccagcaggacctttttcgccaggcccaccacgaagatctgcacgccggaggcaaactgctcgggggagtgggtgcggtggtcgatctggtcgcccagatctttgtatttgatgatgggaccggcgatgagctgggggaagagtgtgacgaaggtgccgaagttgacgaggctgcgctgcaccttggcgtcgtcccggtacacgtcgatggtgtagctcatggtctggaaggtgtagaaggagatgccgatgggcaggctcaggcccagcttcggcatgaaggaaaaaccgatggcttggaggctgccggcaacgaagtcccagtacttgaaaaagaacagcagagccagattgaagatgaccgacgaggccaccgcccaccgggccccccggtcgttgcccctgcgcttgtacttctccaccagcattccgtgggtgtagtcgatgccgatggagaggaacatgataaggatatagaccggctctccccaggcgtagaacaccaggttgaccagcaacagcaacaggttccgccatttcaaaggcgtaatatagtacagaaataatacaatggggagatataaaaacaggaaatacaggctggaaaagaccaacgaaccaccaactctcttgtgaacttcagaaaaagcccggcaggttgccctgccgggcgcccttattatacccgcaaaaaattactttgtataggtgttaaatgcggttaccgcctcgtcggcgtactcactgacggcgaagaggatgtagttgccgttggtcaccagcttatagttctgtaccagctccaactgctcaggcaggtactgggaccactgggcctccagatcatcctgccgtttctccacggcggccttcacggtatccatcttgccgtccttcaccttggcgataaagaactcggtggcctgcacattgaccataggcatcttgcagagatagctgtccagatcagcgggatcaatgccgtacagggcggtcagagtggcgtcgtccaggtcggttagggagggaatgtccagcttggagatgtcattccaggtggactgcaccgcgtccacctggggctccggctccaccggctcaggggtaggcgtggaagtcggcttctgcgttggcttgggggtggcggccggggcggagggtttggcgctgggtgcggcggagggagcctgggagggagtctcctccgcggggggcgtggtctcggggagggccgccgggctgtcggtgggcaggacgggggacggggacgcctccggggaggcggagggggactccaccacgggggccgagctctccggggcgggctccttgctgctgccgcagccggccagcaggctcagggacagcgtcccggccagggccagggcgagaaaacgtcggttcatatgggtacgctcctttatttgttttgtggtactcgctctcttggacggcagagggaggaaaaaagttccccagattcgtaaaaaaagagggccggcctctccaagggagaggccggcccttcaggggctttcttttacgccgggcgggtctgctccgcatcttcgtccgcaccgccggcatccagctcggcgacggggagaacgatggtcatgcgggtgcccacgccgggccaggagcgcacctcgaaccagccgccgtggcggtccacgatccacttggcgatggccagccccagcccggtgccgccggtctggcgggcccgggactggtcggtgcggtagaagcggtcgaacacgtggggcaggctgccggcgtcgatgccctggccctcgtcctggacggagaggcgggccatgccgtcccgcagggcggcggacagggtgatgtgccctccggcgggggtgtatttgatggagttgtccaccaggatgcgcagggcctgcttggtcagtcccacgtcggcgcagaccggcacggccccctcccaccgggcggagaaggtgtgggtctggtcgatcatcccggtctccttgagcacctcggcggccacctcggtcaagtcgaaggtctccatctcaatgtgcatggagtcgttgtccccccgggccaggaagagaagctgctccaccagctccttcatggagtcggcctcctgccggatggcgtcgatggcctcttggcgggtggcggggtcgtccttgccccagcggttgagcaggttggcgtagccctggatcaccgcgatgggggtgcgcagctcatggctggcgtcggagacgaagcgcatctgggagcggtaggcctcgttgatgcggtccagcatggcgttgatggcctgggccagggttttcagctccttctgggtgccgggcaggtcgatgcgccggtccagatgggtggcgttgatctcgtccagcttgcccgccagggccttcagctcctccggcgacatgcgctccacctggttgagcttggcggcggtggcggccagctcctggatggggcggagtaccttcttaatggagccggcgttcttgaacaggttggtcaccaggctggccaactggcagatgaacaacacccgggcggcaaagacgaagatggctgcgggctgggtcagatccagccggatggcgtagggctcgtcccccggcatctggagggtgtagctggtggagtcgccggaggagaaggtgaccagcagaaggagatccaccgtgccggggttgaagtagcgcacgccgccccgggtctcctccggcgagggcagccagccgggcaggcggaggccgtccgcctccggcgtgccggcggtgacggtgtaatcccctgccgtcatccactccgtggcctccgccgaggggacgccccgctcctccaccagagtgctgatctgggccgcctgctgctccgaccagacgaacaggccgccgcagaacaggaacagcagcagcagatccatggtgaaatagatgcccagcagccggaaaaagaggcgtgtgttgagccgggccacgatggaggacttgatgcgccccggcgggcgcttgttcgctctgtgtgccatgggaactccctcctcctaatccccgtccagccaggccagcacgggcgccagacgctccggggaaacccagtcgcccccgtcccggaaggcgtcccgcatggcccggtcggcctccgtctccgccggggccctggacaccagccgggccatgggggccatcatggcgcggtagaagccggtgagcttctccggggcgtagccgccccggaggtagaacaggggaacgccctccagccggttgtcccggcgcagcttggcctcctccacctccgccgccatgcccacggcgcacaccgccgccgtccggaagcggcggcgggcccccttcaggcccttgatccccccagcgcacagccagcccaggtagataaccgccgtcccccggggcagggcggcggcctccttcagcgggcggcagggcaggccggtgcgctccgccagcagggcggcgtaccgggcggtgaagccggtctggctggtgtagacgatggcggccgcgttcattgtccttcctcccgaatcacatagcccacgccgcggacggtgtggatgagcttgataccgaagtgctcgtcgattttggcccgcagaaagcggatgtatacgtccactgcgttggtctcccccacgaagtcgaagccccacacatggtccagcagggactcccgggagatgacccgctccttgttctccagcaggtagcgcagcagatcgaactcccggcgggtgagctccaccccctcgccattcacgctcacctcgtgccggtcggtgtccatggtgaggggaccggcggtgagcaggctccggggcggctccgcggcctgggcggggcgcttgcgcagggccgcccggatgcgggccagcagctcctcgatggcaaagggcttggtaatgtagtcgtccgcccccatgtccaggccggacaccttatccaccacggtgtcccgggcagtgagcatgatgacgggcatggcgctctcccgccgcaggcggcgcagcacctccatgccggacagggcgggcagcatgatgtccagcagcaccaggtcgaactcccccgacagggcccggtccagcccggcgcgcccgtcgaaggccttctccacctcgtacccctcgtattggagctccagctccaccatgcgggccagcttctcctcgtcctccaccaacaggattctctctgccatctctctcgctccttacttgccttttttccccctggatttgtcgaattcccgcttgaattcgtcccgtacctggcccaccgcgtcccccaccttggcggacacctggttgaccacctcgcccacccggtttttgtccagatccgggccggaaaagcggtatttacagccgaagaacaggcccaccaccagcaagggcagggagatccagtaggccaccagcaccagcaggatcaggatcagcacgggcagggcggtcatccgctccccgttgcgccacacctcaaactggttgaccgtgcagtggcgcagcagatccaccgccgccgccagcagctcccgcaggcgggcgcgccagctcccccgctcctcccggccgcggtggccgcccgcggtcacggccagcccccagaaccgcttctcgtccttcccggacgcctccggcccccgggtgggcccggagggcggcggctccggggcggcaccgggctgggtggtaaaaaaagcgccccgcccgccgcccggcggaatccggccctcccgctccagcaggatcagggcgtccagcagatcgccgtcacaggcctccagggcccgccgggcctcctcataggagactgccgcgtgcgcgcggagttgttccacctgttccaaagtcactgacatagaggccgccaccctttcaacggttttgtgattacagtatacccaagccgcggggcggatggaattgatctttccttaaaaacacattaaattgggttccgggcaacatcataccacgccgggcccgctggtgcaagctgccgctttacccggctggggtttcatgatataataaccgcaaagcggcggttatacctgacgcggtccgcctgctcccgccttggggcgggactgcgaaatccggcgtcatgcggccattccgccgggcttcatggcggaatgacgagaaaggaacggcttttgccgggaagggaggggcgccatgcgccgcatccagaaatatctgtccggcctgtgtgcggcggcgctgctcctgagcctcctgctggccgggacggccaaggcggatgagatcaccatctatctgatggcggagaacgaccagatgctggacctgcccctgtctgccatgcccgcctggatcaacggagacatatatgtgccctacaccgccttcgactggacggtgacgggggtgaacctgggagtctcctacgggcaggagcggacagagactgagtacaagtttaccctctacagcctgaacggcatgcttgtgtttgacctgaacgcgggcacctgcaccgacggcttctccggagaggcgaaggacatgcgtgccgcgctgcgcaacgggcgggtgtttgtccccctggccggggtgtgcagcttttttggcctgaattacacctatacccccaccaactacggcaccctgatccgtatcacaaacgggcaggagcggctggacacccagcagtttgttacatcggccagcgggctgtctatgcccacccgctactataagtacctccaggagctgaaccagggcacccagcccacgcccagcccgtcccccacgccatcgggcggcggcacggacgagccggagcaggaggacggtctgccggtctacctgtccttccagtgcaccggcggcggggcgctggacaacattttggacaccctggaggcacgcggcatccgggccctgttcctctttacgccggatgccttggcggcggcggaaggtcagctccgccggctggtgggctcgggccacgcggtgggcctgtccgtcccgggccagagcctggatggggcgcgggcggcgttggaggagggggccggcctgttggagcagttggtccgtgtgcggccccataccgtatatctggagggggcggcctccggcgtggcggatgcgctggagcgggagggctgggcctgctggtcggccaacgtggacggccggcccgacggccgaagccagagcacccaggccaacgccctgctgcgcactctggaaggacggcgcagcgcggcccgcatgttgctggacgacagcggagagagcgccggcatcctgtcccggctgttgccccgcatgccgcgggacgcgtactggttccaactggcgctggatacacggatctgagagaattggagcacatacaggcgggcggagcttgtccgcccgcctgttttgaggaggaggagtcacacatgcgcaccgtatatctggacaacgcggccacctcttaccccaaggcaccgggggtgggggcggccatggcggactacattgagcgtgtgggctgcaacatcggccggggcggctaccagcggacctatgacgcggccgagggggtgctggaggtgcgggagcggctctgtaccctggtgaacggtcccgggccgcgcaatgtggcgttcacctccggggccacccacgggctgaatctgctgctcaagggactgctgcggcccggcgaccgggtcgtgacctcccccatggagcacaacgccgtcctgcgccccctccgacagttggagcgggcgggggtggaggtggagtacctgccctgcacggagcggggggagctggtgacggagaatctggcagagcggctgacgcccggcgtccgggcggtggtgctcacccacgcctccaacgtgtcgggcacccggttccccatcggcgcggtgggggccctgtgccgggcgcggggcatcttcttcctggtggacgcggcccagactctgggcgtcctgccggtggacatgggggccatgggcatcgacggcctggcttttccaggccacaagggcctgctggggccccagggcatcggcggcgtggtggtcagcgatgccctggcgtcggagctggagcccctcctcgccggcggcacgggcagccaatccgagtcgctggacatgccccctttcctgcccgaccggctggaggcgggcacgctgaatctgccggggatcttcggcctgggggctgccctggactacctggaccgggagggggaggccctgcgggcgcgggagcggaagctggcgggccacctgtgggcccggctgatggagctggaggaggacggcctgcgggtgctgggctctgacgacccggtaaaccgggtgggggtggtgtctgtggactttctctgcgccgacaacgccgagatgaccttccggctggagcgggagtacggcatccagacccgctgcggcctccactgcgccccgctggcccacaagaccctgggcacctttccccagggggcggtgcgcttctccgtggggccgtttaccacctttgaggagctggactacgtccacggcgcggtgtacgacctgctgctggaggtgggcaaccaatagttgcggccatgaaacccggaagcggtggcggcccaggcccgtctctgctattctgaacggcgaggaggagtgcccatgaatctggagattgcaaaccgcctgctggccctgcgccgggagcacggctattcccaggaggagctggcgtacaagctgggggtcagccgccaggcggtgtccaagtgggagagggcggagtcctctccagacacggacaacctgctcgccctggcccggctctacggcgtgtccctggacgcgctgctgctccacaccccggcgggggaggcggcccaggccgcgccggagccggaggaggccccggcggacgaggacgcggagatttttgccgccgcccgggcatgggacgctgcggaggaggcggagcagaaggcccggaagcgggcgcgggccaagtggaaggaggggctgctgtggctgctcaccctggcgctgatggtgattctgcccaacctgacctactggcttggcatctcggaggtctatgccgtggtggtcacggtggcttttttgatcaccggcttcctgctggacaactggcacccgggctggatgctgtttctcaccattccgctctactatgtactgatcttcggacgttaaaaatggagttcccgcagggcgggaactccattttttgcactttactggtggataaccgtgccggttctgcctgccacgccgtccttggccttctccagaagggtgatcagggcggtgcggccgggggcgctctcggcgaattccacggcagcctgcaccttgggcagcatggagccgggggcgaagtggccccgttccatgtagaccttggcctcggcgggggtcaggctgtccagccaggtctggttgggcttgccgaagttaatggccaccttctccacggcggtgaggatgatgagggtatcggcgttgacctgctgggccagcacgcaggaggcgaagtccttgtcgatgaccgccgccgcgcccttgaggtggtggccttcggtcttatagaccgggatgccgccgccgccgcaggccaccaccaccagtccggcgtccaccatgtcgcggatggactcaatctcgatgatggactggggcttgggagaggccaccacacggcggtagccccggcccgcgtcctcaatgacgttatagccccgctcagccaccattttgtcggcctcctccttggtcatgaaggcgccgatgggcttggtggggttctgaaaagccgggtcgtcccggtttacttccacctgggtcagcacggtggccacgcccttggagatgccgcggtccagcagttcctcccgcagcgcattctggagatcatagccgatatacccctggctcatggccacacagacggagagggggcaggggatgtacttctccggctccgagcgggtcagctcggccatggccttctgaatcatgcccacctgggggccgttgccgtgggcgatgatgacctcgtggccctcctcgatcagatccacgatggccctggcggtctgcttcaccgcgatcatctgctccggcagattgttgcccagggcatttccgcccagggcgatgacaacgcgtttacccataaaaagcacctcattcaagataaagaaaagtcaaaaggagaggggcggaaatgcccacgcgccgggaggcgcgtacaagcgttttgcccgaagggcaaaaccttggcgcaggcggaattcagttccgccgagcaagtaaaaacagaagggggcccccagggcggcgtgccgtcctggggcgttttccgcccagggcgatgacgacacgtttacccatgaatagcacctcattcaaaataagaaaagtcgaaaggagagggggcggaaatgcctacgcgccgggaggcgcgtacaagcgttttgcccggagggcaaaaccttggcgcaggcggaattcagtaggggcgcacctgtgtgtgcaccctgcctgttccgcgggccgccgggccgatgagggcatcggcccctacggaatacggaggggcgggcggccgcaaggggcatccctgcctgtgtgcccgcgccgaaaaagacggggcccgcccgcagaataccggagtacctgtatttgcgggcgggccggagcgcctgggcgggggaaatttgcagattttacttctggaaccagcgggccaggccgcgctcctccagggccttcagggtggcctggggatccttcaccttggccaggaagatcatggcggcgatgatatagggcttgaaggaggcctccttgtagagaggatcgcggtagcggtcaaacacgctggcttccacctcgccgtccacgcaggagacgtcgttgatgtcggcgggcaggcagtgcaggtacagggccttgccgtcgcgggtggtcttcatcagctcctcggtgcagcaccagtccttgtgggtggcgttctgggccagcagctccttctccagggccttgatgccctcgctgtcgccctcggcgtacaggttggtgcgcttctccatggcggcgaagggggcccagctcttgggatagacgatgtcggcgtcctggaaggcctcggccatggagtgggtcttggtgaaggtgccgccgctcttctgggcgttggcacgggccacctcctccacttcgggcataacctcgtagccctcggggtgggccagcaccacgtccatgccgaagcggctcatcaggccgatgacgccctggggcacggagaggggtttgccgtagctgggggagtaggcccaggtcatggcgatcttcttgcccttcaggttctccacgccgccgaagtggtggatgatgtgcagcatgtcagccatggcctgggtggggtggtcgatgtcgcactggaggttgaccagggtgggcttctgctccagcacgccgtccttgtggccctgggtcacggcgtccatgaactcgtgcatgtaggcgttgcccttgccgatgtacatgtcgtcgcggatgccgatgacgtcggccatgaaggacaccatgttggcggtctcgcggacggtctcgccgtgggcgatctggctcttgccctcgtccagatcctgcacctccaggcccagcaggttgcaggcggaggcgaaggagaagcgggtgcgggtggagttgtcgcggaacagggagatacccaggccggactcgaaaatcttggtggagatgttgtgctcgcgcatgtagcgcagggcgtcggcgatggtgaagacggcctcgagctcgtcgtcggtcttttcccaggtcaggaagaagtcgccctcgtacatctccttgaagttgagcttgttgagtttgtcaatatagttctgaaggttttccatagcggcaatctccttttcttttttcttgtggggtaggggcggcccttgtggccgtccgcgggcggggacaagccccgcccctacgggcgcgcttcttactgaatgttattattggtcttgcccgcgcggaactgggacacgtcggcggtcttgttctcctccttgtagttgccgggcacggcggcgtacagggcggcgcaggtgaccagatccatcttccaggtgatctcgttgggggcgtgagcctggctctcggcgccggggccgaagcccacgcaggggatgccgtagcggccctggatggccacgccgttggtggagaaggtccacttgtcggtgagggggcggccgtcccgcaggtgcatggcgtcccgcttggcctcggcgtcggcgtggccgatgcgcttgtcgccccagagggcgtggtgggcgtccaccagggcctggacgtgggcggcgttctccttgttgatccaggtggggaagtagcactcggtctcgtacacctcgccggtccaggagggccggtcatacatatacatggacacctgtacgtcgtcgccgtacttcttcacgctgggcagatcgcggatctcctggaggcaggagtcccaggtctcgccggcggtcatgcggcggtcgatggagatggagcaggagtcggccacggcgcagcggctgggggaggtgtagaagatctgggaggtggtgcaggtgccccggcccaggaagcgggcatcctcaaagtgctcggggttgtacttgggatccagcatcttcaccaggcccttgatctccacggtctcgtcggcggggttctcgttgagggcgcgcacgtcctggaggatgtcggccatcttgtagatggcgttgtcgccccgctccggggcggagccgtggcaggagacgcccttcacgtccacgcggatctccatgcggccccggtggccccggtagatgccgccgtcggtgggctcggtggacaccacgaactccacctgctccttgcggatgcccttggcggggaagaacttgttgacgatgtactgccagcacatgccgtcgcagtcctcctcctgcacggagcccaccaccatgattttatagccggcgggaatgaggcccagatccttcatgatcttggcgccgtaggtggcggcggccatgccgccctcctggtcggagccgccgcggccgaagatcaccgcgtcgtcctcgtagccctggtagggatcggcctcccagttgttgatgttgccgatgcccacggtgtcgatgtgggagtcgaaggcgatgatcttgtcgccctcacccatccagccgatgacgttgcccaggccgtccacttccaccgcgtcatagcccagcttctccatctcggccttgatgcaggccaccacttccttctcctcgcagctctcgctggggtgggagatcatcgcccgcagaaagcgggtcatatcggccttgtagccctcggctgccttcttgatctgctcgtaatccatgttcgtttccctccatcattgatccacaggtggttgtattttcttaaaagccttacagagtgcgcgccgcaggcgtgcagtttgttcgttccggggacatgtgccccggaacgaactccgctcagcccgcaagtgtgggtgctgagcgctttcagcggtcagcacctgcgcgcggcgggctgtatctcatcccagaagcggctttgccgcttttgggatgaattaaacggtgggatattcaccgtcccacagcaccttgcggaacttcatggggtcggtgttgccctcggtggagaacatgagcacctggctgaagcggtctaggccgatggcctcccggagctccttgtattcatcggtctccatgatggcggcgatgaggcccatgcccaccgcgccggactcgccggagatcaccaccggatcgcccttgacggggacgcccagcatccgcatgccccgggcgctcacccagtcggggcaggagacaaaggcggtggcgtggttgcgcaggatatcccaggagatggtgttgggctcgccgcaggccaggccggccatgatggtctggaggtcgccgtccacgatgcggggggcgccgtcgccggccagggcgccccggtagaggcagtcggccgcctgggcctccatgacgatgaacttgggcgggtcgttggggaacaggttggtgaagtagcccaccaccgcgccggccagggagcccacgcccgcttgcacaaacacgtgggagggacggttgacgccgagctggcggagctgctcggcggcctcgctggccatggtgccgtagccctgcatgatccaggaggggatctcctcatagccctcccaggcggtatcctggacgatcacgccgtgctcggtctgggcggcctcggcggcggccatgcggacgcagtcgtcgtagttgacctcctcaatggtgacggcggcgccctccttggcaatgttgtcgtaacggggcttggaactgcccttgggcatatgtactacggccttctgccccagcttgttggccgcccacgccacgccgcggccgtggttgccgtcggtggcggtgaagaaggtggcctggccgaactccttgcggaaggcctcgctggtcaggtagtcgtaggtcatctcggacacgtcccggcccatctccttggcgatgtacttggccatggcgaaggagccgcccagcaccttgaaggcgttcaggccaaagcggaaggactcgtttttgacgcacaggccagccagccccaggtattgggccatgccgtccagccggtccaggggggtgacggagtactgggggaaggtgctgtggaaaaagcgggccttggccacgttggagagcgacatgatgggcagctgccggtcgtcgctcttgggcatggtgttgaggacccatttgatctggtctttcattgggacggtcgcctccaaattattttgaagttgcacttactttttgttttacgagaccatcataccacgtcccgttcagatgtcaagaggatattctaaaaaaaatggtgtaatactaaaaaatttttagcatccataaaaatgcgcctgaaacataagggaaaaacaggaaagcgggaccccggacggacggccgccgggaccccgcggaaggtcagggggcggccttcttggctggctttttgtagaaggtgtcctgcatgggcaggctggtgcgcaggatgtggtcacgggcgtagtaggccccctggaccgccggagcggtggggatggtggcgatctcgccgatgcccttggccccgtaagcgaaggggagcagctcctccttctccacatagatggcgtggatgtcggggatctggtcggcccgcatcagccccagggtgccgaatttggcctggggcacgcagtccttgagggggaagtcctcggtgagggcgtagcccaggcccatgagcacgcccccctcgatctgcccctggatggaggtggggttgaccaccttgcccgagtcgtgggcagcgtagacctccttcacccggccctcgccgtccagaatcaccacatgggtggcgaagccgtaggccacgtggctcttgggattgggcttgtcggcccccagcttgtcggtgggatcgaaaaactcggcgctgtactccagcccctccagggcggacaagtccccgcccgccccgtccagatcggccctgagctcggcggcggccatgcgcaccgcctcgcctgtgatcagggtctggcgggaaccggaggtggtgcctgagtcgggggccacctccgagttggcccccatgttgcggagcttttccaggggcaggccggtggcctcggccagcatctggaggaacacggtggcgcagccctggccgatgtcggaggccgcggagtacagctccaccaccccgttgcgcaccgccagcttgcaccggcccttgtcgggcaggcccacgcccacgccggagttcttcatggcgcaggcgatgccggcgtgatccgcgttttgctcgtagacgtccttcaccgccagcagggtctccttgagggcggtggagcagtcggcgatctggccgttggggagggccttccccggctcgatggcgttgcggaagcggatctcccagggggagatgcccacttttaccgccagcaggttgatgttggactccagggcgaactcgctctggcacacgccgaagccccggaaggccccggcgggggggttattggtgtaccagccgaagccgcggatgtcggtgttctggtagcagtaggggcccaccgagtgggtgcaggcccgctccagcaccggcccgcacagggaggcgtaggccccggtgtcgaagtggatctcgcagtccaggccggtgaagatgccgttctcgtcgcagcccagggtgaaggtgccctccatatagtggcgctttgggtggaaggcgatggactcctgccgggagagcttcgccttcaccgggcggcccaccttgagggcggccagcaccgccaggtgctgcaccgacacgtcctccttgccgccgaagccgccccccaccagcttgttctccaccacgatgcgctcgggctcccaccccagcatgatggagatctccttgcgggtgtcgtacaccccctggtcggaggtatagacctttaccccgtccttgtaggggaaggccacggcgcactccggctccaggaaggcgtgctcggtgaatggggtgcggtaggactgggtgaccacatacttggactgggccagggcggccctggcgtcgccccgggtgacgtggcgctgctggcacaggttgccgccggggtggaggctgggggcgtccgccgccctggcctcctggatggtgcgtaccggctccaggggctcatagtccaccttcaccagctccttggcctgcttgagcacggcctcgctctccgccaccaccaggcagacggcgtcccccacgcagcgggtgatgtcccccttggcgatcatcacgtcccagtcctgctggaggtggcccaccttgttgtggggcacgtcgtcggcggtgaggacggccagcacccccggcagagccagggcggcggaggggtcgatgtccagcaccctggctcgggggtactgggagcggacggcggaggcgtgcgccatgccgtccaggtacagatcgtcgcagtactccccccggcccagcaccttgtcgcgcacgtcggtgcggaaggcccgcgcccccacgccgtagtcctccccctcctccagggcgggatcgacggacgcctccccgcggaggatggccccggccagggcaatgccctcgatgattttcttgtagccggtgcagcggcacacgttgccccggatggcctttttgatctccgcctcggaggggttggggttctgatccagcagggccttgcccgccattaccatgccggggatgcagaagccgcactgaaccgcgcccaccgcgccgaaggcgtagacgaaggcctcccgctcggcctccgagaggccctccaccgtcacgatctccttgcctgcggcccgcttggtggacaggacgcaggccttgacggccttgccgtccaccaggatggtgcaggtgccgcaggcgccctcgctgcacccgtccttcaccgaggtcaggcgcagctcgtcccgcaggtagcgcagcagaggcttctcctcctccgtggagcaggggacgccgttgaccacaaaggaataacactcactcatggcaggttcctcatttcctgattcagattccatgggcgtgcggaaagccccagcgaaaggctgaggctcaccgccgccggattatcccagcagataggcgtagttttcgtataccgcgcagatcaggcggcgcagggggtcgtacaggccgcaggcggcgtcggacacgtcgtagtcggccacctggccgcccaggcgcacccgggttctgccgtcctccaggcggaggaagccctcgttccggctgttctcgaagtcgtccgcgcgccagaacagggtgaacttgtcctgataggggcggctgtcataggggcagaaggtggcgcagttgccgcactcgttgcacatgccgtccacgtggatgatctggcgctggcgcatgccgggcacccacaccgccacattggcccggttggggcacacctcggtgcaggtctcgcacacggtggcgcagcccaggcagcggctgtcctcacaggaggcgcagtcggtgcacacgtcgccccgcttggccaggggcttctgatagtcggggttcacgttctgctccacccaggcgtccgcgtcgaaggggtggatggcctgggccgcccgggcggcgccggcgatggcctccaccacggtgccggggcccttctggccgtcgcccaccacaaagacgtgcttgacggaggactccagggtatccgggttgaccacggcgcggccccgttgatccacagaaaggccgttggcggtgtaaagctccgtgtccaccttctcgcccacggcggtgatcaccgtgtcggcgggcacctccgccgtccggccggtgtccacgggggagcggcggccggtggcgtcgggggcgcccagctccatcaccctgcaggtgagcacgccgtcccggacgcccacgggggcgagcagctcccggaactccacgccgtcggccagggccagctccagctcctcctggtcggcgggcatatagcggcgggttctgcggtacaccagggagacggtctccacgccggggaggcgcttggcggcccgggcggcgtccatggcggtgttgccgccgccgatgaccaccacatgccggcccaggttcagggtatcgggggccttcttggcggcctccaggaactcgatgacgttgtgctcctcgccgtactccagcccggcgctgcccttctgccacgcgccggtggccaggatcacatgggtgaagccctgggcgaagagctcctgtacatccttcacctcggtgttgagctccacctttacccccatggcctccatgaggcgcacgtcgttgtcgatggcctcgtcatggatgcggaacgcggggatcacgtggcgcacgatgccgcccagggcgtcccggcgctcgaagacggtgacgtccacgccggagcggcccaggaagtaggcggcggacatgccgccggggccgccgcccaccacggccaccctccggcccgcggcgggggcggcggggtgcagcttgggcagcagggcctcaaacccgccctcggcggccttcagcttctgggcgcggatgtagacgctctcgtcgtaggcgttacgcatgcacttgtcctggcagcggtgggagcagatggtgccggtgatgaagggcagggcgttgcgctgggtgatgatgcgcagagcctcctcgtacttgccctcgcccaccttcatcagataggcggggatgtcctgctcgatggggcagccggagcggcagggggcggagaagcagtcgatgaggggcacctttttgtccagcttgcggctggggatgggcttcatgggcttttgatagtggccgtcggcggggatgccctccgccagggcggccgccctggccgcgtccaccccctcccagggggcgtaggagatatccagcagcgcccggccgatctggctgaaccgctggtagccgccgggcttgaggacggtggtggccatggtgatgggccagatgcccgcgtcaaagagggcccgcaccgagtgaatgtccgcgccgccggaataggagatgcgcagcttgcccttgaactccctggccagccgggccgccagggacagggacagggggtagagggagcggccggacatgtacatctcctcgctgggcagctcgccggcggccacgtccacggggaaggtgttggtgatcttcacgccgaactccaggccccgttcgccggtgcgctgcatcagccggtggaacatgggcaccgcgtcctcccactggagatcctcgcggaagtggtggtcgtcaaactggatgtagtcgtagcccaggccgtccagggtcttgcgggcgaactcatagcccagcagggtggggttgcacttgacgtaggtgttcaggttcttttcggtgatgaggtaggtggcgatgcgctcgatctcgtcgggggggcagccgtggagggtggactcggtgatggagttggacacgtggggggtaatgccccggacataggcctcgtccaccttctcaaaccggtccagattggccagggtccagtccatgcactcccgccacacctcggtgccggaggcgtccttcatcccctcgatgtaggcgtccaccttgggactctggatgcccttgagatcgtagcccacgctcatgttgaacacaaagccgtcgggatcgcccagttccagctcctttgccagcagcttgcaggcgaaccacgccttgacgtactcggcgaaggcctgggggacgtacagctcggtggaccactcgcagttgtagcactcgtccgcggcggtgatgcagggtttgctgacgcacttggacagctcctcgccgtccatcacctgcacggtcttgacctcaaagaagcggctgcccgcggcgtaggccgcgatgatgttctgggccaactgggtgtgagggccggcggcggggccgtagggggactcgatcttctcctcaaagatgggcagggacttcccgtcggcgtggcgcaccagcttggacacgccgaacacggagccctgggcgcggtactcgctcagaatccagttcatcagatgggcaaagggcatgggtctcataatatcgctcataacggatggcctcccaaatatgattcagatgtgttcagactggcgggcggccacaagggccgcccctacgtccggcgcttacggtaggggcggcccttgtggccgcccgcgctcccgtcaatcggtgcggtggttgagttcgccccacagcttcttggactgctccatgca

SEQ ID NO: 4318 - DNA, 32628 bp, Unknown
  gut microbiota DNA sequence
cccaatggggggcaagagaggctgccctgggacgtcggcccctacgaaaaagggcgcggccaaccggcggattgccgccgggaccgcgctcaaaatgaaagttaaatataaatatattgcaagactgttcgacaaatcactcagggcttccgcatgttctccaccacggccgttaccgcctctaactgcgcatcgctcaactgtaccaattcatccatgagatgccggagtttttcaggggcccgctgtccatcgtcgaaaaactctttgggtgtaatgccgaagtatttgcagatataataaagcccgctgagggagggcagagactgcccggtttcaattttattgatatagccggcgctctgcccgatggcatagcttaatttacgagcagaaatcttttggggcagacccatatgaagggcgaccacacggtcacgcacgaacgcttcaaactcctcaattgtctccatgtgatcacctcctcttattgaattattttactgcttaatcttgacgaattgagcccttatattatatatttttaaaagagcaaataattataaagcttaaaataagagaaacaaatcatttaaaggtttataggagggaaatcatgtcgtattgtgctaaaattccagaggaaaatcaggcggcggcgctgctgcactatctgggcatcagccggacccggaagggctattggtatatccggtggattttggagtgggggcggcaggaggagatggacgaagcgcggttttatacccggctggtccgccggtgcaaggtcccccgccttcagatggcgagggatatgtaccgcgcgcagcgccgggtggacaccctgcggaactacctggaggaggcagaatccgtccaggccggggtgtgggcgctgctgtgcgttctctcccggtggctgaaccgctacgaggcagagctgccggagggggtcatgggcggcatgggctggcgtctgcgggggccggaggggctgtgcgcaaaatagccccttttcctccggcctttcttggagtatactgggagaaagggggaaaactgcgatgcttgattttcggatggataccttcctggcggtgtgccgccaccggaactacacgcgggcggcggaggagctgaacatcacccagcctgcggtgacccagcatatccagtatctccagagctactacggcgtcaagctgttctcctatcaaaacaagcgcctcgcgctgaccgaggagggggagctgctgcgcaatgccgcgctgtgcatgctccacgacgaggagaagctgaaacgggatgtgaaggatctgcgcctggggcggcgctccatccgcttcggggccaccctgaccatcggggaatacctgctgccggagcggctggccgcctatatgaagcgcaatccccgcgtggatgtccacatgctggtggaaaacacccagattctgctgcggatgatcaatgacggcgagctggacttcgccgtggtggagggctacttccgcaagagcgagtacgactacatcatctggtcccaggagccctatgtctgcgtgtgcgcggcggctcaccccctggcccaggcggccccccggcccctcagcgccctgttcggggagaacctcatcctgcgcaaccagggctccggctcccgggatgtattggagcgggtgctggaggagcgcaaccaccacgtgggcgatttccgccacattgtggaaatcagcgacctgttcgtcatcaaggagctggtcaaggccgactgcggcatcaccttcctctaccgcaaggcggtggagaaggagctggccgagggctcgctctgccaggtagccctcacggacttccagatctcccatgagttcaccttcctctggcggaagaacagcgcctttgaggcggagctgcgggagacctcccgggccctgtggacactataaaaagcgcagccgctttgcggctgcgctttttacggtcacgccatgtcgcctgcaaaaattttgggcacgtcttatccaacagaacggggaaattcgttaaaagtttggcaatttcgagcccttttgccggagaaataaaaaataattatagcagcataacaatttaaaagttttcaccgccgcggcccgggtggtatgtttaaggagaacttaactcaattaggagggattcagcatgggttactcgctgaacgccgtacaggcagaggccgttttgcaggcgctcaaacagaactacagcgtctatgccccgaagcgcttccccaagcagggccgctactcggatacggatgtcatcaagtacgcggaagtagagcactatgaggacatcgtgtggcaggtcaagtccgattacccggccaaggaggttcttacccctatccagcaggccatcttctacttcacagaggatgagtaccgcgccagcaagggccccaagaagcccatcctgattctggcccgcccctgcgacatcaacgcccagcatgtgcaggcgaagatctacgcgggcaacggcggctatacggatctctattatgagcggatgcgggagaaggtcaaattcgctctgatggagtgcaacggcggcgacgacacctgcttctgcgtgtccatgggcaccaacaagaccgacgactactccctggccctgaagttctccgacgagggcgtgcaggttcaggtgaccgacgagacgttcgccccctacttcgaggggatgccccaggccggctacacccccgcctttgtggaggagaacgagctgaaggtcaccgtccccgatctggacgacaaggcggtgcgcctggccctcaagagccatcccatgtggaaggagtttgacggccgctgcatctcctgcggcgcctgtaccgtggcctgctccacctgcacctgcttcaccacccgcgacgtcatctacggcgacaaccccgaggtgggcgagcgccgccgcgtcaccgcctcctgccagatcgccggcttcgaccagatggccggccagcgggagttccgctccactgccggcgagcggatgcgctacaaggtgctccacaagttccacgactacaaggcccgcttcggcgagggccacatgtgcgtgggctgcggccggtgcacccaccgctgcccggagctcatctccatttccgccaccgttaacaaggtcaacgccgccgtgaacgagatcaaggccggcctggcccagcagtaagaaggaggggaacgaaatgacgaatccggttcagcctcaggcctgtgaaatcctgagcgtgaagaaagagagccgccatgagtggaccttccgcgtggccaccgacgcgaagcccgcccacggccagttcatgcagctctccatccccatgatcggcgaggcccccatctccgtgtccgcccagggcgacgggtggctggagttcaccatccgctccgtgggtaaggtcaccaacgtgatctttgagaaggaggcgggggataccctcttcctccgcggcccctacggcaagggctggcccgtggagcagttccggggcaagcacctggtggtcatcaccggcggcaccggcctggcccccgtccgctccatgctcaacatgctggcggcggaccccggctttgccaagtccgtgcacctcatctccggcttcaagaatgaggacggcatcgtgttccacagcgagctggaggcctggaaggagaaattctccaccatctatgccctggacaacgacgccaaggagggctggcgcaccggcctggtcaccacctttgtcaaggagatccccttcgactccttcgacggcgactacgccgttgtggtggtgggtccccctcccatgatgaagttcaccggcctggagctgatgaacaacggcgtggacgccgaaaaggtgtggatgagcttcgagcgcaagatgtcctgcgccgtgggcaagtgcggccactgccgcatcgacgaggtatacgtgtgcctggacggccccgtgttcccctacacggtggcccgggatctggtggactgaggaaggagcgtgtgaaggatgaatcatgatatcaatgtcaagaagatgcgcctgaactgcttccggcagtccaaggtgcccggcgagttcatgctccagatgcgcgtgcccggcggtatggtggacgccaagtacctcagctatgtggagcacatcgccaacacctggggcgacggcaacttccacttcggcacccgccagaccttcgacatcaccggcatcaagtatgagaacatccccgcggtgaacgagtatctggagcagtacatcaaagaggtggacgccgagctgtgcggcgtcaacatggacaccgtggcccacgagccccagccctgggaccccaaggccggctaccccaccatcggcgcccgcaacatcaccgcctgcgtgggcaactaccactgcatctgcggcaactgcaacaccttcgagctggcccggaagatcgagcccatcatcttccccagccattaccatatcaaaatcaacatcgccggctgccccaacgactgcaacaaggcccacctgtgcgacttcggcatcatcggcgtggcccgcatgacctatcaccccgagcggtgcatcggctgcggcgcctgtgtccgcgcctgtgagcacggcgccacccgggtgctctccctcaacgagggcaccggcaagatcgagaaggacccctgctgctgcgtgggctgcggcgagtgcgtcaaggcctgtcccacctccgcctggacccgccaggagaccaagttctaccgggtgatcctgggcggccgcaccggccgccagactccccgcaccggcaagatgttcctcaactgggccaccgaggacgtggtgcttggcgtgctcaagaactggcagaagttctccgcctgggtcatggactacaagcccgagtacctccacggcggacacctcattgaccgcgccgggtacaagaagttcaaggagatcatcctggacggggtggagctcaaccccgagtgcctggtggccgaggacatcttctggcacgagaccgagtaccgctccaacttcaacgtcaagcccgtggccatgcaccacaaggccggccctcaggcttaatccccccaatcctatcccaaacagcaggagaggctgccgcatccgcggcagcctctccttttggttacaggcgggcggtgagctcgtcggtgatggcctgggccgtctggtagacccggtcgaagtccacgtgggggttgtagaggccctccagctcgtcgtgcatggctttggcctgggccagggagtccacggcctcctccaccagggcggcggaaaccttgcgggagaacttgagccgggccttgttgcggcgcagcagctccgcgtccgccatggcgtccagccggatgcggcggtaggggcgtttgggataggggagggagggggaggcgctgacaaaggccagggacaggctggggatgagcaggtgctccatccggtcggggaacaggggggagggacagacgatgacatcgtggcccgccgccagcgccccggcggccaggtgggtgagcatggagtgggccagcccataggtgtcggccagctcatagacccgcttacacagggcgtctaccgtctcaaactggcacaatacccccttccacgtgacgccgcccaggaagcgctgcaccgcccggccggcctcgccgtcccccttcttgacctcccgggagagaatgccccgggcccgtttggccattttggcctccagcgccggggtgagcagcagggagcggagatcctccccgatctgggccgccgccgtcagacagcggtaagcccgctgatagcaggccttgtagcccttcatacagcccatcagctcctggcgcaggggctggagccccgcccggtcgtagcagtcgcccagattgacgtaacgctccaccaaccccggatattttggctccacgacgtgggagagagcagcactaggacagttttacagggcgtcacgccctgggggatgcgcctgcaaattcaaaacttccaggtaattcggatctcctgctttccggtttcccggtctttctccccaatctcgattttctcaatgagggcgaccaccaactcccgcggaatggtctccagcttcagcaattcccgggccctctccatcaaagcggcctgttccagcggctctgcccgctcccccagttctatgtcaatctgtgccagccgccgctccaggcggcttttttcggccaggaagtcctggttcagctccacgaattgtccctcactgagaatgccggatactcgatccagatataaatttttcagcgcctgactccgcctttccaactgtgtggtcagggacttctgttcctgttccaatgcatctctgcgggtgtccggcggtggtggaagctccagttctttcagtttatagcagctttggacatagtggcggattcgctcagataccagctcaatcagttggtccagtcgaatggaatggcgggtgcagagcttttctcttccgctgtcggcgtacagcttgcagcggagataggacaccctgggccggccgcgctgacagttggtggtcttgctcatggtgctgccgcagtccatgcacttgaccagaccggacagcaggtggacctccccggtgccgtccgttttggagcgcaggtccagtccccgctggacagtctgaaacagctcccggtcaatgatagcctcatgggtgccctccacccgaatccactgttctttgggcatgtcaatcagagccttggacttgtagctcacctttttccgccgcccttggagcataaccccggtatacatctcgttgcggaggatgcgccagatggtggtcttgttccacagaccatggctgttggacaccgggtgaccgctggcccagccgtgttccgccttgtagcgggtgggatttgggatgccctggtcattgagcagtttggcgatctcctgcttgccgtggccctccagggaccatcggaagatttgccgaaccacctgggcagcctccggctcaataatgagatggttgtgatccttcgggtctttttgatagccgtagatgggaaatccgccgatgtaccgcccctgccgccgcttcatgtcaaaaaccatgcggatattttcggacaggtcctccaaataccactcgttgaccaggccgttgatctgcctggcctttttgttgccctttacctccgtgtcggcattgtcggctatggcgatgaaccggatgccccagatgggaaacaggccgtggatgtatttctccaccaactccatatcccgggtaaagcgggattggcttttgcagaggataatctgaaactgtttctccttggccgcttgaatcatccggttgaagtcgggccgcaggcggtcggcgccggagtagtcctcgtcgcagtagatgtggtagatgtcccacccccgctccactgcgtacgcaacaagcagggatttctgattctggatgctctcggattccgttttgtatttgtcctcgtcttctttgctcagccgggtataaatcgcacaaaggataggttacacctccccggaaggcatccgtactcaacggcagaatacccttgagacgctctttctataaaaggtatttcgggtaatcgtattatgattctgaaatatgggcttaaagccgtctgtatagtgcatttctaagccataaggtcacagcccgccggatgagagaaagatcaggaaattgttccgtggagagccgccgctccgtcacaataaaattggtagctttcacaaaatcacctccataaaaagctatgaatggtgatggactaatatgtagaggggaaagagccaggggcaaacggcagaaagcgctggggcagactgtgtgaactgtgaacatggaaaagcgccgcctattataagaataggcggcgctctcgtttggccggcttataggaccggcaactgttttccaagcgtcatttcacggccgtatctgaaaaaggtgtcagttccgtgaggagtggctgtgagaccgtatcgggcccctatgtgttctatggtacacactcaacgaatttctggttactttgcggagtcagcagtatcaggcaaggtaaagcggttcagcatgtctttcaatagctgtgcctgtccagaaagctcttcacttactgcggcactctgctctgctgttgcggaatttgtctgcactacgctggaaatttggtcaattccctgcgtgacctgctcaattgagaccgattggcgctccgacgcattcgctatattttggaacacatcagtaatcttttgtgcttcttctaccacgctttccataaatttcgatgtcgtttccatgctttccgttcccttttcaacagctgcgagagaggccgcaatcaacgaggttgtggagttggaagcctcagcggttttcccagccaggctgcgcacctcgtccgcaaccaccgcaaagccttttccggcctgtccagcacgggcggcctctacagctgcattcagggccagtatattggtctgaaatgcgatatcctcaatggttttgataatatggctgatttcgttggagcgctccctgatttccgtcataaaggccaggctctgccgcattctcttgccgctctcaacaatgtcgctgttgacttgaagtgcgccgctggccgcatccttcacgatcgcatggttctctttgaccgtagaggaaatctccgtaactgccgccgccagctcctcaacggacgacgcctgctctgttgccccctgtgcgagggcctgtgctccactggatacctggtcagaaccactgaacacctgctccgaagccagttggatactactcattaccgcactcagcttttggataaagccttcaatggaatgctgaatgggcatgaaatcgccctggaaggccacgtctgtttggatggtcaaatccccctgcgcaaggcagcccatgacccggtcaatctcattgacatagccggaaagattccggatacattcccgcatggactcggccatttccccgacctcatccgctccattgtgggtgactgcgatgtgcagattgcccatgctcatttcccgcagtgcatcgttgagctgggagatcgggcgcagccgctttacaatgatgatccatagaaggatggcaacaatggcggtactgcctagaagcagcaggacaagagaaactgtggttttggttgtttgggcgttatactccgccttggacatgctggagagcaccttccagcctccgcccgaaagctcctgcacgatacccacgcagggctccccgtccagcttgtagtttacgatttcattggtcggctcctccaactgctccaaaagttccccctggatgtcgagttcggaaaaatttttgccgatcatatcgtggttctcgtggcccaggatcgtgttgttttccgacagcagcacaatgcgtccgctctccccaaaatccattcccttcaaaaagtcggaaacctgtgtcagcttcagatccagtattagaagcccagctgtcgccgtaccgtcagaaagcggggttgcaaccgatacacacatttcatcggtcgccgagtcaatatagggctgggttacgtaagtgccctctttcgcattctggaaatagggccgctcactcaagagcacattcagccgtgttccctcctgattataaatataatcctccgtgagactgccaaagccaactcccaggatatccgggtattcctccatggtacgatgcagaagtaccagagcctccgaaaattccggcgtaccagatatgggcctgtcctgagcagtgccggtgaccgcatgctgcagttgggtgctctgcgccagtgtttcggttatgccaatatactgttcaataaattgctcgacttgtcttttgccgctaagggtcgtctgctgcaaaaaggcatcctgcttctgattcatcccagagctggtcagtgttcctatacagacagccgaaacgaggttaagaatcagcaatgtggcgatcgaaaacaggacaagggtcgtcgcaagtcgtttggactttttccgaagctttgcttttttcacgttcactctctgctcctttgttctatcttcatttagtacagcgcttaaaaaagtatagtttactatttcgctacactattcgactatttgtcggccattgcttaaaattgttatcctgaaaattcaaatttttttcctggcctgtgttctgaatgcagactttgtgaacatggaaaagcgccgcctattataagaataggcggcgctctcgtttggccggcttaatgggccggcaactgttttccaagcgtcatttcacggccgtatttgaataaggcgtcagttccgtaacctgagacgcgtcacggtcaagctgataaaggtgagcgccatcaacggtcatcagatagcagccccgatactgacggggggtactggaatacacgttaagctggagacagggggaggaatcgaccaggacaagtccttcctccgcatagacctcgtattcctccatggaggcacccgagagcccgagaagggcgggagtacagctttttaaacgctggatagcctcggagacggtgagagcctgcacactgggctgggtaatgcgcaactcggccgcatagacgggggtgatggtacaggtgtccccctcccaggcaatttggagctgaaatacaccgccatcgccggtatccttgcccatggataccgagccgctggagacagagaaatcggggagctcctttacaacgccgttggtgtcaatcggagagcagccgtcctcctccaaggcttggacataactggccagggtatcggtcatggaggacagaccggagtagacgtaggagtcaggctgatcctcactgccctccttgtgggaaaattgaatgttttcggaagaaagggtggaggtcagggcggggagtgcagtatcattagtggagtactgctccggcgggacatccttgccgccgcaggcagagagcagaagcggcggcagcagaaacggcaaaagccgccggcctctggaacgctcagggctggtatcgaatttcaatcttgtcaccttccgcgagtagttgctgaaacggactgtccacgccgttgatctgcgtgagcacagggcggtccagatgttggaagtccagcccggaccgctccagcagatccaggagccggtaggggcttccgtctggctttggggagagcgtaaggggctggccgttgagaaagacatgccgttggggcgggatggaagcctgggccggcgtctccctggctgggggaggagaaggtgtcggcggtgcatccatgcgctccagacaatcccccgactgcagcaccgtatgcccctccaagaggcgcccttcacgctgaacggccttgcaccgcagcttggtacagagctctgcggcggtcatgacacagtctttgccaggctgggcaggggtaaagtggatacggtcgccggcatgaatcagtgcagaaggggcggcttccgcaccgttgatggcgagttgggcggggatggcgggggagccatagaacacattgcgccttccgtctatccgaagcagcaggcttttgccgctgcggccgatgagatcggaatagcggtacccattcatcatcagcagctccagcaccgtaaggctcccgctgcggaagagcttggcggggctcccgttgagcagcacctgataactgtcgctgataaggccgaggccggcagagacagcgataccgagaggggtggtatattccggatcagacagcgcgaaggtatcggagtaggcgctggactgaaaataacctcctgccagcgctgcgcgtttggcatctatgccgagggccgcggccacccgggcgcagagggtggggagcttgctccccccgccggccaaaaagacggcggagggaggacctccattgacctggcagatgcgctgtgcgatctcatcggccagagcctggatggggccgtccaggagagaaaagagctcctccgccggcaaggtctgctccaaccccagaatatcggtaaagctcacacttttactgcggcccagctccagcttcatggcctcggccgtggggaagtccaccaggcatgcccgcatcagggcttccgtgatttcgtcgcctgctacggtagccatagtataccccaccacgctgccgtccctgcatacggcgatgtccgacgtaccagccccgatgtccaccagggccaggttgagaagacggagatccgccggaatcgcggcatttagagccgcgatgggctccagggtcatgctggccacctccaggccggccttctgcatgaccgcgtagagggagtccaccacctcgctggggagaaaggtagcgaccacggcggcctccagatgctggccggtatgccccagaagggtggtcagcggatagtggtccagccagaactgcgtgggagtgtagcccaccaggaagaaccgctgttcctccgggccgtcggtggacagcgcttgttccgcatttgccacggcggtggcttcgagctggtggatacgctcatggcccaaggcctcaggggccgaaagctccaaggtgctgcggcccaactcggtacgcagagcccggcccgcggctgccacgcaggcgcgggtaagccttcggccggaggcttcttccaggcgatgtgtcacaagggagacagcgccggcaacctggtcaatatcctcgatctgaccgtccagcatggcacgtctggcgtgcggctgcttttccagggctagtatgcgtatccgtccctgctccagggctcccagcatcccgatgacgctgcgtgtacctatatcaagcgcatagatgagctctccttcttccattttagtcggatcggagtgaatcggcattctggacggcatctcccttcgcaagctatatgtttggggaaaaaggcgggaagccgcctcagtatgggctgaggtggcctcctgcacttctgatcaatcagtatttgctgaacgggttggtggcggtgcctgcggctgagagggaggcctggctgtccgcggcgggagaaaggggggcagaggcggagtcagcctctgacttcagcttgaatttttgaatgagctgcttcatcatgactgcctgggaggacagctcctcgctggctgcggcggactcctcgctggtcgccgagttggtctgaaccacggcggagatctgatccacaccggtggtcagctgctcaatggactgagactccgaaattgcgttgtcggcaaccttttccatgtaggaaatcgcctcggaggcggaggcaacggtttgctgcatgctggagcttacctcctccgccagggacttgccgcgctccacatgggacagggaggtttcgataatggccttggactgcttggctgcctggtccgatttggaggcaagactgcgcacctcgtcggcaaccaccgcgaagcccttgcctgcactgcccgcgcgtgcggcctctaccgccgcgttcagcgccaggatattggtctggaaggcaatgttttcgatggtgtcgatgatctgcccaatatccttctggccggaatagatgtcgtccattgcctggctgagctcctgcatgcggtcgttacagacctgaacttggccggcagccaggtcagatttttccttcgcggttttggccgtctcagcgctgttctgagcggaggtatcaatctcattgatggtggcggagagctcctggacggcgctggcctgctccgtagcgccctgggccagggactgggaaccgacggacacctgctccgccccggcggatacctgatcggaggcgttgagaatctccgacatggtggcgttcaggttctggaggagatactcaatatttgtcttgacgggcatgagctggccggggtattcctcatggctttccaccgtcagatcgccgtcggcaagtcctttggtgatctgaacaatatcttcaatgactcttccaagaatatcctgggaggtgcggaccgcatcacagatggttccgatctcattggatgcctcataggtcagctccaccgagagatcgccctggctgaaagcgacaacagcctgctccgcctcctggaggggacgggtaatattccgaatggcgcgcaggttcaagagtataccaatggcaacaaccaggatggccataataaagagaacaatctggctgcggctcacacttgcctgtgtagagtcgatgtgagcatcgaggtcgttctggacttcacgaatgagcgtattcccgtcacttacggcctgattcagcttcggagtgcattgtgtttcgattagccgacgtgcctcctcaagattatccgcttgaagggcggtatggatatcctcaaaggcattttcccattcacgtacagactgaatataagtctgggcgacgccgtcggaatctgtatagagggtctgaatcgtggagatcgacttctcgatcgaatccacggaggcctgaatctcatccatgattgaggtatcatacccggacagcgccatgtccctaagctgacgggcaatcgaattgacctccgtttcactgctctggacggcattggtaatggcaatgggacctgtgaggatggatgtatagtccttctggattttgatggtctgtctgattgaaaggaatgtcaaggccaacgcgatcaggatggtaattaagaatacaattaaaagccgcattctaattttaagatttttttccatgttgcgcatatttgcaatacacctctcctaacatagtcggcggcaggctatacaatatctccataccgccctttttgcacatcgccccagatctggccatccaccagtgtaatgacccgtttccgaagcagattcacaaactcctttgcatgggttgccatgataatggtagtaccatggcggtttatctcacagagcaaatgcagaatatcccagatcgtgtcctcgtccaggttcgcggtcagctcatccagaaccaaaatggacgggctgttgataatcgcgcgggccagttccacccggcggcactccccataggatagctccactgggtaacgcgctcccacatcaggcaggccgaccatagccaaagtcttctgaatccgggtttgtataggcgggagcttccggctctgcgtcagcatggcgactgcggataaattttcggagatggtccgtttccgcatgagctgtgagagctgaggtacgcggccgaaaaccaggcgcaggcggtcgcggcgaagcctggaaagccgcgtcaggttgatatcatccagaaagacggccccggaggtagggcgaagatccccggatatgagctggagcagcgtactttttcccgcgccgctgctgcctgtgagaaagaggaattcaccctgctcgaccgtcagattgatttcctgcacagcggccatttgctttttatcctgcgggtaatacttgctgacccgctctaaccgaatttgcggcatgtggactccttttgcctgtatacaataaaagaaaaaattgctataataaagaaaatattatataataaaaattttgaggtactcttatgtccggtacgaaaaacagaccgcataaaaggcgaaatataatacttcttgttttgttggccctcctctgtattggtggggtagagctgctggtctgccgctttgctgcgccggagctgttccagcggctcacggcccccgtgacaggattgatgcagcgtgtctcggacttaggggaggcactacacagcaatttgcaggagctgctttcccgaccgggggaagatgaaatggtgaatcaactggccggcccgcccgccattgaagaggtccctccggcggaggagagcaaggtcacggagtttgtcacccgggacgggcgggagtatctgaccggcggagtcgtggatttggtttactacaaccagggggaggaaccctgggccagccagaccttcggtaatgatccgatccgcggctacggctgcgggccgacggcgatggccatgctggcctccagcctgactggggaagaaaccgaccccggggccatggccgactgggcctatcagcaggggtactgcgctcctggcagcggttcctatctgtccattgtggagggaactgcgtccgccatcggactggaagcagaggcctatgaggcggcctccgccgatgctctggtgcagcaactggcatccggacacctttttgttgcgctgatgacccgtggacatttcaccgagcggggccactttattatcctgcggggcgtgaccctggaaggccgtgtactggtggcagaccccaacagcagagagcggagtctggccgcctgggagccgcagctcattttggatgagctctcatccagccgcagctcgggcgcgccgctgtggcggatctccatgcaccagtaaaaaacggtcggggctaggaatcgtaaaaggaatcctttccgcacaggcggccgctggcggcccggtcggcctggacaaccctggtccagagggcgcggttgcgctgaagctgctcctggagggggtgggtagcggggctggccgccggggcctgcccggacaaaagcccctccagctcctcccggtcttccgccggaaggatgcggcactgctgcgccaggttggtctggtattcccgcaattggttgatcggctcctgccggagctggagaaagagctgaacggagacagaatccccccgctgtatggaggcggagagctctcccgtcagctcaagcacctcggagagcgccgcatagatgcggcgctccgtggccaacaccgaagtgagctgttgttccgtcagcatttatacgccctcctgcggagaagtggcggcgcttttttccgcctgccggaagctgtcccgcagctctgaggccatttccttcacacgggccagctccttggcgttgcgccccgagacgacccggctgagctcatagcaaaagtactcgtacagccggctcaaattggcgctgatggggaactggcggtcaagggtgtcgtccagataatggatgatatcgacactgcggccgaccgccccctcgaatacctcgtaattctcctgacccaggctcaattccgcctgggtcagccgcttgatcagttcgtcgtagagcagcaaaagcagctcaccctgggtcatggtatttaaggagtcctcacggtaacgctggtaaccccgcatatccatatgtatcatgttcctttccggaacggcggcggcgttaatagccgcccatcattcccgcgagactggaactctgggagttcatctgcgcaatcagcatttccagctgggtgaatttgttggtgtaatagtccaccttgtccgacattttggtctgccacttatccacctgcttgtcgatgtccttcatctgctccaaaagagtgttcttcagagcggcagagggggagtatttggagccggccttttcaatgagaataccctttgttgcgccggtagtggccgcatagcggtccgtcaccttctggatggaggccatcagaccgtcgctggcggcgccgttttccttgctcttggtaaacgcatccttgacctggtccgggttttgttccagtgcctcgcggagcgcgttttcatccagcgaaagggtggtcaggccgtcctcatagctggttttgatgccgatggagcggaggaaggagccgtcggagccgccgggggccactgcggagcgcagggcgctgtacagggaggagaggtcccggtccataaacaggatgccggtttttgctttctcctcgtaggccttgatctcgctctcggtcatgtccgccttatcctcgtcagtcaggggcttgtaccgggagccgtctgacttctccagaggcatgtcggagtaggcctttttgacctcggacacaatggcgttgtagtcctccaccatagtcttgaccacgtcaatgatcttgtccgtgtcggtcttactggagaaggtgaccggggtttctccatctttcacctcaaatgtgccgtttaaggtgatggacatgccatccaaatcaaaggtgttggagctgcgggagaactccatcttctggccgttgatggtggcggtgaattttgcgtcctgcccagcagtgtagtgatccttatcagttacattgactttaccgaacagccgttcacccaactccccgccaatctcaacccgtccgcctgcgccggtttccttggcggtaaagacaaactggttggtggtcttggaaaagctgacgctgactccggcctcggtgttgctgttgatatcattgagcacagtctccagggcggtgtccttgttgtatttgccaatggaaacgccgttaacggtgagctcgtactcctgaaagcgcttgccgtccttgtccagacggaaaccctgctcgtctacggtattgccttcggaatccacacgggaggtcaccttgccgtccttgtcctttatctcagtcacatcaccaatggctctggccaactcgccgccggtcaggccattcaagcccgcaccgtcgctcgtccgccccagcagatcgcccaaggttttgccagtgtccacataggaggtcacaccattctcacccaggccgagcacctcgccgacaggggaggtgatgcggaaagtgtctccattgctgacgctgaaggagaaggagcgctctctggggccagtagtatccatatcgaccgttatcttgcccttaccgaaggccttgtccagaccttcctggaggttctgtttgacctgctcatggagattgccctttgagggatcaatctcgcccaaagtaaaggtcttggtctggccgttgagggtgacggtaaagctcttaccagagaggtattccgctttggtggcgtcttccttcaccaccttctcggtagtgctcagagtaaagctggaggtgccctcggcatcggcagaagtgaccagatttttaagatctccggtggcaccgctgaagtggacgttgttgccagcacctttcttgtcgctgagggtaacggtgccgttgctgtccaccttgacatcaatgagggtatcggcgctcacctggtcgccgctgctggtggtaatcttctgctccttcagcttgtcctggagggccgtttggaatttggcagtgtccagagtgccgtcggccttgttgaacaactccaactctccgaagtccagcgtgaccttcttgttgccatactccaaagtaagggagccgctcatggtgctcagcggctgtttttcgcccagcttgaccggctcgccctttccaagggacgtgtccagcccggaggcgtcatgggtataccgggcggcctcggccagttgtgccacggcgttgagcacaatggtgctgctgctcttgccggtggcgctcaccagatcggcataggtcccgttggcggaggtgaggatcgcgttgttgaagaagctggcgctgaacaggttggtggcgggggagttgtaggacatatacttgcgggaaaactccaccagcttgtcggagatgctctgataggcggactgctgccactggagcatggtacggtcctgccccaactgtgtaattttctgctggtacccctgtaccatgccctcgatcatggcctcggtgtccattccgctggccaggccggaaatgatgttgctgtttcggctcccatagatgctggaagaggaaccactgctcataaggctggagatagatgccatgctgcccactcctttcaacgtgcaacatgaaaatatggcttgattgacaaccattggctttctgagtaaaatgggtgtgttgataggccccaatactctgtattatgttatcgtccggccaaagggaaaattaagagaggatttcgatttttctgacgaaaaggtgcgaaaacctgctctgctccggccggagatgggtgaaaggggtacaggggacatggcgaccaccgtgattgcgattacgaaccagaagggcggcgtcggaaagacgacgaccgctgccgcgctgttgaccggcctgcaccgccgcggcgccgccgtattaggtgtggatatggatccgcaggggagtctggggttcagtctggggctggatattgagcattgcaccaccatttatgacgtattccgggggcaggcggagccggagcaggccattgtacggacagatacctgcgacatccttccgtccaacattctgctgtccggcgcggagctggagtttaaccggccgggacgggaattcctgctcaaaaccgccctgtccaaggtagaagatcagtatgactatatcatcattgatacaccgccggccctcagtctgctgacggtaaatgcatatgtagctacggacagcttgattatccccatgtcgccggagatcctgagcctgctaggggtttcccagatcaaggagacgatcgagagcgtccgcagttattacaattcccggctgcgggtattgggtatcctgctgaacaagttcagcgcccggctcactctgaaccgggaggtgctggaaatggcggagcagattgccgcacaactggataccagagtattccagagcaaaatccgcggcagcgtttctgtggcggagtcccctgcccacggggtcagtgttctggactatgcgccgcgctccaagccgtctctggactttgaggcgctgtgcgaggagatcgcgggcggctttataccgcacggcggacgccggacagatggggaggtgcggtaatggccgggaaaaaggggagccggagcagcaagaccgcccatgtgctcaacctgctgtcggggggagaggcgccggaggcgccggagcagcgcccggcggcggggacagagcggacggaggagccacaggccgggcccacgcctcccccgccgccccgggagcgtcccatcctgccgccgattgtggaggtggcccgcaccaatagcgaggcactgtcggaaaccattcggagcgcgctggaaagggagctggaggaagagcaggcccaggaccaggcattggaacgggcagaagaagcgggggaggaacatgcggcccagcccgcggcagagccgccggaggaaccggaacggcccgatgacccggcggagcccctgcccccctccgccccaatgcctcccaaggccagtcctatgcaggagcagaagccggtggagcagggacttccggacggggcggagtgggtgaatgttatgctcggactggtggaggagaaggcggagcgctatgtcaaaatgtttggcctgtgcccctgtccccgctgtgtggcggatgtgaaggcgctggccctcacccggctgccggccaaatatgtggttctgcccgccgagcataaaaaaccgatgcttagcctatatcaggcgcgctatgacggcgatgtgactacacaggttatttacgcctgtaaggctgtgatggatgcaccgcgccacggcgcggcccagcccggcctggcatcagataggggctgaatatttcttataagatgtgttaaggaaagtattaacattctaggtgtagagccgataaattctataaggatatacaattttacggaaaggagttgaaagatgttgaaagatatggactgccagagggtgcccgtcgaggggaacggtcacggcgatggaggcagcttcctgcaccggctggttatgcggctgtatggcggcggaggggagcaggcgcaggatgcgcaggatgtgttacaggaagcagtgttgcccacggagcacctgtctgccccctccacggagcaagccccagctgctccccagaaaaaggcgggtcacagtgtaaatacaccgaccaacagtttgctctatgcgctgtggagtgagtggaacgacattcaagttggagtgaatgcatttgactatgttctgaacctgccactggaggatggccggaacggcaggcagcttctgaacgatgaggaaagcaaaacggcgcttacccagattaagctgaaattgatgaacttggcaaagcagcgtttttgggagcgcggagcggatgcccagaccacgatggatgctctgccatgtgtgtttctatcagaaaacaaaatggtggcatggctgtttctctttccgccgaccggcggcggcaaaccagcctccttggatcgccttgagcattctgtttgcgaagcaggcgtcttattcgggatagatcacgagcggctgcagcagcttgcggatagtccggagtactttcagttgagtgtagtcgcctatggacttgctcccatccccggagatgacgggcggattgtggaactagtacctcgggagccgccgcagactgcgcctcaagagggagcgcagggactggtggactatcgttccagcagttatacaaacattatccatgaaggcgatgtgatctgtgacatcattcctccttctcccggaacaagcggagtggatatcgcgggaaatgtcatccaaagccgtgctgggcagacgccgcatgttccacaagggcaaaacacgggcgtcagtgaggatgggcagcatctggtagcgctgaccagcggaaatctcatttttgaacagggtgtctttcgcattcgtcctaccctagtggtggagaaaaatgtggattacagcacgggaaatttggatttcgttggagatattatcattcgtggagatatttgcgctggtttttccgtccataccaccggaaccgtaacagttgacggagctgtcgagggggccattgtggaggctggcggtgatataatcattaccaagggggtactgggcgataactccgcaatgattaaaagcggtcgaactgtaagagcagcttatctggaaaactgcgtcgtatatgcaggtactgcaatcttggcggattgtgccataaatgcacagctttacagcgatggcgctatccgcattgtaagtgggcgcggtaccgttattgggggcctgctaacagcggttgaccgagttgacgtaaatgtgattggggcccgctcgggggtattgactgagattgcacttggacagcgctcttttgcgcttatagaagcaacggatttggagcgatccttggagcagatgaagaaggaacacaaggaattagagcgaagtttggaatatctggagcagcaggagccctcaaaagaaatcagcgcaaagatttctaatttcagactgcgttacgccacaaccggcctgaaactggacgctatgcgcaggcggcttaagctgctgcgtgaggaacgatttgacctaagccagtgtcggctatgctgccaagtggtttatccgaaggcgaaaatcagcattggctcagataccattaccgtttccgacctggaaacacaatgcaatgtgcatctctcaaaaaaaggaattcaactgcgctgattttatattatcagtgactgcggtagttgttttccaagcaaaagggaggtgaatatacaatatggcggagagagtcccgtttgcttctgagctttcccgcatcatggagcgggttgcatgcgaggtgacccgacatgtcggacagttggaactgcggccagtcctggatgagaactttcctgcggaaacgggaggctgtcaagttcagactacattgtacggcggttaccactcccggattacattgactagcaattacctcttttttttcaacttggcaaaaaatatgatggaagagtcgcctaccctggaggatgttgctgattatgcagtggaatacttcaatgtgctctgcggccatattgtggctgaaatctttcgcgtaacaggggtgaccgcaaaattttgttgccctatttttggacataaggttcgttcagaggctgttcccttccaaacatgtacccaattctgctgtccgtatggttggctggagctcggatacgcacctctgcctatgactgcaatcagtgccaaacacgaaggagaggagaaagaactatgagtaagaagctgatgattgtagatgactcccgtgtggtgtatgccagtatgagtaagatgctggaaaacagtgggtgggaaattgctcaattttgcagaagcggggaggaggcgctcaagacctaccctgatattcagccggatgtcgtcacaatggacatcgttatgccggggatggatgggttggagactgctcgcaggttattggaaaaatggccggccgctaaaatcctgtttgtatcctcattggcctacgatgaaatggttgcacagtccaatgctctgggtgcaaagggtttcctctacaagccgttccatcgggaagagttcctgaccaaacttgcagatatcgtatcagtgtaatggatcaattggccccgaaaagacagaaaaccgggttatgtttgacacataacccggttttttgtcagactgcggcggtccctgacgaggttgtcattgcttccatgtttgggccctgggtagtatcaggattggatttgttgcaaagataaaatccgagtaaaaatagctttttaacgtggatttcattatacgaacggaattaaccgaaaaacacggaaccatatcacgtaaaacggtgtgcgtatgtgggtcattccggccgtgcataccggctctgggcagcaccgcggatcagaggcatttatagtaaaaagcaggcatggatactctgcgcagagtatccatgcctgcttttgctcaggcgtagacatcaaactgatagccagagctggaggagggggggagcatttgcagcaactcctgtactgccagctcctgggactccattgccttttttgaaacggcgagcgtatagctctgctggagctgtgcagacgcaaggctgctggctgtggcagcgattccatccatcatgttcattcaacctgtctccaatccttcaaaatcatctgtgcggacccgacggcggggttacagcctccgccctgcggaacgcagactccagagacgcgaggagctgtggagtagaggggctctgggcggcctcctggttggaggagacggcctgctgcagctcgctgcggaggatcagcatctctttgggggcctgaatacccaggctcacatttccaccggagtccacagagagaaccgtgatactgatatccccgccaatcgtcaaagattcacccgcttttcggcctagaatcagcatagggtgcccgcctttcccccctggaactccgccagacgatgccgcatgtggtaggcatccgattccaggatgacctgaatggcccggcggctgtccggattgactacaacagggcatttgaagttcagagtgctctcctgcacaggctcccggacaacgcagagaacataatagcacagggcatggctgtccttgacctccatctcacgcaattcctcagaagagagcaacggctgatagctgggatgcagagaaaagggattcatggcgataaaggccagggagggggtggcggcactctgcaagcagagcatattcccgtcactgccggcgaaggggagcagcagaaaggagcgctcctcctcaaacccaaacaggccgttgggaaaggtgatcacctcgtccggagggacctccacggtaccaaagtatttcgtttcaaacttcaaggggctgcctccgttcaggcctttgtatccagcggctcatagttggggtcggcggaaggggggacatagagcgggccgccgatgtatttgatgaccacatccggctgctgtgtcactttgaactcaatgtcgccggggacaaaggtgaactgcatctggttcatgcgccagtcgaagttgagcttatccatctcatagcggatgctcatttccccgccggtccaggagatatcggggcccacctccgggagaaactggatgccaagctgagcgggctggtccacggttttttgctgtgccaactgggggatcacatcctggtcaattttggcctccatcatcatgcggccctcctgcgccaggacggcggtagcctcgtatgccgcacgctgtccctgggctgccccctgctggatgctctgggcggtggtggggacgatagaactgcgcgcctcaaaggtatcaatgttgacccgaatgggctggctgcggatctggagcccgcgtcggtcgcgggagacctccatctgggcggtgccccgggcatactccagatgggcattggtcgttttcatctggatttcaattgggatagtctgaatttcaatcaagggacgcattgggacgtgctcctttccgtacaaaggatagaaatcacttcatatagtccatcagggactgaggaatcacattggtgcccacttgaagggaggcattgtaacaggtttgggcccatacaagctccagaatggcgtccgccgggtcgatgtcctccaggttgctgcgctccacattgagggcatcgtaggtgttttccaactgggttccgtttttgtccaggaaattggcctcagtatccagggtggtccacttctcccccatggcttcgcgggaggcatccagcttcttgagcaactcctccgcttcggagcggcttccaacattccatgtctgagtctcatggtcatagccctcaaaaatatcggccagccggagcatgatagaggcaaggttcttgggatcgccgtccgcgtccacgccgtagcccatgataccgataccggagatggcggagtcaaaggctgtggaggggatcacctcgccgttcccgtccagcttaaagcccagtccgatatccacgtactggtgttcctcattccacatatccaagacttctttgttggtcatgtccttaccgtttgcgtccttaattggctgtcccttatcgtccaagtaaattttgtccagggtatccggattgtcgatctcgacgccgcggtaggtgacaaagcccttatcgttgatagcaaagggggcgttcagggagtccgccccggcgaacacaaaattattgccgtatttgccgttcatggcctgaataatggcctcggcgccctctcgtatgatctgcccctgggtattcagggtgctgaggttggtatcattcaggccgctgagggcggggacgcggccggtgtcctgtaccagaccgtcataaccgtccagcacgctctccagagtgctccacgccgtctcgtacttatgcaggacggtgtcgttgttggaatactgcgcattggtggcgttgagggaactgtgaattttgaaggcccgggtggccgcggcgggattcgacgcataggagctgaactgccgctgggtcatcagcttggtcatggcggagttcagggagttggtggacttcatgagattggagcggtacatccgcagggagctgttagttgtaatacgaatcataatcaatacctcttattgttcccgttccagaccttagacaaccatgccgttgatcagggaatccagagcctcttccaatactgtcatcagccggcaggcggcggtatacgccttctgatagaccatcagattcgtggcctcgtcattcagatccacaccggagacgctgtcccggtcggtgtagacggtgttatttacggtgagatagttgttcagcttggcagtagtacccatctgatcctctgccagggtggactgggtgcggagcagccaatcctcgaacgacatggaaacggaggagcccacggcaccctggcgaatatcactcggatcaatccggtgctctttggagaatacctcgaggaatctggccaggttggagcggtcgtcggagggggcgttggggtcggtggaggagagcatgtgcaccttgccctccgcccagtcctttgagatggcaatgttaccggcggtgatcttatcacctggattatcccggttcataaagagatccccggccccagtgacgccctgggcctggttcagcgcgttcatctgctcggcaaactcatttgccaggctgtccagagccatctggtagtaggggataccccgcttaacggtggcgtccttatcgttgttgatctcggcttgggtggagtattcgcccttctctgtcagcatttcccgcagggactggagggaaccatacaggtcggtatcccctagcgtaacgggatcgatatcctggggattctgcttcttattgtccatatcacgaagagcacccagctttacctcatatccatttgcctcgtccccggtggaaaccttggttgcaaattcgccgtcaatgagcgtgtttttgcctccggtggccagcttgaccgtgagcttctccaccataaggccgccgcccacatcctccatggaataggtgacgtcaattttcatgtgctgactcagggtatccagcagcaggttgcgctggtcccgcagctccaggccctcgtctccacggatatcggaattgcggatggccacgttcagctcctgaatctgggagaggatgctgttgatctcatccacatcctgcttgaggtagccctcaaaggtggttttcagctcggccagatccttggcggcgctgttgaacaggtcgcacagggtgtcggcggactggcggatcagagagtcatagccctcaatgccgttggtgttggccttgttgatcaggtcgcgcagatcgttgagttggttgaggatcaggccgtcatcctgctcgccgtcgcccttgcccacctcgtccaggattccggccagcttctccaggccggcgagccatgaatccgccgagcccacatcggcctgggatttccggtaggagatgtccagtcccgggtcccggagctgggagacgccgtttaccagtacgccctgccccacccgcacgttgtactgggagtggtagcggtctgaaccgccggagatcagactgacctggtccaggcgctggcgggtgtagccgttggtattgatgttggtgatgttgttgccggtcacgtccaagcccttctgggcggcgtagatacccagctttactgtagtaagagagccgaatgtactgctcatgctgttacctcctatgctctgaagtccgttttcatgccggtggggcgggccggggaggcctggtagtgagattctgcatccggctccaccccccgccgggccaattctccatccacccggcggagctccagctcggtcaaagtacgggcggagccctgtgcggcctgaaggacggcgtagcccttcagtacctgctccaccatgcggctggtctccgcccggtattccggcgggcagtgggagggcatgtcacgcagggaaatgccggtcaggccgagtccggtcaaaagggtctcccgtttctgctcgcagccccgcagggcaagcgtgagggcctgctcccgcttcatggcttcgttcaactcgtccagagcgtgcccctgcaccgcgtcaatcttttgctgctccacatggctgatctggtcaaagagctgacacaactcagaaagcagcgccaggtaatcgctgtattccacctcagtccgcctccttctggagcagcatgcgggctgcaatttcctgggggtcgggctggtaacgcccctcccggatttgggcttgcagggactcaatttctcggcaggtaggccggattcggatttcctgtgaaatacgcccgacaagctctttcatgcgcgtttcctccccgcttggctgtatactgagctggaactggtcgtagacctggcgctctgcttgggggcgggaggtgctgtgggctgcaccggcctggggggaacggcctgcccctggaacagatacccggtggatggaatattcagagaacatgagatggcctcctcaagatagctgaacgggaacgaatgaaacaaagactggaaaatctattagttctatcgtcacagataaaaaaaagataagaacaaattggaggaatacaggaaatctttttctcagtttgcaggtatgggtgtaataaggagggcgggcccaaatgggcccgccctccttggggctggcgttattttgactctggggctggcgaagagtcggtctccaaggaatctcgaagctggaaatgggaggtcagtgatttaagaatctgagactggtcggaaagctcctgactggcagcggcgctctcttccgcagaggcggagttggtctgcacaacgctggagatttgctccacgcccacgttgatctgctcaagggcgtccgcctgctgttcagaggcgtcagaaatctggtggatcgtagctgtgatgtcctgggcacggcccaccacattttccagataggaggcggtctcattcatactggaggtacccctctgaatggcggacagggaacgctgaatcagggcggcggtattctttgaggcgtcggaggacttctgcgcaaggctgcgcacctcctcagccacaacagcaaatcccttcccggcggccccggcccgcgcggcctccactgctgcgttcaatgcgagaatattcgtctggaacgcaatatcctcaatggtcttgatgatctttccaatctcgttggagctgctttgaatgtcctgcatggcggacagcgtttcctgcattttctgattgctctctgcaatctcctggctgaccatggcggccttatcactggcatcacgggcgtgctccgcgctcttttgaacatggttcagaatatccgaggtagtggcagccagctcctcaaccgcagaggcctgttcagtggccccctgggcaagcgcctgtgccccgctggcaacctgttccgacccggaggagacgtgatccgccgcattgttgatctggctgagggtgtcgctgagggtatagttgatgcggcgaatggaaagcagaatttggttgtagtccccaatatagcgctcacgatccttcgagcggattcggaagtttccgtcactcatctcattcagcagataactgatatcctgaatgatcgcccgcaggttttccgtcatagcctggaaggactgggcgagctgcccgatttcatcctgagagcggatgtccaggtgtacgtccaggttaccggaggcgatctcgtcagcagcggacaccacagcacggataggaaccagcattttccggaggacggcggtcacaaccagaagaagcaccagcagcgatgccaccgacaaaataagcagcaggcgtgtggtccgggtgacggaggacagggcgtccgaggtatacacaccggtcatggaccaccaggtttcaccgcccacctgcaaggggctgtagaagcaggagacctggtcgccgtcctcgcgggtcttgcgcatattgaacgcatccccctgggccatggcggcctgaatggcctccagctcgtcggcctggggtgtaaactccaccatgttgtgtcccacatcgtccagtgtttcgctgtcccatatgatggttccatcaccgctgtaaagggtagaccacatggaggtgtaattgttgtcggaaatctggagggaagagaaggaactgaggtcgatgacggagatgaccacaccaatcacagaaccgttgtaaacaattggagtgccgtaggcgataagcagcagatctccatcccgatagggggcggaaatgtaaatccggttttcctgggcggggacccggtaggagtcctctttggcatattcctcgtaggaggcataggcatcaacctcggcatcggccgaggacatgtcgatataaaacccatagtgccggaggttgctctggaactgattgggctcaaacatgacgccgatgccctccagctcggggttgtttttgaccgcgttccggaccgtctccacaataaactgctccatatcgtatgcgttggaggtcagggacaggcccggataaagggtgctctgctgcatggcagcggcgtccccgggagcgccatttggtttggcgtaaatgcggccgatgtattcctggataccccgggccgtatcatccacaaccccaaagctgtcctggatctctgtgccggttgccctcgccagggcggacagctcgcctgcaatgcccttctgtatgctggtgctggtagtggagatcgtcactccgatcagaagtgcaaagatgacggccaggacggccccgatgatgaccgccagcttagaagtcagtttcagtttcccaaacaacatcgattcccccattcggtatcattgcaaaatgccgcgttatgggcgtgataccaagtatttgtatgtttatctcaaaccggcggcagcgtctgccgctttgccgggaagttcctctctgtcaaacacacagtcaacgattgtatgtaatcgttttctgatgtttatatcggacggataaacaaaaaattaaggggaaaaacgacaaaaacctatcggaagtgcggaatttggctttgatagagcttgttccgatgtggctgggcattttggaaggttcccagccagtcgaggttgaggggaatgggggtaaggaaggaatctggtcgga

SEQ ID NO: 4319 - DNA, 269 bp, Unknown
  gut microbiota DNA sequence
ccggtcaggccctcgagctgcgcgtcgtagccggcggccaccagcagcatcttggcggcctcgttgccggtaacggtagcggcggggtcaaacttgccgttgccgcggccggcgatgatgcccaggctgtagcagtagttgatgtagctctcagcccagtggcccttcacgtcggtcaggccggtgttcatcccgacatacaggccgtccacatcggcgccctgattcaggacggtggcgatcatcttcgccatctcggcacgggtcac

SEQ ID NO: 4320 - DNA, 3088 bp, Unknown
  gut microbiota DNA sequence
tctcattaaattcctgccttcttatctgttctgtattttatataacaatattcctcttactttattttcgttttgtatgttcatgatacaacagagataaaaattcgtcaaatgtttcttctttggcaaacagatattctccattatccaaccaaacaaataacaagctgacagaaaatatttctcctgtcagctcgtacatcaatctcttaatttatcaggcaatacatataacctttcttttgtgagttctgtggccttaacttctgcttatactgcttacctgaaacaagattataatttgtgtataaatcaaaaagcattatctgatcgcattcatacaatatttatagattcttttataggtacatgtagaatagtgaacgccgtcatctatatttcccttaaactcattgtatgtactgtaaccgtttttcatcagatatttataggtatctatccattgaaatctcttatttaacccgctctgtaacctgtcattaaagtaacgtaactgtgcttcttttcgggttggtttcattgctgtatttaccggatttacagacatataaaacaatctgcagtcactttcaagttcctctgcaagagtgttcatacgcgcaagatatgcatttgcctcgcctttataatcaaccccatttccggaattatgactcgaaagatcattcacaccaagattaaaaataactgctacgggcttatctgaatctgactgcagacgggcaatttcacttctcattactctctctcctgctgtttcaaaccagctcagtccctcccctgtcttacacacaaatgatacttttgaaactgcatcctttccatattcccgaagaagagttttctgcataaaatacgttctggaatctcccacaaaaataattccggaatactccgacagctgagctgccagattattgacctgaatatccggctcctgttgccagttatacataactgcatataaatgggttttcttccttacctgtatcacctgtcccgcctgatactgcggattctgagtctgatccggcttcgtgctccatccaagaaaagtatatcctgtctgatttcttattgctggaagtgtcacttttccattactgtctgcttttcttattatcgtagacccatctgcctcatggaaaataaccaccttctgagaagcagatgaaatcgcttctgttccctccgacggtgccagtgactcatcctttttattatccgaatatgtaaaagatgtgaaacctgtggttccttcttccacatcgtaaacccttactttgctggtttttgcaaaagctgtttcacaaaaacacgagctgaaacaaattgctcctgtcaacatcataatcatcattttcctgctataatgtctaacctgaattattcgattcctcattttaaaactcctttcctgtcatgtaaatattcacaatcctcattttctcctactacttatacagtgtcatcttttcatttttccactgtagcaacatatttttcttatatatattatcataatacaatcgtaatccatatctgtaaattttactttttccctcttttccacctgataattatttccccaaaaccattccaatcaataaccagcgtaaaaaaatatttcatttcctgtgcatttgcagggtacttagatattcttagccggcaaaaatctgcgttatgagaaatcagagacactgtctgagccgcaggcgagtttggctctgatttctcatgcttttagcagatttttagcggcttagaatatcttagtgcccgaaaccgcacaggaaatgaaatatttttttacgcgtccctttttgacccaaacaaaaaatggcgacacaaactgccgccatttttcgccctcttacttattaactttaagaatataagtactatacacctcatcctggaacaccacttctccaagtgacttcagcacatcctcattcaatgtctccccatatttctccctctccttcgatccgacaaaaatataagaaacatcatactcttccagcagctccttcacatactcctcatccgaagaagtataaatactctcaatatccgcgctcttctcattcaagtccgcagtatcatctctccacagccactcatgcacataccatcccagcacagtcggcagccctgtcatagcagaaacacgctcataaccactatagctgtccccgttcgcctcaagcacaaccggtgaccctttcacattcttcttcagccatttaataccagccacatcctctgtgaaatcatttgacaggaaagatatcgcattcaatcctttatattcagaaggctcccatacctttccaaaccacgcatacacactgtttccaaaataaccaaaggtccagcaaagcaataccaggccgatcactggcacaaccttaaacactttcttacgtgcagccaccagcatacggaaaataccatatcccatagtcatcccaaacagcatatacgcctgataagtcagcttaaacatagtattcgccctggcgtttccattttcgtaaatatctcttacataaaccaactccggaatcacgatcagcccgattgcacagagtcccatgacaatcgcaaacagatccggcacagagattgctttcatcagtctatacagacttctgttcgcaccaccacgaagcttctcccagatgatacagatgatcagcagaactgtcagaaccacaggcagtccccacaaaatcagcagctgatggatcatagaatgattctgcgcaattcccacacctttaaacatactgtcaaactgcaaagtaaacggcagagaaacaacgtatgagatcacaatgatctccactgcctgaaccgcagtcactgccagaatcctcttcactttaccatcaaactgaacgatattggtaaacagcaccactccaccggtcaccacgaaataaataataaaatcccagaaattcgtaaaccggaacataccgatcatcactgcagccagcaggatatgcggaatcaacagctgttttttccagaactgtttccggcccggcttcat

SEQ ID NO: 4321 - DNA, 9585 bp, Unknown
  gut microbiota DNA sequence
gccgccctggggcgtcggcccctacaaggagtgcggcggcaagccggccggcccgccggtgcgggacggcaaaatacgggctcttggcatgaaaggaacaggacgccgcagtgctgcggcgtcctgtctgttccatctgcggggttactcacccaccacggcggcgcagcggtcgcacagctcggagtggtggccgtcggcgccgatgtgctcgctgtggttccagcagcgggggcacttgggggactcgtccagggcgacggcgatggtgcaggggatgaggcagtcctcgctcttctccccctccacggccccggtggtgacggtgaccttggagacgatgcacagggaggccagatccaccccggccaggaaggcggcgtcggactcggacacggagagggtcacgtcggtgtcctgggccttcttgaacacgccggcgttacgggcattctccagggccttgttcaccgcgtcgcggaggctgaccagcttcgcccagcgatccttggcggccgcgtccagggcaaaggcggcgttgtcgccgggcatgtcgttgaacaggacgctctcggcgtttacgccctgggcgtgcttcatggcgtgccagatctcgtcggaggtgaaggccaggatgggggcgatgagccgggtcatgccgtccaggatgtggtacagggcggtctgggcggagcggcgctcggcctcggcgccgcagtagagccggtccttgatgatgtccagatagaagttggacatgtccaccacgcagaagttgtagacggcgcggtagacggcgtggaactcatagcggtcgtaggcggcgcgggcggtcttggccagctcgttgaaggtgtgcagggcgtagcgatccagctccatcaggttttccgccggcaccagatcccggtcgggctcgaagtcgcacaggttgcccagcatgtagcgggcggtgttgcggattttcaggtaggcctgggagagctgcttcatgatgtccttggagatgcgcatgtcctgggtgtagtcggcggaggccacccacaggcggagcatgtccgcgccgtagtccttgatgacctcgtcgggggagacggcgttgcccagggacttgtgcatggccttgccctcgccgtccaccgtccagccgtgggtggcgatctgcttgtagggggccacgccgttcacggcgatggaggtgagcatgctcgactggaaccagccgcggtactggtcgccgccctccaggtagaggtcggcggggtacttgaggtaggggcgctcggccgccacggcggcccaggtggagccggagtcgaaccacacgtccatgatgtcggtctctttggtgaagtgggccttgccgcacttggggcagacgaagccctggggcagcaggtcggcggcctcccggtcaaaccagacgttggagccgtgctcccggaagagggcggccacgtgggcgatggtctcgggggtgacgatatcggccccgcagtcgtcgcagtagaagatggggatgggcacgccccagacgcgctggcggctgatgcaccagtcgttgcgctcggtgatcatggaggtcatgcgctccttgccccactcgggcttccactggatggagtcgcaggccttgacggcggcgtccttgatggcgtccacggagcagaaccactgctcggtggcccggtagatgatggggtgcttgcaccgccagcagtgggggtaggagtgggtgatgttctccttggccaccaggaagccctcggcctccagatcggccaccaccatgtcgttgcccttggcgtagaactggccgttgtagcgctcgtcggtcatgacgcccttggcgttgacgggcacgggcacgccgatgtgggtcaggccggccttgtcgtactgctggcagatctggaagtcctctgcgccgaagccgggggcggtgtggacgcagccggagccggcgtccagggtgacatgctcgccgttgaggatgacgctctcccggtcgaagagggggtgcttggcgcgcatcagctcgaactcgctgcccttgagggtggccagcacggtgcaggcggcgtagtcaatgcccgcggccttgcacacgctctcggccagatcctgagccagcacgtacacatcgccgcccggcacctggaggagcacatagtcaaactccgcgttgaggcagatggcatagttgccggggatcgtccagggggtggtcgtccagatcacgaaataggtgcgggacaggtcgacatactggcccagcttgcccttgtcgtcggccacggggaacttgacgaagatggtggtacaggggtcgtcggcatactcaatctcggcctcggccagggcggtctggtcaaaggggcaccagtacaccggcttcatgcccttgtagatgaggcccttctccgccatcttgccgaagacctcgatctgcttggcctcaaactcgggcagcagggtgatataggggttctcccactcccccagcacgcccaggcgctggaactggccggtcatcttctcgatgtagctctcggcgtactcccggcacttggtgcggaactgggcggtggtcatctcgtcccgctttaccttcttgtccttcagaacggcggactcgatgggcaggccgtgggtgtcccagccgggcacatagggagcgcaccagccggtcatgttgcggtgcttgacaatcatatccttgaggatcttgttcagggcggtgccgatgtggatgttgccgttggcatagggggggccgtcgtggaggacaaaggtgggcttgccctcgttgcgcttcaccatcttgtggtagaggtcgtggtcatacatctcctggagcatctccggctcccgcttgggcaggcccgcccgcatggggaagtcggtctggggcaggtggacggtctggttgtagtccatgggtcagttctcctttatctttgatctaaaaacaggttggtgtaaaggcgtgcgcccttgccgaaattggcaaaaacaaaacgcgcctttgtctcctgtaagagacaaaggcgcaaacctctgcggtaccactctcattgccgcggcgtgccgcggcccctcgaaggccggtaacggggccagccgttcccgcttactgccccaggggggattcggcgggacgctcggaggtgatcttcccggcccttccctgtccgccttgcaccaaaacggcggctctctgcgcaggggcagggacggtactcgtcctcttctcggcgttttgcgaaataaaagatactcggagacacgaaacaacgtgtctccgagtatcttacccgttaaatgcccttctgtcaagggggtttacttgatttcatagtccttgccgaactggaggtggtcaaaatcgatgcggcgggtgggctcggtgggctcctcagcctcctccggactgtgggagcggctcagctccagcagctcggcatacaggccgccgtccttctccttggcgccgccgccgagatccaccgtgtcctccgcgtcctcctccggcgcctcactggccaccagcttctccacgctctgggagatgtcctgggcggcagaggcaacctggtccaccacaggctccgccggggcggagagcttggacagtccgttgaggtagtccatctcgtgctgatagagctccttgagcttgcccacataggcggcggtggcgttctgggcggcggtgaggcgcatctgctcgctgcggatgtcctgttgcagctccgcaatacgggccttggcctccgtctccgcgttcttcagcagctcggccttcttggcctccgcctgggccaccagctcgtcggccatcttctgggcggtaagcagggccttgcgcatggcctcctcggtggagcggtactcctccaccttgtccaccagtaccttcatcttggccttgagggtggcgttttccttatagagcgtggtgtagtccgccgtcagtacgtccagaaattcatccaccatcgccatgttatagccgccgaaggacgccttggcaaaggcgtgctcggaaacttcctgtggtgtcagcataacgtcattcccccgatttgttcatgtcttccccgcctgatgctccgcatcgggcgggaaccccctctttggcatctgccgggcaatgtggattcgcccggcatccgtgttttggcggtgccaaaacgcttgaaacgccggactcccggcgggacaacccggacattttcctgtcctgaagagcagttcagaaatacagcccgttgttctccagttcgtcaatcagatcgcctaaaatatccacgttgtagggcgtaataatataagtagagatggccacctttttgattttgccctcattggcataggccacgccggagaggaaatccagcaggcggcgggcgatatccttgttggtggactccaggttgagcaccaccgtgcgcttctcccgcaggtggtcggcgatctcgctggcgttctcgaagcgctcgggcttgaccagcaccacctgaagctgggtggtggtgtggatattgaccaccttgttgctccggcgctcgttctctacgggaaagatggggccggtgctgtcctgggccttgggggccttccgctccaggcggtcgccgccggtgcggtccatgcgctcgctgcgggagacgggctcgaagtcgtcaaactcctcctcttcctcttcgtcctcataggggcgggccaggcgcttgagttcatctaaaaatcccatttcggtaacctcccgaatttgttctatcctttgtgcatgggaggacggggcccaaacagggcggtacccacccggaccagggtggccccttcccgcacggcgtcctcaaagtcgccgctcatacccatggaaagacagtcaaagctagtcttattatcatccatctgacttcttatgtcaacataaagctgacgcatttttgcaaaaaacgggcggtttccgtccggcccggcggccacgggagggattgccatgagcccccgcaggcgcacatgggggctgccaaccgcctgggcggccagggcggacagctcctccggggaaatgccgctcttggacgcctccccgccgatgttgacctccagcaggatgtcctgtaccagctccagcttggcggcctgggcctcgatggcctccagcaggtgctcggagcccaccgactcaatgagctccacccggcccactacctgccgcaccttgttggtctgaaggtggccgatgaagtggagggccgcgccggcgtaggcgtcgtcgtccaggtgggcggtcatctcctgcacccggttttcaccgcagatggtgacgccggcggcaatggcctgccggatggtgtcggaggtctgcaccttggtggccgccaccagggtgacctccgacggctcccgacccgcctgccgggcggcggcggcgattttctcatttaccagcgcaatgcgctctgcaagggacatgtgtcattacctccctgtctatgactgcgtgatcacttttccgtcaaagagctccaccgaggagaggattacctcgtcgccggcccgcagggcctttttgccgtccgagccgtctgcggacttcaccagggcgaaatcctccagctgggccaggatggtgacgggcttaaactctgcctgctggcccaccaggacgtacacgccggtgaccagctcctgcttttcctcctccgtctccgggtcggtgacggtccgctcctccacgcgcactgcctgcgtaggcacgcggatgccggtctgactgtcaaagaccagctccactgtctgctttcggagcagggtggtctcagacagatagcggtcggaggacagcaccacggtcacccggccgttctccggggtctcccctacccgctccaccttcatgtccacctcgcccgaccagtcccgggagaagcggacggtgacggtgcggccctcgatgagccgcccggcctcctcctcgcccatggcgcagacaaagtaccaggtggcatcggtgaccagcttgcccaccgcgccggcgtccggctggggccgctggcggtcgagctggctgagctggccgggggtgatggtctccagcagagcgggggtgagcaggctctcatagccgtcggtctgcccggaaaagacccccgcctgactggcggtgaggcggctggtgtcctgggcggcctgggcgctcagcgccgcaatctgggcgtccaccgcgtcaatggaggactggatggcggcggcggcatcgccgtcctcttccccgccgttgaaggtaaagtcccgcttgtagaccaggctcttgagcagcagggtctcgtcctccagctgggtgagatccccggtggacaccgaggagcgcagggccacgatggcgtcgatcacctgctggctgagctgggaggagtcgccgccgctctgggtccgctccagggcgtattggagctgctccttttccatggtcaggctctgtagctcctccttccgcgccaggccggagtcattctggtagagcagggccaccgtctccccgcgggagaccttctctccctcctcgggcagcagatccacaatcccgccgggactggcgagcacgcgctcctcccgcaccagaaagccggtggcctccagactgtcgtccacagtgtaggcgtaggacagcaccagggtatagggatcgcggaagctccgccaggcggacacgcccagatacaccaggacggccgccagcagcagcagcatgacaattcggttgatcagggttccttgcttcatggcagctccttagtctgccgccccctccgcctccagagagatggcccgctccggcacaatggtggagatggcgtgcttgtaaatgacctgctgcttgtcccccgtcataagtaccaccacaaaggcgtcgtagcccgtgatctgtccccggagctgatagccgttcatcagaaatacggtcaggctggcgtgggacttgcgggcgcggagcagaaacaggtcttgcaggttgttggtcttttgcatgtggatgcactccttctatctataagatgcatccaatatataccaattatcgggcggatttcgtcgaaacggcgcggggctgtgtctcttcggcgttttcccccacggcctccgccaaacttggaagcgagtgcgctgtacccgcctgggcaaggccgccacggactgcggtgggccggaattgccctaggtttgactgtggcttccgcgtaggggcggcccttgtggccgcccggccgagcgatagggctgcgggcggtgcgcggtcaaatcaggctcttccgaagcgcttttctagctgctggcgggtcagctcaatggccactggccgcccgtgaggacagtatttgaccgcgccggacatgaccacctgggccaccttgagcagctcggcggggctgttcctctggccgcccttgatggccgccttgcaggccatggtgtggagcagggcgtcccgggccgcgccggggtcggcggagccgccggtgagcaggcggccggccagctcggagagcacgtcggggatctccccggcggccacgtcgctgggggcggcccggacgatcagcgccccgccgccgaagtcctccgcctcaaagccgaagcgccccagcagcgggagctgggccagcagggcggccccctcctccgccggaggggtgaacaccaccggctccagcagggcctgcaccatgggctggtagccctcggccttcatccggtcgaagttcagccgctcgtgggcggcgtgcttgtcgatgaagagcaccttgtctccctgctccacgatgatgtaggtgttgagcacctcccccgccatgcgccagggctcctcctccgaagggggcgcagagggttcgccggcggggcgggcggctggaaaggctgcccctaccggatgggcgggcggggcttcagccgggcggatgtgggcatccgccccgacgggccggacggtggagatgggtgcgccggaggcaggggcggattcagccgggcgggcacggccgtccgttcgcgcgtgcggcgcggcggaggttgggggggcggagacgccgttcccggcggggacaggtgcggcttcggccgggcggatatgggtgtccgccccggcggactgggggatggagatgggggcgccggagacgccgttcccggcaggggctgccggggcggcccctgtggcccggggggcggtgaagtcgtggaggggcaggggcgttgcgggccgttccgccgtccggcggaactcctccagggtcatctcccggtaggtgggggccgccggagcgggctccgccgggcggaggggagcctccgcaggccgccccccctccgccgggcgcgggggcttcacctggagggacggccgggtgcggtcggcctccagagtggacttaacggcatagtacaccgcgtcaaagaccttcttgtcgctgccgaacttgacctcctgcttggtggggtgcacgttgacgtccaccgcgttgagccgggtggtcaggtggaggacgcagccggggaatttgcccaccatcttctggttggcgtaggcctcctccagggcggccatcatggtgcggctcttcacataccggccgttgacgaaaaagtgctggtagccccgggtgccccggcagcaggtgggcagggagacaaagccggataccgacatatcctcccccgagccctttaccggcgtgaagcccagggccatatcccggcccagcacggcgtagagggccgactgcacctgcccgtcgccgggggtgagcagctcctgcttgccgtcccggaggaacttgacgctcacctccgggtgggacagggccacccgctgcaccatggcgaagcaggccgccccctcggcggcgtcctttttcaggaacttgagccgggcgggggtgttgtaaaacaggtcgcgcaccaccattgtggtgccctgggggcagccggcctcctcccggtgcaccaccgcgcccccctccagggagagggcggcccccaaatcctcctccgccgtgcgggtgagcagctcgatgcgggagacggcggagatggccgccagagcctccccccggaagcccagggtgccgatggcctccagatcgtactcggtgcgcagtttgctggtggcgtggcggaggaaggcggtctccgcctcggcggcggcgatgccgcagccgttgtcggtaacccggatgaggctcatgccgccgtgctggatctccacggtcagggcgtccgccccggcgtcgatagcgttctccatgagctccttgaccaccgacgcgggccgctccaccacctcgccggcggcgatcagatcggccacgtggggatctaattgcagaatgtggggcatagaagcacctgctttctaaaaagggaaaatggggcccccgccgaagcccagcgaagcgggttcggtggggagaggaggcacagcggaacgagcgggctttgccgtatacggcaaagcgagggatgggcagcatgtgccgacgacgtggggcatagaagcacctgctttct

SEQ ID NO: 4322 - DNA, 8033 bp, Unknown
  gut microbiota DNA sequence
ctccctatgcgcccaggacggcggaggcgagaatcagggcgttgagcaccatgtgcagggcgatggggctccagatggagccgccgttgtcgtagcaccaggtcagggccagggacatgggcacatactggaggaacagcaacaggtagcggaaatccaccgtgccgtaggaatagacgaactgccagacgcagtaaaaggcaaaaaccagagtggagagcacatagcccagcacccggctgtaccgccgcgcacagccgaagagcaggccgcggaacaggggctcctccaccaggggcatgagcaccaccagaatcaccactgtggccgccggggagagggcaaactgctgggcgtagctctccgggttgggattctgtaccggcagaggaatgagcatgaccagcagatggagcacccccgccccgacaagcccggtgccgaaggcgaacaggttttccggcagccagtccagcagcaggtcaaacccgtgccgcaggaacgtccagaagaccagaaagaccagggtagcggccaggaggtagtagaccacgttggcctcggccacgggcagttccccgtggaaagcccgctgcacccaccccatggacaggggaaagaccgtcaggtacagggcaaagaacacccacccccggcccatctcggcgcgggtgagctgcggacgccatggacggcgtttggtgtgcatggtggaggccctctctttctctcggaaattggggtgcggcccggcggagcgggccgatgcgggcagaaggtgaattgccccagaggggcaagagaagccgccctggggcgtcggcccctccggggcagtccaatcgggtatcaggacgtgcaggggcggggcttgtccccgcccgcgtttccggtgtcccgccgccgggttcgggcgggcggccacgagggccgcccctacagagtgcgtgggagaccggcggcccctctcgtcaaacgccgacacgcaggggcgggtgcccacacccgcccgccggggcggggactagagcatctgcttgagctcgtagagcaggttcatggcctcgatgggggtgagcacgttcacgtccacatcccgcaggcgggcggccgcctgggccgcgcccatgtccagcagggagacctgctcctccggctgtgcggcggccggggcgggggcggcgggtacgcccgcctccagctcctccaggatcttcctggcccggcggagcaccggctcgggcactccggccagcttggccacctcgatgccgtagctctggtcggcgccgccccggacgatcttgcgcaggaagaggatgtcgtccttcttctttttggcggcgatgttgtagttcttcaccccggggatctgcccctccagggcggtcagctcgtggtagtgggtggcgaagagggtcttggcccccaggcgcttcttgtccgcgcagaactccagcaccgcccgggcgatggacatgccgtcgtaggtggaggtaccccggccgatctcgtccaggatcagcaggctcttggcggtggcgtttttcagcagctcggccacctcggtcatctccaccatgaaggtggactgcccggcggagaggtcgtcgctggcgccgatgcgggtgaacacccggtccacgatgccgatgcgggcggagcgggcggggacgaaggagcccatctgggccatgagcacaatgagggccacctggcgcatgtaggtggacttgcccgccatgttggggccggtgatgatggccaccgtgtcgtcgcggttgtccatgtgggtgtcgttggggacgaagagggcgtgtttgagcatcttctccaccaccgggtggcggccctcggtgatctcgatggcgtcggagaggtccacctcggggcggcagtagccctgctcggcggccacggcggcgaaggaggcgagcacatccacctgggccacagcggcggcggagcgctgaatccgtcccacctgggcggccgcctgctcccgcaggtcgcagaacagctcaaactccagggcggtgatgcggtcctgggcggagaggatctcgtgctccagctccttgagctcctgggtgatgaaccgctcgcagttggtgagggtctgcttgcggatgtaggtgtcgggcacctggtcgtaataggacttggacacctcgatgtagtagccgaagaccttgttgtagcccaccttcaggctcttgatgccggtcttctccttctcccgggcctcgatggaggccaccaggccctttccgttggccataatgtcccgcaggcggtccacctccgggtggtagcccgcccggatgaagccgccttcccggacggagaaggggggctcgtccacgatggcccggccgatgagctcccgcagctcggtgagatcgtccagctcctctcgcagggaggccagcagggcggaggagcagccggccagccgctcccgcagggcgggcagcttgcccaggccgtttgccagggccaccagatcccgcccgccggcggtgccgtagacaatgcggccgatcagccgctccagatcggtgatttcccgcagggtgagggtcagctcctcccggccgatggcgtcgcccaccagctcccctaccgcccccaggcggcggccgatggccgccggggagagcaggggccgctccatccacgcccggatcagccggtggcccatggcggtacgggtcttgtccagcacccacagtaggctccccttcttctccttggagcgcagcgtctcggtcagctccaggttgcgccgggcggtgagatccagctccatgaactgcccggtggtgaagtacgtcagggtggagaggtgggacaggtcggtcttctgggtctcatagaggtaggacagcaggccgcccaccgcctggagggcggcgtcgtccccggcgggcagggcgtccaggccggcggagaactgcttctccgccgccgtgcgggccgcgtccagccggaagcgggcctcgcccccgttctcgcagcggcagtccaggcgcttgaccaggaagtccaccagggcgccgtcgctgtaggccccgtcggagagcatggcctcccgcggggagaagcggcccagctcgttgtagaggtgctcgtccgcctccggcccggtgaaggaggtgacggagcactcgccggtggagatgtcgcagaagcacagccccgtgcccgcgctgtcccggtacacggcgcagatgaagttgttgcgcccctcctccagcatggaggaggtcatcaccgtgccgggggtgatgatgcggatgatgtcccggtccaccagccccttggccagggcggggtcctccatctgctcgcagatggccaccttgtagcccttggcgatcagccgggcgatgtaggcgtcggcgctgtggtagggcacgccgcacatgggggtgcgctgcgcctccggcttgccccggtcccggctggtcagggtcagctccagctccttggataccagcttggcgtcctcgttgaacatctcgtaaaaatcacccagccggaaaaacaaaatacagtccgggtgcagctccttcatgcgcaggtactgctgcatcatgggcgtggtctctggcggcatagcgtctctcctgttctatctctctgtgtagtagcaatccagctcccagcgcagggggttgttgtcaatataggtccagatgcgcagaaagtcgttttcactgcggacaatatggtcgtagtagccccgctgccaaaggcggccggcctccagtccccgcccggcggccagatggacggaccgggatttcacgccgcctacaagccgtcccagctctgcggcggcccgcggcccactgtctgtgggggcaacccttgcgtccgcccgcgtcccggctcctgtggggacaatccttgcggctactcgcgtttggccgtctgcgggggcaattcttgtggcggcctgcgtcccggctcctgtggggacaatccttgcggctactcgcgtttggccgtctgcggggacaatccttgcggcggcctgcgtcccggcccctgtaggggcggcccttgtggccgcccgttccagcgtcaggagcagatggacatggttgggcatgataacctggtgctccacccgtactccggtaagcgcgatggactctgccacacattcccccagcggggtgagaacgaggggcgggcgaccacaagggtcgcccctacggatggaggagaggacggggcggtgcgctgaggtgcagaacgtcacaaaataggtgccgcccgcgccgtagtcccacccccgcaggcgggggttcttccgctccggcctatcgggcgtcactgcggcccaccagatagtcgatcgttaccccaaaataatccgccatgcggatcagcgtgctgacggaggcctcccgttcgccattctcatagcggtgataggttcggaggttaattcccgaggcattcgcggccacggactgagagacatgcttttcttcccgcaggagcaaaagccgttctgcaaaagttgccataaaacctccttgacattgaccgaatgggcaatgtataatagaaatagaattgaccgttcggtcaaagattggggggctatccgatggaacaaattttagacgttctctacaactatatccaggaaaaccggattgcgtattatctgaacggcgacccggaatactgtctggccgggcggcggatggacgaggcggaggagtggctggaggccaacctgccgccggaggccagggcgcggctggagcgtctggcggcggcccgcgccgagcgggacttccggtatgagcgggcgctgttccgctgcgggctgggcctggggctggagctggccgggtcaggccggctccccggatagggaccacttgttggccccggtgatcttcacgtccacaaactggccgatcagaccctcgcccccggtcaggcgcaccagccggttgccgggggtgcgggcggtgaggcccttgtcgtccttcccgtccaccaggcagcggacggtttttccgatgtaggcggcgtgcttttcctcggaaatctggtcctgccgctccaccagccgctggaagtgggccgccttctccgccttggggatgggatcgtccattttggcggcgggggtgccctcccggggggagaagatgaaggtgaacagcgcgtcgaagcgcacctcgtcgatgagggtcatggtgtcctcgaactcctcggcggtctcgccggggaagcccacgatcacgtcggaggtgatcaccacgtcggggatggcctggcgcaggcggcgcaccttgtccaggtagcccgcccggtcgtacacccggttcatggccttcagaatccggtcgttccccgcctggaagggcaggtggaagcagggggcgatcttgggggaggaggccatggtgtcgaagagcttctgggaggcgtccttggggtggctggtcatgaagcggagcaggaagtcgccggggagctccgaggcggccttgagcaggtcggcgaagtccatgggctcgtccagatccttgccgtaggagttgacgttctggcccagcagggtgatgtccttgtacccctcggccaccaggccgcggatttcgtccaggatgatctccggcctccgggagcgctcccgcccacggacgtagggcacgatgcagtaggtgcagaagttgttgcagccgtacatgatgctcacccacgccttcaccccctcctggcgcaccagggggatgccctcggcgatggagccgggctcgtcggcaatgtcgaagatgcgcccccggcgggtcaccaggcggtagagcagctccgggaaccgccacagggcgtgggggccgaagaccagatccacctgccggtaggagtccttgatcttctgcgccatgtggggctcctgggccatgcagccgcacacgcagatgagctggccgggcttggcccgcttggtgtgcaccagcgcgcccacgttgcccagcacccgcatctcggcgtgctcccggatggcgcaggtgttgatgacaatcaggtcggcctccgcctcgctctgggtgaactggtaccccatctcgctgaggtagccccgcagccgctccgagtcggcctcgttctgctggcagccgtaggtgtccacaaaggccaggggcgcggacggccgggcggcgaaccgctcgtggagcttctggcagaaatcccgctggcggtccacgtccgcgggggaaattcgggtggtctgtcgattcaagctggttcctccaaaaagagtatttcaatctcaaaatcatatcacttttcctgtcgaaacacaagcggaaaccccttttcgttgacggaaactttctgggagtatataatagaaaaaaccaggcaagagagagaggcggggccatgaaaacgctggtcatcgagcgggaggccgtaaagaacaacatcggcgtcattaaggagcgggcgggcgaggccgtgatctacgcggtgctcaccggcgacggccagggtgccgggctggtggagctggcccggctgctgcgggaggagggcatcggccgcttcgccgtcagcgagcccgccgaggccgccgccctgcgcagggcgggctttgtggaggaggagattctgatgctccgccccaccgtggaccgggcggagctggagcagctcatcgacctgaacgtggtgtgcaccgtgggctcggcggacacgggcatggccctcaacggcgcggcggaggcccgctccaccgtggtggaggcccacatccagatcgacaccggcatgggcttcggcggcttcctggccgacgagccggagaagatcctctcggtctaccgcaacctgcccaatgtggccgtgtcgggcatctgcacccagctccacgcccggaaaaagggcggagaggatctggccgcccggctggggcagttccaccgggtggtggaggccatccgggccgcgggctttgagacgggggttgtccacgccgccgggtcctacgccctgctccactgcgccgacgcccggctggacggggtgcgggcgggctccgccctgctgggccgctgccgccgcgtccacggcgacgggctgtaccgggtgggctacggcgaggtgggcatcgaggagacccgctggctccccaagggacacacggtgggcagcgcccgccccgtcgtcctccggcggcccacccgcgtggcggtgctgcccgtgggctatcagaacggcttcggcgtggcccgcgcccagggcagcggcctaggcgccctgctgcggcgctggctggccgcccggcggcgcaccgtccgcgtcaacggccagcgggcccgcatcctgggggccatcggtgccattgagaccgtggtggacgtcaccgacctcaagtgctccgccggcgatccggcggtgttcgacatcgaccccctgtacgcacgggggtttgtgcgggagtaccggtagcccggccgccctggggtgccggcccctgcaacaaacaaagagaagggaatttgagcgatgcgcgcagttgttaccagagtgaagagtgcctccgtcaccattgacggccgggtgaacggcgagatcggccaggggctgctggtgctgctgggggtgggccccagcgacaccgaggcccaggcggtgaagctggccgacaaggtgtgcggcctgcggatttttgaggacgagaacgagaagatgaacctgaacctggaggcggtggggggcgcgctgctggtggtgagccagttcaccctctatgccgataccaagtcccgccgccccggcttcaccggggccgccaagccgccggtggccatccccctctatgagaaatttatggccgagtgcgccgggcggggtttccgggtggagcacggcgagttcggcgcagacatgcaggtgtactcgcagaacgacggaccggtgaccattctgctggacaccgaccagatgtagggccgaactcgcccccgcgcccccggcgcgtccgagcg

SEQ ID NO: 4323 - DNA, 1160 bp, Unknown
  gut microbiota DNA sequence
atagcccatgaatgcggccatcttagatgttcggatttcaaacggcggggccggtatgtaagcggattctccagatggcgtgtgtatccaaagcctccacaggtgcagctggtatacgaaagaaaagcctgggaggagatgaaaggatacttaaatgcccataacgtggtggcagcctcggtgatacagaaaaccgcttcttatataaataacgtactggaagatgtgtatattgaaagctttatgtgccagaagtatccgggcagtattcaaaatggaattcaacgtaatgccgcgcttatcattcatcatattccaacgcaggaagcgcgtaaggcagaaaagagcgatggactgactattatgctggatatgattttccgctatgccagagccggaaggacagaggcagaaaaagaatatgataaacagtattgttcccgcttaaattcctgccgtaaaatcattgatgaggcagtggtaagcgctgacccggatattcgcttttatgctacgaaccgcctgatgctaaagttgtggaaatacatcagacaggccattaaaacagcggcaaagagcctgaaaaatgaaataaaccggctttcggaggaagaactgagtaagaaaattcaggagtatttaaatcggaaaatgttatgggtggcactttcagagaccatcggtgcttcggaagaacagaatgaagtggaagaggaaattgaaggctgggacggggagctggaaggggaaccggaatctcaaaatcagaacggtaagaacgaagaattagaaaatgcacttgagaaaatgcgagatgggcagaggcaggaaggaggagaagaggaaacagaggaaggatcggagatcgatgagacattatctaatcttttgcagaaaatagcagaggagaagtttctgctggatgaggaatcggatttaaaaaggaatctggaggaggaggcagcagattttaaattggacggtatccacaaagattcagtgattgaaatgcaccggatgacaacagttccccagggattggaaaaagaatataaaatgattgctccagaaataaaccgaatcacaaaacggctggaagcatcgcttgaagatgtgctggagcggctggagggaggtacgcaatcaggtctttacatggg

SEQ ID NO: 4324 - DNA, 6436 bp, Unknown
  gut microbiota DNA sequence
cggctggttgccgctgctcccccgtttcaacgctcacacgtaggggcgggtgcccacacccgcccgcctctttcattcccgtcccaggctccggccagccgggcggccacaagggccgcccctacaaagcgcggctactttccgctgctcccctcgttcaatgctcacgcgtaggggcggggcttgtccccgcccacctctttcctccccgccccagactcccgccgtccgggcggccataagggccgcccctacagagaacggctggttgccgctgctcccccgttcaacgctcacacgtaggggcgggtgcccacacccgcccacctcttttgttcccgcctcaggcttcggacaggcggctacgaggtccgctcccacttgtgtccccgcccggattctgctatactcaaaccaacttttccacactggaggcgttttttgtgggatccacccccctgtacgacgctctgcgggcctttgccgcccagcggcccctgcggatgcacatgcccggccacaagggtaaatccctgcctgcgccggagctggcggccattgcggccattgacttcaccgagctgccccccacgggggatctcttctccgggggcggggccatcggggcggcggaggccctctgggcgaaggttttccacatggcctcctgcctgtttctcaccggcggctccacccagggggtccacgccgccctggccctggcctgcaaaccgggggagacggtgctgctggaccgggggagccaccgctccgcctacaacgccctggccctgctggatctgaagccggtctatctggagcggccttggcttgcctcggaggggatcaccggccccatctccccctcgtcggtggcccaggccctagaggaacacccggaggcaaagacgctctgtataacctcgcccacttactacggagtgttgtcagatcttcccgccctggcggagctaatgcaccggcggggcggggtgctggtggtggacggagcccacggggcccatctgccgttcctgggaaatgaccacctctccgccgccgatctggtggtgacatcggcccacaagaccctccccgccctggggcagagcgccctgctgttggccggggaacggtttccccatgccgggctgcggcgggccgcctccctctacggctcctccagcccctcctatcccatgatggcctgcctggatctctgccgggcgtggatggaggaggagggcgccgccgcctaccgggccgccgcccggcaggtggccgccctgcggcgggactaccccagcgtgtccggcccggcgctggaccctgcccggctggtgctccgcgcccccgacggctttgccgcccaggcggccctggaggggatgggggtgtggcccgagatggccgacgcgggccatgtggtgttcatccccacctgcgccgacacggaggaggactttgcccgcctccgggccgccctggatgccgtggcctggggggacggcgctcccctgcccccgcctccgcccccgccggaggcggttctcaccccccgtcaggccctctttcccccccggatttccctccccctgtccgccgcggagggacgcatctgcgcccagcaggtggccccctatccccccggggtacctgttttcgcgcctggggagcgaatttgcaaaaaaactatcgcttatttgaaacaaataggttataatacactggaagacgttgaggttgtttccgaacctgtgtgtgcctcatagaatgagcaaaggagcgtctttccttcaggagggaaaagcaatgaaactgattcttgcgattatcaatcacgatgacgccaacaccgtcacccaggccctgaccaagaagggcttctcctccaccaagctggccaccaccggcggctttctgatggcgggcaacgtgaccattctcatcggcgtggacgaggagaaggtgcagaccgtcatcgacatcatccgggagcattcccacagccgcaagcaaatgatccccaccaccaccgagatgagctacggctactacccctccatgcccgtggaggtcgtggtgggcggcgccaccatcttcgtggtggatatcgagcggtttgagcgggtctgagtctttatgaacctgacccggctggcgggcaacgccccgctgaagcggcagctggagctggagacggcccggcggggcctctcccacgcgtacatcctcagcggcccggcgggctccggcaagcggaccctggcgggcctgctggccgccgccctggtgtgcgaccgccggggcggcgctttgccctgcctgtcctgcgccggctgccgcaaggcggaggggggcatccaccccgacatcgtgcgggtgggggacgacgggaaggatatcagcgtggcccaggtgcgcgccctccgcgccgacgcctacatccggcccaacgaggccgaacgcaaggtctacatcctggagaacgcccagaccatgaacgccagcgcccagaacgccatgctcaagcttctggaggagggcccggcctacgccgcctttctcctgctcaccgataacgccgccgccctgctgcccacagtgcgctcccggtgtgagcatctccccctctcccccgtcacccagcgggaggcggagctctggctggacgagcactaccccgaccagccccaggcggcccggcaggccgccgccgaccgctgcgagggcctgcttggccgggcagccgccgagctggagggacaggccgcaggcgacacccaggccctggacggcgcgctggagctggtgcgccgcctggacggcggtgacgagctggccctgctggagcactgcgtggccctggagaagtgggaccgggagcagctgcgcgccctgctggacgagggcgttctcctgctgcgggatgccctcgtctgctccgccggaaccctgcgggagtccgacccccgccggcgtgaggcggcggagcgcgccgcccgcgccctctccccccggcagctcacccaggcggtgggcgtgctggagcggctgcgcgccgcctgcggctccaatgtgggggccgggcacctggccggctggctgggggcggcactgagcaccctatgaccgggcgggcccgaccccgcccatacacctgatgcggaggtaatcatgaccgaaatcatcggcgtccgcttcaaaagcggaggcaaacagtattattttgaccccaatggacaggccgtggcccccggtcagggggtcattatcgagacctcccgcggcctggagtacggcgagtgtacccagggcaacaccatggtggaggacgaggcggtggtacagccgctgcgccccctggtccgcctggccaccgagaaggatctggacaccgtggcgaagaaccgtgagaaggaagcgcgggccttttccatctgccaggagaagatcgccgcccatggcctggatatgaagctggtggaggtggagtacaactttgaggggaacaagatcctctttttcttcacctccgaggggcgggtggacttccgcgctctggtcaaggatctggctggggtattccacgcccgcattgagctgcggcagatcggcgtccgggacgaggccaaaatgctgggcggcctaggcatctgcggcaagcccttctgctgcgccaccttcctggacgagtttcagccggtgtccatcaagatggccaaaacccagaacctgtccctcaaccccaccaagatttcgggcacctgcggacggctcatgtgctgcctgaaatacgagcaggaggcctatgaggacgcggtgcgccgcatgcccaagaacgagtcctttgtggagaccccggagggggtgggcaccgtctctcaggtcaacctgctcaaggagaccgtgaaggtacggctggaggagcagcccgaggcccccaagtgtttccacaactgcgagatctgcgtggtccgcaacggcaaggggaaactgcccgagggctatgtgccccctcccccggaagagctggccaagctgcgcaagatcacccctgcggaggagccccgcagtctggtgggcagcgtggatgccgccctcagcggcctgggcgtcgcccccgccgagccggagaagcccgccgagggaggggagcgccgctcccgcggccggggccgccggggccggggcgggagcaggccgtccgccgagcccgccgccaaaaagcccgccgaggagggcaggcagactcagccccccaggcagaagcaaaagggggagcagcagcgtccgccccggccggaaaagcagcccaaggcgcccgccgcaccatccccggcctccgatgggacagcggcccctcccaccggtgagaaaaagcgcccccaccgccgccgctaccggggcaagcccaagggcgacaggccccaaggcccgaaaccggaatcctgaccggcatgagacgggtgggcgctgtatgcgcccgcccgtttgtttgaggtgatttgctatgacggaatatcagaaaatgctgggcggccagctctacaacgcccaggacggcgagctccaggccatacaccggacggccatggagctctgccacgccctcaaccagctcaaccccaatcagaaggaggaggcccgcgccctgctgcagcagcttctgggccggaccggcgaacacttcaccatcaaatccaccttctggtgcgactacggccggcacatcaccatcggcgagaacttcttctgcaactacaactgcgtgatgctggactgcgcccccatcaccttcggcgacaacgtcatggtggcccccaactgcggcttctacaccgccgcccaccccctggaccacaccctccgggacgaggagctggagtacgccaagcccatcaccgtgggggacagcgtttggatcggcgggggcgtcaccgttctgcccggcgtcaccatcggcagccgcgccgtcatcggcgggggcagcgtggtggtccatgacattcccgagggggttgtggccgtcggcaacccctgccgtcccatccgcaccctttaaatgcaaaaaaggagctccgccatatggcggagctcttttttatttggccagcatagcggcggcaaaggcccgcgcatccgccaggtccgtcccgtcggggtgggacagggcctggtcataggcccggagcatgttttccagccgggcgtcgcctggcttctccttgagctgagtctcataccgggcccggacggcagggggcatccgccccggacagaaccaggtacccaacacctgattttcctccggcacctccgcccggaaccggtcggagagagaggcaaaatacatctcagacaggccaaaacccgccgtgccgaacagggccacccgcttcccgtggagtccctgcaaaaactcctttaccaccggggcacaggtgcccttgtccgtccaggagcccacaaagatcagctccgcctcccccacgtcccggggcagcgggccgaaggccacaatctcatggccctgacatccctcgcggatggcctgggcagtctgggcggtgttgcccgtctcgctggcatatacaatggcaattttcatcatgtcctcctctgaaaaacggcgggcggccacaagggccgtccctgcggtggccgtaacgcaatacgctgtccggggggattgacccccaactggcggaagccccgctttatttgctatgcaaaagcatcgcagaattggccatgtgcccgcttacagcggcacggccatgggatgacagcgcgtaggccggtacggcccacatgcgcaaacacttcatgtgcctgagcctttgcaccgtttcgtggcgcgccctgtgcacatgaagtgttatgtacggcgcaagcgccgccccgctagagcggggccccaagggcttatttatattttctgctctccgcaaccgccagctcgtcacagcggttattatggggattatccgcgtggcccttgacccagtggagacggacggtgtggcgctcgcacagcgcgagaagccgctcccacaggtcggggttaagggccggcttcttgtccgacttgatccacccacgggccctccagcccttggcccagcccttctgcagggcgtcaatgacgtacttggaatcggagtagagctccacctcacagggctccttcagcgcctccaaggcagtgatgacgccagtaagctccatccggttgttggtggtgtggggctccccgccggagagctccttgcggaactccccgtattgcaggatagccccccaccccccggggcccggattgcccgagcacgccccgtcggtatagatcgtgactgttttcataaatctcctatggccttcccctcgggaaaggtggcacggcgcagccgtgacggatgaggggaacgcccct

SEQ ID NO: 4325 - DNA, 2828 bp, Unknown
  gut microbiota DNA sequence
ccctctgtcgcgggagatccgtttttgtgctcttgacaatccggattataataaggttagaacttaccgacagaaaggacatgtcttatgaatcaagcgagactggcccgggtgctccgcaacatggagcgggacggactgacccagattgtaatctcctccaccgcctcggtgtactacctgacggggtactgggtggagccgatggagcggatgctggcgctttacatccgcgccgacggcacgtgccggctgttcgccaataccctcttcgccctggagccccaggaggggctggagctggtgctccaccaggacagcgacgagcccacggcggcgctggccgccgccctcctccccggcacgctgggggtggacaaggcctggcccagcaagttcctcatcgcccttctggccgcccggcccgacgtgacgccggtgctgggctccgccccggtggacgacgcccgcaagtacaaggacgccgacgagatctccgccatgcgccgcgcctcccagatcaacgatcaggtggtggaggcggccatcgccgccgtgaaggccggcgcggtggagagtgagctggccgcctatgtggagggcctctaccggcagcacggcgccgaccgctccggcgaggggcagttggtctgcttcggccccaacggcgcggatccccaccacgcccccaacgggacggtgctccgggacggggacagcgtggtcctggacattttcatccccatccggcgctactggtgcgacatgacccgcacggtgtttttccgctcggtgagcgacgaggggcggcgggtatatgagaccgtcaaggccgccaatctggcggccgaggccgtcatccgccccggcgtcccgatgaaggacatcgaccgggcggcccggaagctcatcgaagacgcgggctacggccccttcttcacccaccggctgggccacggctgcggcctggactgccacgagccgccggacaacagcgcctccagccccgccgtcgccgaaccggggatggtcttctccgtggagccgggcatctacctgccgggcaagctgggcgtgcgcattgaggatctggtgctggtcaccgaggacggctgcgaggtgctcaaccacgcctccaaggagctgcgcgtggtggactaaacacaaaactcccccggcattgccgggggagttttacttcagtccaggaactggatgccgccgccgataacgccgtcgccgatatagacgctgagggtggcgtccatgaccccctcccaaaaatgctcgtagttgggaaactcggccttcagccgggccgcaaactccgccatctcctccggcgcgccgccgttggccacggccaggttgtaccgtctgccggattggaaccgggccctgagcagctccaggatcttgtcctgcacctgtctgcggccccgcaccttggcgatgctctggagctgtccgtcgtccgagaaggtgataatgggcttgatggacagcatggtgcccgccagggcggtgatgcggccgatgcggccgccccggcgcaggtactccagggtgtccaccgagaagaaagggaaggtgtttgccaccagatggggcgcccgctcgcgcaccagggtatcccaggaggccccggacaggatctcctcccagagctgaagcaccatgatgccgatgcccagagaaccgctcctggagtcaaagacggcgatctccagatcgtcccgctgtccggcctggaggcgcaccatgttgtaggtgccggacaggccggaggagagcatgacggcgatcaccctctcatacccgtcggcacggatctgatccagcgtgtcgctgaccacgccgccctcgggcagcgaggtgcggggcagctctccccggtggagccgctcatataccccctcggcggtgatgtccaccccgtcggagtactcgccgtcctcacagcggattttcagcggcaccacatagatgggcttaccctcccgcatcggggcgggcagatccgccgtggagtcggtgagcagcgcaatcttttccggatttgacaaggcaatcatcctattctataatcagagtggcaaaacccgcataacatcgttatgtcactattatagcggctgaataccagccgtgtcaaggggaaggagggacaatccatggactaccgccaacgccggaaggagcaggcgcagcagaccgagcaggccattctccaggccgccatggagctggcccgtgaaaacagctttgacaaggtttccgtccgggatatctgccagcgggcgggcattaccaccggcgccttttaccaccacttccgttccaaggaggatctgctctcccgtggcttctcccccctggaccggcacatggaggaggccctgtccggccacgagactgacgccccgccccagcggctttggctgattctctccacctacgcctccttcattgaggcccagggctgggagctggtggcccgctattaccagcggcggctggacgcccctgacgacgcatcctccatggatcccacccgctacacgctgcgcgccatgctcgactgcctgcgccaggcggaggaggagggcgcccttctgcccggctggtcggtagagtggacggccgatttctttttccgccacttccgcggcgtggtcatcgactgggtgctccaccggggctcttacccattattgcccaagctggagcaggactacaccctgttccgggagatttttcagaccaaatagccggagggcctggacgcgttggtcgggccctccttttttacccccggatgccgggga

SEQ ID NO: 4326 - DNA, 2560 bp, Unknown
  gut microbiota DNA sequence
cggtatccgccgccgtaatcgggcggatgacccgggccggattgccggcggcgaaggagcccgcagggatgtctcgggtcactacgctccccgctccgatgacgcagttctccccgatggtcacgccggggcagaccaccacatttgccccgaaccagcagtcgtgtccgatggtcacgggcttggcatagcacaaaaaccgctccaccccatcgtcgcacaccatcccccggcgctcgtcgggcagcatggggtgcatgggcgtcacgatcgtcacgttgggtccgaagttgcagtggtcgccgatggtcacaggggcgtcgtcctggacggtgaagttgaagttcatgaagcaatggtttcccacccgggtgtggcagccgtagtgaaagcgcaccggccccagcatacacacgccttcccccagctcccccagcagctcccggagaatcgcctcccgcacctctgcatcgtcctcaaacgtctcattatacttctggctgagccggtgggctctccgcttcttctccaccagctccggctcctctgaggcaaacaacccccccggaagatacgttcctcctcggtcatccttcctcactctcttccagccgtccgcagcagaagccggagcgcctcttcccgctcgggggcaaagaaaaagtcgctcccgtggttggactcatagataaaatcccgcagaggcttgctagtatagcaggaaaagtctccgtagacggccattttgatccggtactggatgaatttctccaaaatctcccccgccaggccggtgctgaggatgaaaaagtcctcggccaccgccgccttgtccaccagcagggcggaggccccggcctcatggcgcgccgtcatggccagctccagggccgacggcgcatccacaatgcgcttctccggcccggtcagctccgccaccgggatcccgtcctgcttccaatgctgtatgcccatcggcatccctccctttctgatctctggcgttgactcggatacctcagcatagcacgccttccccgccctgtcaaatttctccggacaggcaaccttttcccctccggcgcatacccatttaggacggaggtgaagcctatgtccaggctgttgtccaaagagagggtgcgcgacctgctcctgggtctggccctgctgtgcgccaccctggccctgatgctctatccccagccctccatggaggcggccaaaagcggcctggccctgtgctacaacgtcataattccctccctgttccccttcttcgtgctctcctccctggtggtggaactggggctggcgggatacctgggacgtctgctggagggactgatgcgccccctgttccacgtcagcggggcctgcgcctccgctttcgccctgggcttcatcggcggctacccagtgggagccaagacggccatcagcctctacgagaacggcatgtgcaccaagacggaggccgagcgcctgctggccttctgcaacaactccggtcccgccttcattctgggcgtggtgggggctggggtgttcgccagcagccgggtgggagtgctgctctatctggcccacgcggccgcctccatctgcatcggcattctcttccgtttttacaaggccggcccaaccgcccggcgggaggagcggcagccccggccccagttccacgcccagcgcttcacaacagcctttaccggctccatcaagaactccttcctctccacgttgaacatctgcgcctttgtggtctttttcaccgtggtgattcagctcctcatccgctccggcttcctgcccgggctggcccaggtgctggggacggtgctcgcccccttcggcctcaccccggagtgggcccaacgtctgcttaccggagcgctggagatctcctccggtgtgtggactctctccggcgacggcaccctcagcggcaagcttattctggccgccttcatgctggggtgggccggcatctccgtccactgtcaggtgctctccttcatcgggggcagcggcctgtccgtgggcacctatctggtaggcaagctgctccacggcggcctgtccgccctgttcatcgccgtcctggtccgcctctttccgctggaggcgccggtctccgattacctggccgaccaggtggctggcattgcgggcatggatttccaccgcacactggtcatctctctggtctgcgcctgggtgctcttcctctttttcctctttgtggcggccgccgcagcgcgaaaaagccttggcaagaggcatcggagcgtgttataatgagacgttatgagagagggagggagctccatgctgtttcagaagaatatcgagcccaggtgcacctactgtcagcggggcaccccactggacgaggagaaaatcctctgtaccaaacagggtgtagtcgcccccggcgggagctgccgctccttcaagtacgaccccctcaagcgggtgccgccgccgccggtggcacccgacttcagcaggctgaaggacgaggatttcaccctgtagccctacgcccgctcccccg

SEQ ID NO: 4327 - DNA, 5960 bp, Unknown
  gut microbiota DNA sequence
ggaatacgtagggctgctggcggggctggcggcggaggcgtcgtccacgggacgggaggaggtcattctgtcccagaaggaccgggcgcgctatggcaagcaggtggtcacccaggccaacgagaggctgggagacggccatttgaccctgtctgtccagacccggcccatccggggcgggctgattctcagcgacggggacgtggaagtgaactgcacctttgaaacactggtgcgcctcctgcggggcgagatggaccggacggttgtggaggtgctctttggctgagcgctccgatagggaggcgaaaacttgagtaagatcagagacacggattatttgaccatctcagcccgcgtgcgggcgatggagaaccgtctggtgacccgggagcggatggagcggatggtggaggcccgcagcgacgacgaggcggtgaaggtgctggccgagtgcggctatgaggagctgccggccctgaccaaccgtgggctggacgagctgctctcggcggcgcgggcggccctgtaccgggagctgggcggcgcagtacccgacaaacggctggtggagctgtttcagatgaagtacgactaccacaacgccaaggccctggtaaagggggccgcggtgggggcggacgccgaccggctgctgatggagggcgggcggtggagcgccgcccaggtgaaggaggcctttcagcgggacagcctgcgggagttcaccgaccccttccgccgggcggttgtgcaggcccgggagaccctcaatggtggaaatgaccctcaactggccgactttgtgctggaccgggcctattttgcggagatggcggagacggcccgcgcggtgggcagccccttcctggaggggtatgtgcggctgctcatcgacgccgccaacctgcgctccgccgtccggtgcgcccggatggggaaggggagcgactttttgagccaggtgctcctgcccgggggaaatgtggaggcccacgtgctcacgtcaggcaagggcaatgatctggcggcggtgttccgggccggtcccctcagtgatgcggcggcggccggcgcggccctcaccgctcccggcagcggggagctcaccgcctttgagcggctgtgcgacgacgcggtgatgggctacctggcccaggcccgccgcatccccttcggggagcaggcggtggtaggctatctgtacgcccgggaggcggagttcaccgccatccgcaccatcctctccggccgtatggccgggctggacgcggacactattcgggaaaggctgcgtgaggcctatgtctaactataaaatcgcggtgctgggcgacaaggacagcgtgctgggcttcaaggccctggggctggacgtgttcccggcggagagcgcggaggaggcaaagcgcacccttcacgctctggcgaaggagaactacgcggtggtgtacctgaccgaggggtacgcggcccacatggaggcggagctggagcggtacaaggacgcgctgacccccgccatcatcctgatccccggcaaggacggctccttgggcatcggtatggccaacgtcaagcgggccgtggagcgtgctgttggggcggatattttgtagctccccctgcggagagggggcggggcgatgtgggcatcgccccctacgcccataacgcgttgggcgccctgtaggggcgggtgcccacacccgcccgcgccgaagacggagcaggccgagggagcggatcatcggcaatggccggaaggacgggcgaccatgaaggtcgcccctacgtccggaacgccctgcggtaggggcggcctttatggccgtccggacccccggcggagcccaacgaagtgggtccggcggggaggaggaggcgcaacggaacgagtgagcgttcccgtttacggggacgcgaaggatgtgcagtttgcgccgacgagaaagaaggttgaagcattgagcggaaaaattgtcaaggtctccggcccgctggtggtggcgacggggctgaaggacgccaacatggccgacgtggtgcgggtgggcgagcagcgcctgatcggcgagattctgaacatgaacggcgatgcggcgtccatccaggtgtacgaggagacctccggcctgggccccggcgcggtggtggagaccaccggcgcgcccatgagcgtggagctgggccccggcatcattgagaacatctacgacggcatccagcgccccctggagggcatcatgcggaaggcggggaacaacaacctgccccggggcgtggaggtgcccgccctggatcgggagaagaagtgggacttcaccgccgtggccaggcccggcgacaaggtcaccggaggcgacgtgctgggcaccgtccaggagaccagtgtggtgctccacaagatcatggtgccccccaccctgtccggcaccatcgagtccatccagtccggctccttcacggtgcaggacacggtggcggtgctggtggacgggaagggggagaagcacgcgctgaccatggtgcagaagtggcccgtccgcgtggggcggccctacaagcacaagtatccccccagaaccccgctgctctccggccagcgcatcgtggacgccatgttccccgtggccaagggcggcaccgccgccatccccgggcccttcggctcgggcaagacggtgatgcagcaccagctggccaagtggtcggacgtggacatcgtggtctacatcggctgcggcgaacggggcaacgagatgaccgacgtgctgcgggagttccccgagctggtggacccccgcaccggcgagtccctgatgaagcggacggttctgatcgccaacacctccgacatgccggtggccgcccgtgaggcctccatctataccggcatcaccatcgccgagtacttccgtgacatggggtacgacgtggcggtcatcgccgactccacctcccgctgggccgaggccctgcgcgagatgtccggccgcctggaggagatgcccggcgaggagggctatccggcctacctgtcctcccgcctggcccagttctatgagcgggcgggcatggtggagtgcatcggctccgacgggcaccgccggggctccctgaccgcggtgggtgcggtgtcgccccccggcggcgacctgtccgagccggtcagccaggccaccatgcgcatcgtcaaggtgttctgggccctggacgcctccctggcctacaagcgccacttcccggccatcaactggctcaactcctactccctgtacctggactccctcaagccctggtatgacgagcacctggggccccagttcatggtgaaccgcgacaaggccatgtccatccttcaggaggaggccagcctcaacgagattgtgcagctggtgggcaaggactccctgtccgccgccgaccagctcaccctggagaccgccaagatgctgcgggaggatttcctccagcagaacggctttatggaggtggactggtactccagctacgagcgccaggacaagatgatccagatgattctggactacgacaagctgtgccgcgccgccattgagaagggcgccgccaccgccgagctgttcgccatccccttccgggagcagatgggccgggccaagagcgtgccggacgaccggtacgccgccgtctacgccgatatggcccgggagatggaggagcagatcgcggacatcgccgcccggggaggtgctgaggaatgatcaaggaataccgtaccatacaggaggtcaacggccccctgatggtggtgcgccgggtgtccggcgtcacctacgacgagctgggggagattgagctgcccgacggcaccgtgcgccgctgccaggtgctggaggtcaacggcgacaacgccgtggttcagctctttgagtcctccgcgggcatcaacctggccgagtccaaggtgcgcttcctgggccaccccctccagctgggcgtgtccggcgacatgctgggccgggtgttcaacggcatgggcaagcccatcgacggcggcccggagatcctggccgaggagtaccgggacatcaacggcctgcccatgaaccccgccgcccgggactaccccaacgagttcatccagacgggcatctccaccatcgacggcctgaataccctggtgcgcggccagaagctgcccatcttctccggctccggcctgccccacgcggccctggccgcccagatcgcccggcaggcccgtgtgctgggggacgacgcgggcaacttcgccgtggtttttgccgccatcggcatcaccttcgaggagtccgacttcttcgtgcaggagttccgccgcaccggcgccatcgaccggacggtgctcttcaccaacctggccaacgacccggcggtggaacgcatcgccaccccccgcatggccctcaccgccgccgagtacctggccttcgagaagggcatgcacgtgctggtcatcatgaccgacatcaccaactacgccgaggccctgcgcgaggtgtccgccgccaagaaggaggtgcccggacgccggggctaccccggctacctctacaccaatctggccaccctctatgagcgggcggggcggcagctgggcaagagcggctccatcaccctcatccccatccttaccatgcccgaggacgacaagacccaccccatccccgatctgaccggctatatcaccgagggacagatcatcctctcccgggagctctaccgcaagggcgtcatcccgccggtggacgtgctgccctccctgtcccgcctgaaggacaagggcgtgggccccggcaagacgagggaggaccacgcgggcaccatgaaccagctctttgccgcctattccaccggcaaggagaacaaggagctcatgagcatcctgggcgaggccgccctgtcccccaccgacctccagtacgccaagttcgccgacgagttcgaaaagcgctacgtggcccagggcagcgacgagaaccgctccatcgaggagactctggatctgggctgggagctgctgagcatcctgcccaaggcggagctcaagcgcatcaagccggagttcattgagaagtacctcccgaaaaaggaggggtaatccatgcccgcgattaacgtgaaccccatgcggccggccgcatgggggcccctggatttcccattctcgggcggaatgaatccgccctgcggaaatcgcctgcggcgcttttgcggcgcaaaagcgccgtccccgcgcggcggggcccctctgaaggctgacggtggcgcaaggagaggaggggtaatccatgcccgcgattaacgtgaatcctacccggcaggagctgacgcggctgaaaacccggctgagaacctccatccggggccacaagctgctcaaggacaagcgcgacgagctcatgaagcagttcatggacgtggtgcgggagaaccgggccctgcggaagagggtggaggaggggctgatgcgcgcccacggctccttcaccgtggcctccgccctcatgtccaccgagatgctggagcaggccctgctctaccccaagcagagcgtggagctggatatgactttccagaacatcatgagcgtcaacgtgccggtgtaccacttcaagaccaagagcgacgacgccggggaaatctacccctacggcttcgccaccacctccggcgaactggacggcgccgtggaggccctgtccggcgtgctccaggatatgctccgcctggcggagatcgaaaagacctcccagctcctggccgaggagatcgagaagacccgccgccgggtcaacgccctggagtatgtaaagatcccccaaatggaggaggccatccagtatattaccatgaagctggacgagaacgagcgcgccaacaccatccgcctcatgaaggtcaaggacatgttactgaaagaggccatcgaggag

SEQ ID NO: 4328 - DNA, 795 bp, Unknown
  gut microbiota DNA sequence
ttggtgtttttgagccgctggtagaacaggctgcccacggtcgtcttccccgccccagacaggccggtgaaaaaatatacggttcccttgtgttccatgtcctcctcctcagtgatacagcggctgttccagcagcgccgggtccagctccaaaaggggcatgaagttcagcggcgcgccgtttttgttgacgaaccgtagcccccgcatcaaaacgcctgcgatctcccgccgcttggccgccatgttttccccgatctcggtcaagatctcctgccgccgctgttccgggtcctccccctcgaaaaacaccttgtgctccattgcctttttataggaggccaggatcaggtccgtgcagccgtgcagcctgccgaccagcgcgttcatcgcctcttcgtccatgggcgcgccgtcgtaatactgaaaatcatagccgtagcgccggtatacgtctcccatcagatactccagatacacccgttcctcccggcccaggtactcctcataggtccggtagatggccgccgggtcaaagccccggtcatttcccttcaaagactccgggtcccgctcgccgttgcgggaacagtaggtcatgctctttgtatagggtaggtccaaaaaggctgccagggcggtaaaggtggctttcggattcagcttgccgtcctcaaagcggaccagcaccgaatcctgaaacagtcggtcctgccagtccaccatgtagttccggttcaggacccgttcggtgagctcgtcggggattgtcagcggctcctggcccggtttcca

SEQ ID NO: 4329 - DNA, 323 bp, Unknown
  gut microbiota DNA sequence
ccccagcgctgcggcgcccacagcgcgtcccagaccgacatcgacgaggcgtttctggcgggcaaggcggccgtggaggctgcggtcgccgggtattccgacaagatggtggccttccggtgcacccgggagggaggctaccgctgcgagactgtgctggaacccctggatattgtggccaacgcggaaaagacggttccccgcgcctggatcaacgccgatgggaacggcctggagcagcccttcatcgactacgtgctccccctgattcagggcgtccctcgggccccgcaggaacactccctcccccgctatgcacggct

SEQ ID NO: 4330 - DNA, 3824 bp, Unknown
  gut microbiota DNA sequence
attatacacagcactatcacctgcaccagtgggagccggaggacagcttcctccgcaccgacttcaacggagatctttcggccattgacgccgcgctgctggggcttgagcgggacaaatgccgcgcagccatcgggcggtacacaggggatggggagctgagctacacggtatcgctgggcgcaagacccaagctggctgtggtggacaacacttcatccttttcctccggctatgagctggggctggatggaatgaatgagcggagcgtgattattacggaagatgggttccgggtgaacggttctccccacggcctgaaccaggaggggacgctgtaccgctattatgcgttcctgtagacaaagaaaacccccgggcccaaaggcccgggggttttgcgtatccttactggaaggtcacgccggtggtatcaatggtaacggtgtagctgggagtagcaacactgccgccgctttccttgaccgtgtagtggtcagcatcaacggtgaacgcgccagtggagctctcaaacacctcaagggtgatgggctcgccgtcgtcgcagaccagcagggtatactcgatggcagtaccggccggagtgacgttggcggcaccggctttcacaaagctgtcgccatgcttccaggcagtggggacatcctcaccgccctcggtggcgcaggtgatcagggcattgttggtctgacggaccgcacgataggtagtgctcggatccacaggcagggtgatggtgagggtggtgagcttcataccattctggggcgtgattccgttgaacaggccaccgcccagggaaccgttggccagaccggtgctggtatccttcacatcctcagccacggggccgaccgtggtgtcgcccacggtgtcaaccacaacgtcctgcacctcgtcggtgacagtgtagtcgaggaccttgaaggtgctttcgctgctgccgcgcttcacgtcgaccgcgctgatatcgccattggtgtaatggatcttgacgacctcatagcccagcttctcgaaggagctgatcagcaggtcctccatatccatgagggtggcatcctcggcgttcaggaagtagaaggtgcctctgttggggccgctggtgatgatcttgagggccagatcatcgttggagggcttgccgggcttgttgttgccggtggggtcctcagtcaggtagctcttcacgatgaaggcggccttcacgacgttgtcctcgtcgtacaccacatagccatactggccgtcctggaaggtggtgccggtcgcggtctcgtcgtccacgtcggtgttgtcgatgtcgtagatcagctcgtcattcttgttggccagacggacagggctctgcagcttggtcatgtcgagccactcgttatccttgccgggattctggatggcgttgttggtggtagcgtcggtatagacgttgacatagcggctgctggtgaccttcacgaagccctcagccacgcggctgggagtggtgttgaaggaagccaggttcttggagtccatatcaatggtgcagacgatgccgtcagtgcccttcaggtcgttgcgcaggttctcctcggacttgacctcttccatggtgccgtcctcatggatgacggtgtaatagaagtagtcgttgtaaacgtcgaactcgggcatcacgaagacatagtcctcgttgccgaacttggcctgagaggtgtagaggacaaccacattggccacgtcgctcttatacaggtccacaacgctgaccttgacctcgccgttggcggtgccgttagtgttcgtgccagcgtcgatgatcttcctgccagtctcggccagaacgccgttcttgtcgatcagcttggccatgttgtcatagcccacagccacggagccgtccttgccgttgtagtagtacacgatggtgtcggcgtcaatgccataggtgccgacgggatcgccgcccttgctggcgctggtgtcgatttcaacatcgcccttggagacattggcatccagggtctcgtggtcggcctggaagaactttccgtcgctgtagtcgctgccggcgtgagagccgtcaaccaccttgccgacatccagagcgggcaggtcaatggtcatcttgtcgtcatcgttgatgctgtaggcaatcaggttgccggcggcggcaccagcggcggggtacacaccagcgctgccagcacggccatcatcggtgcccaggaaggtcttgagctgctcggtggcctgctcggtcgtctcattggcgtccttccagttcttcacggaggcgctccagttcaactggtaggtcttctcagtgccgtcgggcaacagaaccttgacctgagcgtcggtgttcagcatgttggtggagaatgcggagtccagaaccagagcgtagttcttggcggccgcctcaacctcctcgaaggcgatcacgttgccgtagtcgtccaggtagaagttgtaggaggtctcaaactgcacgccattggccttgtcacattcggtcacgtcgaacttgacgacctcggtgcgggcgttggtcttcagctcatcggccttgtacttctcgccgccgacggtcatgtacttctcggtgcccttcacgttgaagtgctccatctcgccagtgacaacctcgggcttctccaggtaggtgcggccgccgtactggacgtacaggaccacgtcctccttggccatgtcctcgtagcccacgacatccttattgtccagggtgcccagggtgcggacggtcacggtctccttcttggagttgacggaggtgatgtcggccagagccttctccacggacaggacgtaatcaacctcaccgtcgccgttgttgtcgatgatggtcagggtagcgcccttcacgttggcggtcttgtcgccatacttctcggtggtgttggggatgtacttgccggagttgtagttccagaaatacttggcgtccttgtcggtcaggccgttctcgcccagcagcttgtcatagtccacctggggatccttcgcgccgctgtagagcacggtctcgccggtggtgacgacagtgttcacgtcggagaccacggggtcgccgtacacggtggagtcagccaggatagtggtcttcttgatatacaggttgacggtcttgcccagcatgtcaacgggagtgctgacattgaaggtctgggtcttgagggaggcgtcctccttgctcacggtggtgttgccggtggtggagaagatgccctcgccgttgtagatggtggtcttgccctccttcagggcggcgtcgccgtcatcggaagccagggaagcccactcgttggccacaacaacgccctgcaccttgatcacgccgtacttgtcggccaggatggtgcggtggtcgctgtaagcgatggggtagttgttggtggtgtagctctggatcatctccacgtccagggcgttgtagatcagcagggccgcgtcgtcgcggttcaggggagcggacaggtccttggtgaagccctcgaagatgccctgctcgtcggcgcggacggacacgttgatggcccagtcggcgccctcaaagccctcgatagcggggtcgtagcccacggccaccagcagcatcttggccgcctccagggcggtcacggtggcggaggggtcaaacttgccgttgccgcggccggcgatgatgccggtggtgtagcagtagttgatgtgacccttggcccagttggtgttcacgtccaccaggccggagttgacgctctggtacagagcgctgttgtccacgcccttgttcatgatgacggagagcatcttcg

SEQ ID NO: 4331 - DNA, 7317 bp, Unknown
  gut microbiota DNA sequence
aggaccataggagccgtcgggcttgccctcgatgatgccgagggaaaccagcatggaaacggcatccttgtttacaatctcgtccttatcggtgagattgttgtagctcgcagcggaggcggagacaaccatcatgccaaccagcatgatcgccgccagagccaggctgagagcccgcttgaggtttctcatttggatttcctccttctgaattttgagccagaggggcgtatgacgccccttacatgggaggaaagaatgcagctttcggggaatagggatataaaaggcggggaaacagaatcaaaaggttgctatggtagacgtttggtagacaatacgggagcgggaaaggagaaaacgccttggaacccaaagggttccaaggcgtttctggtagacttttggtagaacaaaactcattccacaacgacgatgcggaccttgccgccctcctcgggagagcggtcatagtagacggtgatatcgtcggagaaggccagcgccagattcagcgcaaccttgtggtcgccatcctcgccgggcttaaaccaatctccagtagtcttattgtagcactctaccgcgtcggagatggggatcaccatggagttggtggtcaagagcatggcatcggtatcgaattgggcgcggcggatgcccttggcctcgttcagcggcataaacgcggccatgcgattctggccgtccaactggtccagagagccggcgacgccgcccatgcggttggtcttggcgccgtccacagagccgaccacatacggtgtcatcccttttggaaagctgccgttggtaacactaatctcaccgttcttatactcaccgttaccattaggattaccaggggtttcttgatagccggcaggctggtaatgaattataccgtagtcatagcggtcgccggtaacatcgttaagcaccagcttatccacgcggccggcccagtcatagcccacataggtaatcttgttggccgggatgctggtgatggtaatgtcgctgcggtcaatctccaccagcctgccgttgcctacctgctcaaagaagcgggcgccggcggagagctccttagtgcccatgcggttggtggtcaggttcagcgcggtggaggcgccctttccgtttaccttgctcagggtcagatagtcacgcttataggaggataccgtcaccaggcagccgttgagcttggcggcggcggctccgctgtaagtggtctggccctccagagtgaggatgccgtccagcagctcgatggtagccttggtgccatcaactgtggccacgccgacggcgttggacttggccacatcgggagagacagcccccgccacctggccggtggtggtgagcagcagggtaaccttgtcgcccaccttgaatgcagcaagatccgcctgtgcgctgggcagtacggtgggcttagcgcccattacggtgacggtggagggagcggcggcgttggggtaagcgttctcatacaggccgctgagcttcagatcggagacaaacagggtatcggaggacttgtcgtaggtccccacgtcatactggcgcaggtcgctgagctcggcggggatgccgttcttgtagatctgggccggggtcttgccgccggacagggaggcgaaggggttgttggagccggtgggtttgttcttggccaccagcacgttgtcgtcgctgacgctggcggtcttggagggcatatagatgtattccagcttaccggagctgttgaagcacagacgcaggctggcgccggagcgcaggctggtccagatcttctcgtaggtgctggcggcctgctcgtcgctggtatagaccggggtctccagcgtgacggagatggtttcgtcgcccaacacaggaatggcgttggcctccgggctgcccatgacggtgacggagcggaaggtgctgccctcctcggggaggacggccagcagtttcttgttcttatccagaacgagctggccgcgggtaccgttgagctcgccggggaaggagacgcggtcggtcttataggtgccggaggtggtgagcaccgagccggtggtgccgtcgtcggcagtggcgtcggtggagagaaccaccacgttgtcctccagggaaccgcccagggtggtcaggtacacctggtcgctgtccttaggctcagtaaagagcaggttatagaacagaatcgccgcctgcccgcgggtgagggtggccgcgccgcccaggctcaggccgtcggccagccccgaggactgggccacggccacatagccgtcataccagttggagccggtggccacatcggcgctgccatagcccagcacccgcatgaggatggtgacggcctcgccgtaggtgatggcctggttggggcggaaggtgccgtcgcccacgcccataatcaggcgtgtaccgccagtggtgccgccattttcaccagcggtgccgccgatggtgatggaggaggccaggttcacgtagcccctggcccagtaggtggggcccacatcggtgaagatggtgcggttgcgctgggcgggctcctcagcgccgcggcccatgatctccacggtcattttgcagaactcggcccggctcagggtgccgccggggttgaaggcgccgccgccggtgccgtccaccacgcccagcaggcggagcatctccgcggcgtcggcgacagtggaatcgctgatgtcggagaagccgcccgagccggacgccgaagcgggaggaaataccagtagcccggccagcagcgcggcggacagaaggcaggaaatcagtcgttttaatctcatattctctctcctttaatcggcccgcagggcatccaccggctggaggccggaggccttgatggcagggtacaggccgaagatgacgcccagggccacggaaatgaagaaggagccgacggcaacgctcgggctgggccatagaatcattttaaaggacaatttgcccacgatcaaggtgccgatgtagcccgcggcgataccgaacaggccgccgatgccgcagatcatgcaggcttcgatcaggaactgggcgatgatgctcttgcgctcggcaccgatggccttgcggataccgatctcccgggtgcgctcggtgacggtgaccagcatgatgttcataatgccgatgccgccgacggccagggagatggcggcaatgccgcccaggaagcgctgctgcatcttgtcctgctcctcgccctgctcctgccaggtattgggggtggagacattgccctcattcgggcccagcaggctgtccaggtagccctggagcagggagacggccttggtggtcgtggcggagtccttggcctttgccacaaagctattgattttggtattgccgctgatgatgcggttcacggtatagggaatgagcacatagcggtccataccggacatgttgttggggtccttctcctcaaagacgccgacgacggtgaaggggatgccgttgatggtgatctccttacccacggggtcaatgtagttgaagagggtgtcggcgattttggagccgaggacacagacctggctgtagttttccacgtccaggaaggagatgtcccggccccgggcgatggtgaagttgttgcagagggagtagtcctggttgcccatgacgagctggggggattcgtcccagttgctgttgtggctgtccatggacttggcgccgtacttcagaatggtctggtcgtagtagtccacggtgggggtgaggcccagaatgtagtcgtcgagatcctccatgcagtagtcccggatggtcttggtcagatcccgcccggaggggctgtaggcattgatgttgaccacgttgttgcccaggctctcgtagtactcccgcatctggcggttctggccctcggcgtaggagaccaggatgatgacggcggccaggccgatgatgacgcccagcatggtgagggcggagcgggcctttttcgcggcgatggatttaaccgcgatcttgaaggcttgggtcaggttcaaaggaaggccccctctctgtcgccgtcgtagatgatatgcccgtcggagatgcgcacgacgcgctcggcggtggcggcgatgccgttgtcgtgggtgatgaggatgatggtggagccgtcgtcgtgcaggccgtggaggatctccagcacgtgcttgccggtgcgggagtccagggcgccggtgggttcgtcggccatgatgatggggggctgggtggcgatggcgcgggcgatggccacgcgctgctgctggccgccggacatctcggtgggcttgtgcccggcgcgctcggccaaacccacccgctccagggcggcctccacccggtcggcccgcttggaggcgggcacgccctggtagatgaggggcagctccacattctcccaggcgttgagggcggggatgaggttgaagccctggaagatgaagccgatctgcttgttgcggatgtgggcgagctgccggtcggacagctcagtgacgtccacgccgtccaggtggtagtccccgtaggtggggatgtccaggcagcccaggatattcatgagggtggacttgccggagccggactggccgatgatggccaggaattctccccggtccacggagagggagacgccgtccagtgcgcggacctcgctctcctccccctcgtggtagattttaaagaggttttttacatcaatgagcataccggggccctctttaatagtacatttcgtcggggttctggtagccgataaagacctcctggccttccgccaggccgcgggtgatttccaccttggaattatcggacaggccgacctcgacgggcacggcccagaagccctcggggcagtcccaggtggggtcgggctccagaatggcgttggcgggggcctccttggacttgacccatacgatgacgccggtgctgtcgtcgctggcgccgccggaggagccgcccatggagccgccgtccacgacgacgccgccgccgggcatcggcaccgcgatcatacccaagggatcagcaaaagcgccgccggagtaggactggggcagagcttccacgccgccgtccaccatgccgccgtccatcatgccgccgtccatcataccgtcgtccatcatgccgtcatccatcataccgtcatccatcataccgtcatccattccggcggagggatcggcatccagggtttcggggagctggacgttggcgaagctgacatacttgacggcctggacggggacggtgaggcagtcctccgactcgctggccacgaaggagtattcggcgtaagtaccggggatcatgctgccgtcgtagttgtccacggtgacgacggcgggaatggaggccacgccgttctcgccggaggcggtcatggatacgctctccacgatgcccacgtagggcgtgccgtactggttgatgtccaccatcataccggccttgatgtagcgggcgttgcgctcgtccacctgaatttcgatgatcatctgggaggtgtcggcgatggtgatgccctggccgctggacacctcctggccctcggtcaggctgcactggagaaccgtgccgtcaatgggggcgacggcgttgtacttctccagctccttggtggcctcctccagcttctcctgggcggccttgagggcgttctccttggaggcgatctcctcgtcggtgtccttggcgcccaactgcaccaggagctgcccggccttcacgtcgccgtagttcagcaggctgacgcgctccaccgggccggtggccttggcggtgatcttggtggactcgtagtactccagctttccgttctggtaggggtagatgggggtgccgtcggcggcggtgaggccggcggaggcgtccatcccctcggcgagggtgccggggttgtccagcaccagcaccacctcgaagtgggtggcgccctcgggggagacaaagcgcaccttgttgatctgctccaccttgccggtgacgggcgccatgatggcggggatggagatctgcgcggtctgccccaccttgatgtcgccctcataggcgtagctgtagtacagggagaggcgcagcttggtgtcgttgaccagggtggcgatggtgtcgccctcgttgacggtgtcgcccaccttgagatcggccacctcccgcagattgcccgcgtggggggcggtaatgctcagctccgcgatcttgtcatagacggcctggagctccttgttgcagttgtccaccgacttctgggcctcggtcaccgcgtcgcgtgcggtggtgtcgtccatgcggtagagctgctggcccgcggtcacctggtcgccctcctggacgaagagctccagaatggtgcccgagccgggcgtgacggtggcggagtccttggctttggtggtgccgctgccctccaccatggactggatggagccccgggtgacgaagtcggtcatgacctcgcccttggagccgtcctcccggaatacaaagtaccacaccagcacgacgagcgcgatggcgatggcggcgacaatgagaattcccgcgatcgtcttgccccggcccttgcgtttcttcttcggcccagtaggggcggccgggggcgcggccggcggggtcatcactggggtctgctgttcggtcatgtctgttcctccctaaagattggcgattggattgcatttaccattgtaccacaagccgcggggcttggcattacaaagcagtgacaagttcttaaggaaaccttaaatttgccgcggctatctattagacgaaaaaaacgcccaaaagtttccgcagtttccaaaactgtttttgccgcccctacatccgggatttcgtttccggcgggctgtcttgcggcgcttggacgtaggggcggggcttgtccccgcccgcgatctgcccgacggcccctgcaaagaaaggcgcatcacgtaggggcggggcttgtccccgcccgcgggcggccataaaggccgcccctacggatgccgggtgttgtgggcgggcgagccggggcaaaaacagcccccggggggacgcggatgtcctcccgggggctgcgataccttataatacaaagagggaaacggccggttctggtcggtttggcagggaacgggcgttgttttacagctttgttacaaatgcgccggaggtgttgaccttttgcgaaagatgctttatcatgcgtacagaggcaaggggagtcatacgcccctctggctcaaaattcagaaggaggaaatccaaatgagaaacctcaagcggactctcagcctg

SEQ ID NO: 4332 - DNA, 1963 bp, Unknown
  gut microbiota DNA sequence
tggctgggcattttggaaggttcccagccagtcgaggttgaggggaatgggggtaaggaaggaatctggtcggacggcctccccatgaaaatcgctgccccccgtgatatggaggccgtatttgtctgcaagacgcagataggcggcggtctgttcgggggaatgccgggggtaaaagcactcaatcccatccagccccgcgtccttcagtgcacggaggatttcctccaggcgcccgtgggagcagccgagctggcagggatgggccagaaccgcctttccgcccgcgtcatggatggccgcgatgcattccggggcgccggccttccaccgctcaatgcgctggtattcgtccgtgtccagatagcggtcgaaggcctcccggagggaggagacatacccgcgccggagcatcacccgggcgaagtgggggcgggcgaccactccgccgccggcgagggcctccacctcctccagcggcacgtccagccccttcccgcggagaaatgcggcgatgcggtatttccgctcctcccggctggcgcggagcctgcggcagagctccgccagggcgggacactcggggcccagattgaggccgagtatgtgcatgtgacggtcctcccgggcccccagctccaccccgcggagcaccgtcaatccgcaggcttgtcccgcccggacggcctcctccgcgccgtccatggtgtcatgatcggtgactgccagaatctgaattccggccgccagggccttggcggccagttgggacggggtatactgcccgtctgacgcggtggtatgggtatgcagatccgccggacaggtcataaaaaccgcctcctcaattcttcaccgccacaacgcggatgacggggggatcgtcgttgccgtagggggcgaagccggtctgttccctggcgtactcgatgcggaagccggcctgccggagggcctcggtcagctcgtccagcacaagaaaacggcggtagtggttgtcgtagaaaaaggcgttgcgctccagcgcctcccccttgccgtagagcgggtcatggacgctgcgcacctcgatgaagaactttccgcccggcttgagggcccgggccatgctccccaggagcatccgctcctgcttctggttgatggcgtggatggtaaagcggctgtaggcgtagtcatagctctccggctggtggagggtgtggctgacgaagtcgccgcatacgaaccgggcgtgtgggaccggctgctgccggagcatgccgatggccgcctcagagaggtccatcgccaccacgtccagccccagagaggcaaagtagagggcgtcccgcccgttgccgcaccccagctccgccagcgtccgccccggctccaccagggtggacacataccgggcgaagggggaggggctggtggggcagagcttgttttgataatacaggttccagtaatcggtattgtcgatggggtgctccacgatattcgggtagagcgccccctcgatctcctctaccagctccagcggagtgcgctccccgtcattctggagcacaaggtcggggctttggggctcgtcaaagggcagatccacccccaccacattgcgccccccggtatagaggcccttctggttgcgctggatgagggtctcttttttgacccggatatagatttccttgtaatttggaatatgctcccggttccagcggcgcacagtgtcaaacatggcgatggagcagcacaccacgtcgataccctggtcggagagcagcctgcacacccggaagatccggcccgcccagcgcaggcggtcatcgttggtgtagcccacatcctcgccgaaggccacccggatttcgtccccatccagatagaccgcattgggcttggtgtttttgagccgctggtagaacaggctgcccacggtcgtcttccccgccccagacaggccggtgaaaaa

SEQ ID NO: 4333 - DNA, 951 bp, Unknown
  gut microbiota DNA sequence
ataagcggggaaccgggtaacgcggccagagaagccgcggatggagcggtgccccgttatgcactgatatccgaagaaaagagaaagattctggaacatgccagaaaccaggcagaacagtctgccgcccggattttagaggacgcttacgcccagcgggataagattgtgaacacggccctgacggaagcggagcggctgaagcagcaggcagaggaacacggctatgaagacgggataaaccgggccgaagcggacatatccgatgggctaaaaatgattgggcggtccgtggaacaggcgggacgccagctggaagagcactcggaggagataaaggcaagaattacagagatggcccttgtgatcgcggaaaaaattctgcagagagaagtaggcgccggtgcagagggactggccgatttagtggagcaggccgtgatgtcggagcgggataagaatgagatcaccgtgcatttatcggatgactccatcactctggtggaggaactggagacacgtctggaaccattgagagacagaaacggcggatacgttcgcatcaggccggaacagcagcagcctggctatgtgcagattgagacggaggaagggatcgtggacgcctccgtgtttgtacaattggagaatttaaagcggcagctggcggaattgctgaaatagtgtgacaggcggcgcataagatgatagagaatgtgagacaggcggttcagaacgccaatttgtatacatatctggggaaaatagacaagatcgtaggaaccacggtggaagccatggggcctgcctgcaggatcggggatgtctgtgccatcgatgtcccgggagacaacccgccggtgaaggcggaggtcgtgggatttcgtgaaaacagggtactcctgatgccctacgaggagacagaaggcattgggtacggaagcgcggtcc

SEQ ID NO: 4334 - DNA, 813 bp, Unknown
  gut microbiota DNA sequence
gtgtggccgaagccgtcgttggcggcggcggaaactccttcggcgatgaaggcgccgtccgcccggtggattccctcagagaccgcgatcaggcacttgttcttcgcctgatagacctggtggacatccgccagaaagcgttccatgtcaaaatccacctcgggaaggtagatgagatccgggccgtagcccgcccaggcagccagagcagccgagccggccagccagccggcgtggcgtcccatgatctccagaacggtaatggttccgttgtcgtacacatgggtatcccgttggacctccatgcaggtggtagcgatgtaccgggctgcggagccgaagcccgggcagtggtcggtgccgttgaggtcattgtcaatggtcttgggcacgccgatgacgcggcacgcatagcccacggactgcatgtacttggagattttgttgcatgtgtccatggagtcgttgccgccgttgtagaagaaatagcgcacatcatacttgcggaaaatctcgagaatacggcggtagtcggtgtcatcctggctgggatcagccagcttgtagcggcaggagcccagcgcggaggacggggtgtaccgcagcagctccagctccccggcatcctcctgccccatatcgtacagccggtcctccaggacgccctggattccgttggccgcccccagcacccgggtgatgcagtccgtgtccagggccctgcggatcaccccgagcgcgctggcattgatgaccgcagtggggcctcccgactgcccgatgatgcaggctcctctcaattcactcatgaat

SEQ ID NO: 4335 - DNA, 7808 bp, Unknown
  gut microbiota DNA sequence
cgtccacctctgcatgaaggaccctgcgctcaactccgcccccgtgggcggctgcccctgcggcggctgagccgcaaggagtgaccgaggaaagaggggtgaggaaccaaacattgctcccggtctattgggttccaataattgaaaggagaatgattatgaaaaagctgttgtctcttgtactttcgtttgctcttgtctgcacactgatttccggatgtggcccgaaagggggaggaggaaactcgagcaaccagcctctggacgccgctgaaacgaccttcggcctgacgcccctgccggagcgcaccacactgaccatcggttttttctccggctctgcccactccatgccctggtatattgctgatagaatgggattttttgatgaattaaacatcgatgtggagtatgagtcctttatcggcggcccggccatgatggaggccagcgccagttgggacatctgtgatgtgggtgctcccggtattctgaacggcatgaagaactatgatatccagatgctgggcctgtgcgacaacgagtacaataccgccctgtttgtccgtccggacagccctcaggccgccgatcctaccaatcctgaagtatggaaagggattgagtgcattctgcccaccggtacgaccctgcagtacatgttcctcagctatcttcagtcactgggactttccgcggatgacgtgacaattaccaatatggatgttacgcccgcgctgaccgccttcaatgccggagagggcgacgcactgtgcgtttggaatgccgtggcatacaacgccgaggacagcggactcgtccgtattaccgatgtcagcgaattgggcatcaacaatgtctgcggactggcggccacaaaggatgctatggagaataagagcgacctgatcgacctggcctggatggtctattatctgacttgggactggtgccagcagagcgaggacaatatggcgcaggcggtggaactctatgtggagtcctgcgaggacgagggtgtggtatccaatgaaagcatctgtcagcgggctttggatatctttgcctgccccagcccctctgaggccgtcagcgtgatgactacagaggaagaggatcgccttagcttggcggatcgtccggtgttggccgctgaaaacgatctgctggagacaatggactttttcatctccatcggcagctatactgaggaagaccgtaccgccatccttgataaggagctggtgaactcctctgtggcggagcggtgcgccgagacgcttaaaacgctgggctatctggaataatcagctgcacatctgcgcaacccggggctgcattgtcgttccgcttaggcacgcagtgcagcctccttgcctgccaaacggcggggaaacttgttgtaagggggaagtaatatgcaaaatgcttccagcgcgggccggaagctgaccaacgaggagcgcgtcgaagtggtcaagcggcagaaaaagcgcaacagcttccaactggccatgctgtcggtcatcggcatattgggttttctacttctctggcaggcagctgttctggcgggtgttctgcccagccgctacgtcccggcgcctacggaggttatcgcactgtttgctacaaagctggtggatcccaatccggacggcgcggtgctgggggttcacatcatggccagcctccaggtggccctgacgggttttctgctggcaattgtcatcggaattcctctggggctttttatgggctggttccggggattcgacaaatttatgcggcccatctttgaaattctgcggcccataccgccggtttcctggattccgctgaccatcatctggatgggaatcggcctgcaggccaaggcatttattgtattcttttcagcctttgtaccctgtgttatcaatgcatataccggcattaagcagtccagcccggtgctgatcaatgtggccaaaacctgcggagcctccaattttacggtgttccgcaagattggaattccgtctgccatgaccatgacctttgctggcatccgcgtggccctaggaaacgcatgggccacgctggtggccgctgagatgctggcggccaatgccggacttgggtacatgatcctccagggccgacagtttgcccgggccgacatcattatcctgggtattgttgtcatcggcgtgatcggcgtcattttcacctcggtcctgggactgctggagaagaaagtgctgaggtggaaacgatgaaacagagcagtaccagtgttattgtcatgagcgacgcggagcgccgtgagagactccgcaaccggatttacgccgtgtttcctgtagtttccgtcctgcttctgatcctgctgtggtttttggccgcgggcgcggaaaacagcacctttccctctcctgtggatatttggaatcgattcctgctgctgatggaaaaaccgatcaagcagctcaacctctttggccacatttgggccagccttctgcgcgtatttattgccctggcctttgcctggctgcttgggatctctttcggcattctgatcggctggaacaagaaggctaacgcactactggggcccctctttaccgcctttcgctccgtgccgcccctggcctgggtgccgttgatgaccatgtggtttggcaccggtgaatttcccaaaattctgattgtatttatcggcgcgctgatgccggtggtggtcaacacgcaggcgggcatttccaatgtgcagaacatgtacctcaatgtgggtaccattttccacgccaacaagcggcagatgctctttgaaatcgctattccatcggctctggacgccatttttgccggtgtgagaacctctacctctgccggctggatggtggtgctggctgcggagatgctgggcggaaagtccggcattggtttcctcatcacccgcggtatggactccggagactatgccctgtgtctgttgtccatggtgtgtatcggtttggtcggcgcgctgctggccatcattacccagctcttagaaaggatggtttgtccatggacggcaaaaaagtcaaactgagactggagcatatttctcagagctacattgtcaaaaatgaggtgtcagacgccgtggttgacgtgtctctggatgtgtacgacaatgagtttctggtcatactcggccccgggcgctgcggtaaaactgtactgctgaatatgatagccgggctggaaaagccggtggacgggagtctcttcctggatggagaggagatccatgggagcgacgagcgtattggcatggtgtttcagaagctggcgctgatgccgtggaaaaccgtaatggaaaacgtagagttcggcctcaagatgaagggtgtgcccaaggctcagcgccgggagacggcccagaagtacatcaacctggtgggcctgcagggctttgaaaaaagctatcccagccagctctccggcggcatgaagcagcgggcaggcattgcccgcgcctataccaacaatccggagattatgctgatggacgagcccttcggacaactggacgcccagacccgatattccatgcaggacgaggtgctgcgaatctgggaaagtgaaaagcgcacctttatcttcgtcaccaacaatatcgaggaggcgctctatttggccgaccgcattgtgttgctgaccaactaccctgcgcaggtcaaggaaatctatgacatcaacctgccccggcccagagatacggtcagccctgagttcctgcgcctgcggaaaattattagtgacaacacggatctggcgctctgacggaggtggttaaggatgagcgaaccaaagagtgaatacaaggtggaggttaagaacctcacaaaatattttggggatctgcacgtgctcaacgacatctcctttaatgtcagaaagggtgaatttatctgtattgtgggccctaccggctgcggtaagaccacgtttctcaacctgctgacccgcatttacatgccatccaagggcgaccttctgatcgacggagagtccgccgaccccaaaaagcacaatttggcctttgtgtttcaggagccgtcctctattccctggaagacggtggaggaaaacctacgctttgggctggagctgaaaaagttgcccaaaaaagagatcgacgagcgggtggaaaacattattaagctgatgggcctgcaaaactttcgtgacgcctatccgcaccagttgtcggtgagtaccgagcagcgtattatcatcggccgggccttcgccatgaacccggatctgctgctgatggatgaaccctatgggcagatggacatcaaactccgcttctacctggaggacgaggtggttcgcctttggaaggagacgggcagcacggtgttgtttattacccacaacattgaggaggctgtttacctggccgaacgcattctgatcctgtccaacaaacccactacaattaaagaggacttcaaggtagaccttccgcggccccgcgatgtgacttcgccggagtttaccaaaatccgccagtatgttaccgatcaaatcaaatggtggtaagggaggcttttcaaactaatgtatgacgttctgatcatcggctgcggagtaattgggtctgccatggcgtatacgctgtcacggtatcaactgaaggtctgtgtatgtgaacggttcaacgatgtggccaacggagtaaccaaggccaacagtgccattctgcacgccggctttgactgcccgcccggcagcctggaggcccgcatgaacctggagggcattgctatggcccgggaaatctgcaagaaactagatgtagagtaccgggatatcccctcgtttgtgatcgcctttgacgagcgggagatggagtatgtaagggagctctatgaccgcggcgtggccaatggcgtaccgggcgtgcgtattattgaccgggaggaggcgctccggctggagcctggcctcaatcccaagctgatcggcgccctgtatgcccctggctccggtattattaatccctgggagtacgccgttgccatggcggagacggcagtacgcaatggcgtggaggtgaagttgtcatcccgcgtaaccgggattgagcggaatgaggatcactttgtggtgacaaccagttccggaagctatgaagcccgctatgttatcaacgccggaggggccttttccgcccaggtttatgagctggtggggggccacgggctgaaacagacaaatttttgcggtcagtattacgttctggacaaaagccaggggggcatcattaactccgtggtattcccctgtcccgacgagcacggcttcaagggaatcctggtggcccccacggttcatggaaacctgattgtgggtcccgacgcatatcaggtggaggatggcgaccatgtggccacggtcgaaccctatctgagtcaggtgaagagcggaggactgcgctctgttccgggcattgacttccgtcagacgattcatgagtacgccggagtgcgtcccaatacgcaaataccagactttgttattgaagagtcccccatttgtcctcatttcatcaacttggcgggtatcaagtcacccggactctccgcagctccggccattgccctggagggattgcgcatactgtccgggtgcggtcttgagctgacggaaaaggagacgtttatcgaccggcgcaggcgcattaagttccgggaactcagcaatgcggagaaggccgcggtgattgccgaagatccgctctacggccgggttatctgccggtgtgaaaccgtgacggagggggagatcgttgaggcgattcaccgtcccattgtcccccgttccattgacgccatcaagcgccgctgcaacgcgggtatggggcgctgtcagggcggattctgcggcccccgggtgcatgagatcctggcccgtgagttgggtgtttccccaatggatataacaatggatgaggaggggacctggctgctcagctcccccatcaaggaggtgtccgtccatgacgcttaactatcaggtggtagtggtcggcggcggccctgccggactggccgcggcctgcagcgcgcgtgaggcgggagcggagcgggtgctggttctggaacgggacaaggaaccgggcggcattctgaatcagtgcattcacaacggctttggactgcactatttcaaggaggagctgactggccctgagtacgcgggacgttttattcagcgggcttctgagctgggagtagagatcctgctggatactatggtgctctctgtggaggaggatcacacggttcgtgcggtcaattgccgggacggactgctggagatccaggcggatgctgtcgtgctggccatgggctgccgggagcgtacccgtggggccattgccattccgggagaccgtccggccggaatttttacagccggtaccgcccagcgatacattaacattgaaggctggatggtgggccgccgggtggttattctgggcagcggagacatcggcctgattatggcgcgccgcatgacgctggagggggccaacgtattggcctgtgtggaactgatgccctactccaatggattaaaccgaaacattgtgcaatgcctgaaggactatgggattcccctttacctctctcacactattacgaatatcgtggggcgggagcgggtggagcaggttgtggtctccgaggtaggcgctgaccgcaggccaataccaggtacggaaatcacgtttgactgcgacaccgttctgctgagcgttggacttattcctgaaaacgagctgacccgcgccgcaggaatttccattgacagccgaaccagcggcgccgtagtttttgaaaacatggaaacggtgactcccggaatttttagctgcggtaatgtcgtccatgtccatgatctggtcgactttgtcacggcggagagccggcgggccggtgcagcggcggcccggtatgcggcggcaggtcagagctcccctgccctgtcctgcctggaggtgcagaatggcgcgggggtcacttacacagtgccgcagaagatacggcccgcccatgtagagaagggcgtggatctctttttccgggttgacaacgtgtaccggaaccgtcgtatctgcgtgacctcttcaggggaggagctatgcagcttctccagggagcacatggctccgggtgagatggagcacattgtcctgcccaagcgtctgctggagcgggcgggggacgggaaactgacggtttctctggcggcggaaaggggggcgaaggaatgacggagcttacctgtattgtgtgccccaagggctgtcgcctgaatgtggatgaggagaacgggtttctggttacggggtatggatgccccaggggaaaggaatatggacataaggagctgacagcgcccacccggacgttgaccagcattgttcggatagaaggggcaattcacccctgctgcccggtcaagacctcgggggagattccaaagagattgattatccaagccatgaatctgttaaaaaaagtccgcctcagcgctccggtggccgccggagcggtggtggttcaggatatctgcggaacgggtgtggactggattaccacaaagaatatgtagacagtcaaggcgctcaacagcccagaggccccggaaccagacggttccggggcctctgttatgctgattgcagttcgcccgccggaggcggggttcatgaaggacggcgttccagattacacgttaaaccggaacagcac

SEQ ID NO: 4336 - DNA, 6907 bp, Unknown
  gut microbiota DNA sequence
agcctgtcggaaagaatgttccgacaggctgcggcgcatggccttttgccatgcgccgttttgccaggtggcggggaggctcagtccagcggcttggcatccggtatcccatccctctccccgctggcctcccgacgaacccggcggaagtagcggatcaggaagaacagggtaatgagcaggcagagggactcggacaccaggggggagagccagatgccgttggcaccgaagagaaaggcgagcaccaccagacagccggagatcagcaccagccctcggccgaaggagatggtcagggagggaatggggtgctccatggcggtgaagaagccggagatcaccacattgaagcccacaaagaggaaggcgaaggagtacagccgcagagcggacaccgaggaggcgaacagggcgctgtccggctggaggaacaggcccaccaccgccccggccagcacctgacacaggacaaagaagccggcggcgaagcaggcggccaggcggatgccgtaggtgaggaacttgtggcacaccggccgctcctccgcccccaggtggtagctgcacaggggctggatgccgtgggcgatgccgatcacactgttaagcaccagggtattcacatagctgatgatggtataggacaccagggcgtcagggccgatgacacgctgtatgatgtggttgaacaggaagatgaccatgccgttggagagctcgctgaggccgtcggcggtacccagggggataatgcggcggtaggcgccggggtcgggcttgaaccggccgaaccgcaggggatagcggtgggtgagaaaatagacgacaaacaccgccgtggacgtggcctgggccagcccggtggccagggccgccccccacaccccccagtggagatgcatgacaaagatgtagtccagcaccacgttcatcaggccgcaggagataacgccgatgatgctgacatggggcgcgccgtcggccttgacctggacctccaggttgtaggacacggtgaaaaaaacggagaagcaggcgatgacccccacgtactcctttaccaggtggtggttttccccggtggcccccaggaagtccgccacccagtccaggttgaacaggaccagcaccgccaggagcagggtggcggcgatgaccacgaacaggttctggttaaagtagttgcgggcccgctccacgtccttctgtcccagggcgatggacaggacggtggaggtgccggtggccagtaggatgcccagggtgaacaccagggacacgaagggcagggacaggttgacggcagtgagggcgtgctctcccacgccccaggccacaaacatgccgtccaccagggagtagagcgagaagatccacatggacacaatggatggaacggtgaatttgaaaaagcggcgtaccaggttcaagttcataaccccctcttgttaagatcatgttaaaccctcgtactatccgaaagtcaagagccggagggaaaaaagttgaagcaattttatcagatccacgagctggccaagctctttgatctctgccccgacaccctgcgctactatgaggagaaggggctgctccacccggtgcggggggagaaccgctaccgcatgtacggcattcaggacgtgtgtaccctcaacatcatccgcgccctgcgggagctgagtctgcccacccgggccatccgcgcctatctggagcgccggtcggtgggggagacgctatccctgctgaaccgggaggaggcgctgctccgccgccgcatggcggagctggaggcggctctggaggaggcgcgggcccgccgggccaggctggagcagtaccgcgccgcggaggacggacgggtcttcttccgccgggaggaggcgcggccctacgtgttcctggaggaggacatcatcctggaaaaagagatcgacttcctgctgaaaaagctggagcaccgccaccaggactatctcaaaatcatcggcagccagtgtatgggggcggcggtggacgaggagtggctgtcccgtggggtgtataaccacttctcccgggtgttcttcctcaccgagccgggcctgccccatgacgacgccctcccggcgggggagtacgcctgcctctattaccgtggggcctatgaccgcctggaggagcactgcggcgtcctgctggcggggatcgcggcggcgggccgccgcccggcggggccgcccctggagctgtaccgggtggacgcccacgacaccaaccgggaggaggagtacgtcaccgagctgcaaatgcgggtggaataacaaaactgtcccgcgccggagccatccggcgcgggacagtttcattggttcaaaagcggttcaacggcaccgagccgtcgtcggcgcccttctcgatggccttcaccaccgcgtcatacccgtaggtgtcgttgacctggatgtggaacgtctcccccaccttccggcccagcagggccttccccaaaggggactccttgctgatgaggccgtggagggcgtcctgccgcatggtggtgaccacctggtacacctcggtgtccccctcgtcctccagaaagacggtgactctgtcgtagagctgtaccccgtcgctggcccccgcgtcggggagcaccacggcggtcttgatcatgttctccaggaaccggatgcggctctcgttgcggtttttctcctgcttggcggccttgtactcgaagttctcgctgagatcgccgaaggcccgggcctccttcaccgcctccaggagctggggccggagctggatgcggcggtagtccagctcttccttcatcatttgaatgtcttttttggtcagttcattgtgcatggcggaatccctcttgttctatgttgttccaccattataccacaaagcgccggcggaatggtagaatgcgcaatatttttcggctgccccgcaaggggctcagcggccgcggaatttccgctcctcctccccccggaggatgcggcccagcccccggatgtgccgggagagcatgaccagggccagaatcagggccagcagcccggcctcccggccgcggcagagaaaggccggggggacaaacagggcggggatcaccaccgcccccaggggcagccagccggagagcagggtgacggccagtccggccagacaggcggccgtcccccacaggggggagaagaggatgagggcggcgcaggtgacggccaccccctttccgccccggaagccccgccagagggggaaattgtggcccagcaccgcacccagcccagcccacaggccggacaggccgcccagggcggggaagagcgcccggcacagcccaaaggccagggcggtcttggcgatgtctccggccagcaccaccgcaccccagccctttcccagctcgtgggccagattggccatgccggggtttccggtgcccagggcggcggcgcttttgccggtgcgggcgcgggccaccagctcggcggtgaggaagcagccgcagagatagcccagcagcaggcagagcagtcggtgaagcatggagacctcctagttcgtccgtccctcccgcagaaacacgtaggaggcggcggtggagtgggcgggggagaagcggtagcccagccggtcgaagccctgggcctcctccggcgtttcggcgttccgctccgccaggaagcggaccatctctccccgggccatcttgacatagacccccttctccaccaccttgtctccgtccgcctcgccgaaggtcacgttgatccaccgcacgggaggggttacccaggggcgtaccgctttggcgtactccgccgaggccagattgagcagggtgtcctccccgccggcggtcagcgtccggtacagggaatcgccccagaagtcgtagaggcttttgcagaagggggtgctgcatctggcccccatctccagccggtaggggagcacgccgtcgaaggggcgcagcaccccgtaaaagccggagaggatgcgcaggtgcgtctctgcgtactcgaactgcggccgggtgaacaggtggggggccatgtactggtactggatgccgtcgtaggagagcagggcgggggcgccggggcggcggaggtccatctcctgaaagcggcggaagttcagctccgcgataccgtcgttacaggcgagcagctttttcagggctgtgtagtccagcccccgcagccactccgccagcaccgccgcccgctccagcagggcgggggcctgccggggggcgagaaagtccccgtcctcccgcattttcttggcgggggagatgagcagcttcattccccggccggtcccttccgatgggcggcctggccctccgcgatggcctgccgctcccgacacagctcggcatggagggccacggagtcccactcccggttggtgggggtgagcaccgccttcagccggacgggggcgagcttctggcggcggaacgcctggaggaacagatccagcagagggccggggcagttgacgatcaggagcatctcgtcgtcaaagccgtccccgtcgtagggggcctccgggacggccccctccgccagctcacccaggggcaggccgtaggactccctgggcaccagggcggtgcgcaggcgcagggacaggcacatacggcggattttggccccccgggggttgtccagattgtagagcagaatggtgggtgtgttcatgggcatcagccttcctttcacccgccattgtaccgggttttccccggcccgtcaaccggggctagaggacgttcttcagggtaaactgttcggcctcgtagagcagggagatctgggtcatgagccgggcgttggcggcggagtactccccggcctcctggcaggtgaggaactcgagcacctcctgaaaaccggtatagatctgatcggtgtcggaatggcgcaggaggatgtgcaggtagctgtcccgggactgccactgtgtgagggcctgctctgtgaggacgcgggcttcctcccagtccccggtctccgcccgggcctccgcctgctccagaagggtgttgagcgccccggtaaagccccgcagatagaggttgttgcacagcgttgcgccgaacagggcagccagcagcagggctgcgatccacagccgcttcatacccgcccctccttctccgccaggtagacctggttctgctcatccacagtgaggagaaacacgtcctggctgcgctttacgtgatgggccttgagctgccggtccagccagatgtcgtccagtccccgctggcgcaggttgtgctccagcacccggccgtcgttgataatcaccaggggcaggccgggctcctttgggtgcagctccatctgggccgcagtgacgggctgctgggccgcgtaggggaggacggagatctgtccgttggtctccaaaatggcgtatttaatggaattgaggtcggtgatccccttcatacgcagctcctccatcagctcgtccactgtaaagcggtttttctgcatctcccgctggtggagcttgccgttttccacgatgatgctgggacggccgcagagcaccgcacggaagcggacgcttttcatggtgagcaccgacagggccatggtgaggcagaggagggtgaggatggggatgatgccggtgagcagagggatgccgaagtcctgcatgggcacggcggccagatcggcgataagcagggcgagcaccagctccgagggctccagctcgcccacctggcgcttgcccatgaggcggatgcccacgatgataaagaggtagagaatgatggtgcgcagaaatgcgatgaccatgagaagacctcccgcggtaatgttcaccgttcagtatggccgccgccgggcggattatgtacgcaggggccttgacgctgggagggtatggatgttataatatcgaaaatcaataaaagaaagcggcgaacgcatgaaaaagcggacgaaaggagtgctggccgccgctctggcggcagccggggtgtttttgctggcgggtctggacgcccgcctgctggtacgcgcctatacggtggagagcgggagactcaccggcccggtgcggctggcggtgctcaccgatctgcacgcctgcgcctatggggagggccagcgggagctgctggatgcggtggcggagcagtcacccgacctggtactgctgtgcggcgacatcgtggacgacgagccccggatgccggaggcgcgggcgctggacacggtggaggccctggcggcggtatggcccacctattatgtcaccggcaatcacgagttctggacggggcgggtggacgaggtgaaggcccggctggaggaacggggcgcggtggtgctggcgggggactgtgtgacggtaacggcggcgggacagacggtgcagctctgcggcattgacgatccctctgtgggcgagacccggtggcgggagcagctggaggcggtgaccgccgccctggatggggagcactgctccattttgatgacccaccggccggagcggacggaggactacgcgggccggggcttcgagctggtgctggcgggccacgcccacgggggccagtggcggctgcccggcctgctcaacggcctgtttgcccccgaccaggggctgtttcccacctacgccggcggccggtatgcactgggggacaccaccctgctcgtcagccgggggctggcccgggagagcacccggctgccccggttctataaccgtccggagctggtggtggtggagctgtgccccgggctggaggaatttcctgcaaaaaaagaatgaggtcaaaatcttatttttaacttttggggcgtattgccgtggaaaaatcggcaatacgccctctctttttgtccaa

SEQ ID NO: 4337 - DNA, 8083 bp, Unknown
  gut microbiota DNA sequence
ttgggaacgaaaggcgtgatgcagaagatgaaagcgaccttgatcctggaaaacggcatgaccttcgcgggccgcagcatcggctccggcgaggagcggatctgcgagatggtgttcaacacctccatgaccggctatcaggagatcctgaccgacccctcctacgccggacagggcattgtgatgagctatcccctcatcggcaactacggcgtcaatcacgaggacaacgaatcctcccgcccctgggcggaggcgttcatcgtccgccacctggcccggcgcggcagcaacttccgctgcgaggacgggctggattcctatttgaagcaatttcatatcaccggcattgagggcgtcgacacccgtgccttaacgagaatactccgcagtcaggggaccatgaacggcatgatcacctgtgcggagcatttttctgtcccggagtgcctggagcgcatccgggcctaccgggtggagggcaccgtggagcgggtgacccggaaggagccgcaggtgtaccccgccgcgggcgggcagcagctccgggtggccctgatggactacggcgtgaaggagaacatgatccgctgcctccagaaccggggctgtgaggtgacggtgttccccgcccacaccccggcggagacggtgctctccggcgggttcgacggggtgatgctctccaacggccccggcgatccggcggacaacgtggagatcatcgcggaggttcggaagctctatgagagcgcgctgcccctctttgccgtctgcctgggacaccagctcctggccctggccaccggggcggagacccgcaagatgcgcttcggccaccgggggggcaatcacccggtgaaggatctggagcacggccgggcctatatcaccagccagaaccatggctatgtggttaccgccgagagcgtggacccggcggtggcggaggtgtcccacatcaacgtcaacgagggcagcgtggagggcctgcgctaccggcggcccaactgcttcaccgtccagttccacccggaggccgcccccggccccatggacaccgagtatctgtttgaccgctttgtggacagcatgaagggaggacgcgcccatgcctaagaatcccaagatcaaaaaggtgctggtgctgggctccggccccattgtcatcggccaggccgccgagtttgactacgccggcacccaggcctgccgcgccctcaaggaggagggcgtggaggtggtgctggtcaactccaaccccgccaccatcatgaccgacaaggacatcgccgaccacgtgtatatcgagccgctgaacctggccagcgtggagcaggtcatcgccaaggagcagcccgactccatcctgcccaccctgggcggccagaccgggctgaacctggccatgaacctccacgagcagggcatcctggagaagtacggcgtgcgcctgctgggcaccagcccggagtccatccgcaaggcggaggaccgccagggcttcaaggacgccatggaggccattggccagccctgcgtcaccagcgacgtggtggagagcgtggaggccgcggtggagttcgccgggcgcatcggctatccggtcatcgtccggcccgcctataccctggggggctccggcggcggcatcgcctacgacgagccctccctgcgggagatcgccgaccggggcatccacctgtcccgggtgggccaggtgctcatcgagcggtgcatctccggctggaaggagatcgagttcgaggtcatgcgggactccgccggcaacgtcatccagatctgctccatggagaacatcgaccccgtgggcgtccacaccggcgactccatcgtggtggcccccacccagaccctggccaaccgggagtaccagatgctccgctccgcctctctcaacatcatctccgccctggagatcgagggcgggtgcaacgtacagctggccctcaaccccgactccttcgagtacgcggtcatcgaggtcaacccccgcgtgtcccggtcctccgccctggcctccaaggccaccggctaccccatcgccaaggtggccgccaaggtggccctgggctacaccctggacgagatccccaacgccgtgaccggcaagaccaccgcctgcttcgagccaaccctggactactgcgtgctcaagctgccccgcctgccctttgacaagttcaccaccgccagccgcaccctgggcacccagatgaaggccaccggcgaggtgatggccatcggcaattccttcgagggggcgctgatgaaggccatccgctccctggagctgccggtgaagtccctccgcctgcccggtctggacgagctgtataccgaggagatcgaggaccgcctggtgaacatcgacgatcagcggctcttcgtggtggccgaggccctgcgccggggcttctcgccggagaagatcaacaagatcaccaagtacgacctgtggttcctcgaccgcttccagaacatcgtggacatggaggacgccctggatcacggccgcctggacggcgacaccctgcgccgggccaaggagatgggcttctccgacgcgtggatcgccgccctctccggccgggagcagaaggagatcaaggccctgcgggagtccttcggcatccgcccggccttcaagatggtggacacctgcgccgccgagttcgaggcccagaccccctattactactccacctacgaccaggagaacgaggccgccggggccagccgggcggatgatggcgcggagaaacggaaggtgctggtgctgggctccggccccatccgcatcggtcagggcattgagttcgactactgttcggtccactcggtctgggccttcaagcgtctgggctatgagaccatcatcatcaacaacaacccggagaccgtgtccaccgacttcgatgtggcggataagctctactttgagccgctgaccgccgaggacgtgcaggcggtggtggagctggagaagccctggggcgcggtggtgcagttcggcggccagaccgccatcaagctggcccaggcccttaccgacatgggcgtgcccatcctgggcacctccgccgacggcgtggacgccgccgaggatcgggagcggtttgacgagattttgaaccagtgcggcatcccccgggccgccggccgcacggtgttcaccaccgagcaggccctggccgccgcccacgaggtgggctatcccgtgctggtgcgcccctcctacgtgctgggcggccaaggcatggagatcgcctacaacgaccgcaacatcaccgagttcatgcgcatcatcaaccaggtggagcaggagcaccccatcctggtggataagtacctcatgggccgggaggtggaggtggacggcgtgtttgacggggaggagctgctcatccccggcatcatggagcacattgagcgggctggcgtccactccggcgactccatctcggtctatccccccatccacatcgaggacaggcacaagcagaccatcctgaagtacacctatgacctgtcccgcgccctgggcgtggtgggcctggtcaacatccagttcgtcatctatgacgaccaggtgtatgtcatcgaggtcaatccacgctcctcccgtaccatcccctatatctccaaggtcaccggcgtgcccatcatcgacctggccaccagggtgatgctggggcagaagctgtgcgacctggggtacggcacgggcatctaccgggaggcggactactacgccgtcaagatgccggtgttctccttcgagaagctcaccgacgtggacaccggcctgggccccgagatgaagtccaccggcgagtgcctgggcctggccgagtccttcccccaggcgctgctcaaggccttcaagggcgctggtatgaaggcccccaagaagggcgggcgcatcatcgttaccgtcaaggacgaggacaaggacgagatgattggcatcgccaggggcttctatgatatgggcattgagcttctcgccaccagcggcacctgcaaggcgctcaacgaggcgggcatacccgcccgctgggtggcccgcgtgtccgaggcccaccccaacatcctggacatgatcgcctccggcaccgtggatctggtcatcaacacccccacccgcggccgccgccacgataccgacggcttcaagatccgccgctctaccgtggagcactccgtggcctgcatcaccgccatcgacaccgcccgggccatgctcaccgtccgcacccagggccgggccgctgagctgcgccccatcgacatcactgaaatctgaggggaggaaaccgccatgcgtctgcaccgccttcgctttgatatctggttctgcctgctggtggcctatctggtgtccctgggcacgggggccgcagcctccgccctcagcgcggccacgtatgacggctatgcagaggttcactccgctgctcctggccaggcgggcagtcctgccgggccagaggttccccgggcacagagtatcgcggagctgctggagctggataccttcacagtactttcccaaggtattgcctaccgcaacgagggagcgggctattttgagggcagctatctctataatttggccctcccctccggggaacgggtggctgcccgcatccatactgaaagcgtgcaggatggagagaagttcgcatccggggaggttgtcctcccggtgggtcgggtgatttgggccgacctggaggaggaccccgccttcctggagcagatcacctccggctatcccctggaccgcaccgacttctacgtggacatggccggagaagcggtacgctacagtcaggaggagcggacggaaaatcatgttatagtggttcaattggttaccgttctggtctgcttcccactgctccatgccctaggctcccgcagcgggattttccccgccttctttcccaccgtgcggagggaaaaggcggggcggaattgacccggccagccgggaacctttttccagtcccttcgtctaaatgaatatcaacgacaggagggaaatgctatgaaacgactgctgactttatccctggcagccctgctggctgccggtctcaccgcctgcggggcgggggaggagcgcggcgttccagccgccaagccggtgctctacctctacccggaggaggagatgggggtgaccgtcactctggactttgacggggacctcacctccacctacccggactacggggatggctggacggtgacggcccggcccggcggcaccctcaccgatccggccacgggccgggaatactactgcctgttctgggagggaattaccgaagcggagtacgacttctccaccggcttctgcgtggcgggggaggacactgcggccttcctggaggacgccctggacaggctgggcctgaccgagcgggaggctgacgaattcatcatctactggctgccaaagctggaagacaacccctacaatctgctctccttccagaccgacgcctacaccgattccgcagccctgaccatcgacccggcccccgacagcctgatccgggtgttcctggcgtggaagggcctggacgcgccggtggaggtggagccccagaagctgaccgcgccggagcgcgctggcttcaccgccgtggagtggggcggcgcggaggtagtgcaatgaagaagctgctgttgctgcttgcgctcactttgctggcggcgggactggctgggtgcggcaattccagtggaaatgttgcggtgccggaaaagccggtgctctacctctacccggaggaggagatggaggtgaccgtcactctggactttgatgggacgctgacctccacctatcctgcgtacggcgatgggtggacagtgacggcccggcccgacggcaccctcaccaatccggccacggggcgggagtactactgcctgttctgggaggggatcaccgaggcggagtatgacttttccgccggcttctgcgtggcaggggaggacactgcggccttcctggaggacgccctggacaggctgggcctgaccgagcgggaggctgacgaattcatcatctactggctgccaaagctggagggcaacccctacaatctgctctccttccagaccgaggcctacaccgactccgccgggctgaccatcgacccggcccccgataccctgatccgggtgttcctggcgtggaaggggctggacgcgccggtggaggtggagccccagacgttaaccgcgccggagcgcgccggcttcaccgccgtggagtggggcggcgcggaagtggattgaagactgcgctgaaaagccgccggacctgaccgggtccggcggcttttttacggaatgcttgcgctttaggccggaatatggtatcctaaactgtaaaaatatcgccgggcctatgggcatggcgtgagagaaaacgagagaaagaaggcaagatgatgtcccatcagaccgtgattgtcctggatttcggcggccagtacaaccagctcatcgcccgccgggtgcgcgagtgcggcgtctattgcgaggtcaagccctacacgaccccgctggagcaactccgcgctatggagcccatcggcttcatcttcactggcggccccaactccgtctatgaggcgggcgcgcccaaggctgatccggccatctttgagctgggtgtgccggtgctgggcatctgctatggctgccagttcatggcccacgccctgggcggccaggtcaccgaggcccacgaggacaccgcccgggagtacggcaagaccgagacctattacgacaccgcctgcaagctcttcaaaggcctgccggagcagggcatctcctggatgagccacggggactacatggccaaggtgcccgagggcttcgccctcaccgcccactctgacgcctgccccaacgtggccattgccgacgagaagcggggcctctacggggtgcagtaccacccggaggtcaatcacaccgagcacggcgtggacatgatccgcaacttcctctatgaggtctgcggcgccaagggcgactggaccatgggcgactacaaggagagctccatcaaggccatccgggagaaggtgggcggcggcaaggtgttgctggctctgtccggcggcgtggattcctccgtggccgccgcactgctggccgaggcggtgggcagccagctcacctgtgtgttcgtggaccacggcctgatgcgcaagaacgagggcgacgaggtggagaccgccttctccaagtgggacatccacttcgtccgggtggacgctgaggcccgcttcctggagaagctctccggcgtcagcgagccggagcgcaagcgcaaaatcatcggcgaggagttcatccgcgtctttgaggaggaggccaagaagatcggccgggtggactatctggtgcagggcaccatctaccccgacgtgatcgagtccggcgccggcgacgccgccgtgatcaagagccaccacaacgtgggcggcctgcccgactatgtggacttcaaggagatcatcgagcccctgcgcctgctcttcaaggacgaggtgcggcagttaggccgcgagctgggcctgcctgaatacctggtcatgcgccagcccttccccggtcccggcctggccatccgggtcatcggcgatctgaccaaggagaagctggacaccctccgggatgccgacgccatctaccgggaggagatcaccgccgccggcgaggacaagaacatcaaccagtactttgccgtcctcaccaatacccgctccgtgggcgtcatgggcgacggccgcacctacgattacaccctggcgctccgcgccgtcaccaccagcgacttcatgactgccgactgggcccgtatcccctacgatgtgctggacaagatctccacccgcatcgtcaacgaggtgaagggcatcaatcgtatcgtctacgatatcacctccaagccccccgccaccatcgagtgggaataactaacgaaacccgcaaagccttgaaaacactgggcttttggaac

SEQ ID NO: 4338 - DNA, 1327 bp, Unknown
  gut microbiota DNA sequence
aagaacccgagactgcattctgatgagactctgatcgcactttccatcagtgccgctgacaacgaagatgcgaagcttgcccttcagcagatcccgaacttaaaaggctgccaggttcatacttctgtgctgctgtctcaggtggatattctggagttccgtaagctgggcgtagagcttacttgcgagccgaaatctgagcatgctaagaagctgcagaaataatttcacaatagcataaaaaatctcctctctgaacatatgattatttcatatgaacaggaggagatttttattatactattttctgtctattcttccactgtttacatatctaatcgtaaggaaaatatccaacgcaaaaatgataattgcgaggattaataaaatcgggcgctgatcaccagcatacaatattaatccgccatttaaaaggcatatcgtcatgctgattccaagggtattgtatgcttttcttgcatcaagttttccattggaagtaattttttcttcaataataccgcctggttttacgatactgataataatcaaagaaacaacaagtattgtaccaacaaatgcatttgtattccactgcatactcattcctcctcttcatcagatataggacacctcacctatgtctcacgtcttagattttgtcagaaatttcttcatttaccctctatttatctttaaattatcattgtcaggcgcatctgtcaatatctttatttgattgaatcaagaaaatactgaagtggatgattttatcctcttaactatttacaatctctaatgctctgtccggataattggtgatgacggcttctgcgcctgcatcttttacaagctggatatgttctggtttgttggcggtccatacgtgcattttcaggccggcacgtttaacttcttccatgaactgtgggtatttcaggtggtaaactgccgggtgtacggcgttgattccgagatttttagcgtacatggctggatttacccatccgtcactgaaaaggattccggtctgtacatggtcattcagctgttttaactgtaacaggctgtaatggttaaaggaggaatagatcagctggtcttccatgttcatttcttttaccagtttcaggattttcccttccattcccggatagaagcagatgctgttctttagttcaatgtttaccatcatgtctgtggtgcgcatgagctccagtacttctgccagagttggaatgtgataaattcctgatggttctgcgggtgtactgacttttaattctttcaattgagccagtgtcatatctttgatcagtccggttcc

SEQ ID NO: 4339 - DNA, 8178 bp, Unknown
  gut microbiota DNA sequence
aaacaagcagtccccggccagcctgggcctggcgtatttccgggaggagcggtagggctctgttttaccggacaagagagacaaaagcagcgcccccggcctttgccgggggcgctgctttatgcgcaaataacgacaagggccggacgtctgctcctgacgtccggccttatcgaaggaaagaggatacaatgaaatgaaaagaaactgtctcttgcaagtattataatacccgaaagatgttaacgaataaatcggaatgtgttacagaacctttaaataattcgctttttatgtaaagcgccggtaaaatgaggcgggcagcggtgctcacccgctgcccgtcacatgattggaggatagaatgaaaagaagctctgtctcttgcaagtgttatactaccagggggttgttacaaaatcgagcacgccttgttaaaaaagcgttaaatcagcgcaaagattgaaaaaattcctggagcagagcggcgcactccgcctccagcacccggccgtaaatgcgggggtggtggttgaagcgctcctcaaagaggttgagcaccgacccgcagcagcccgccttgtcatccttcgccccgtagtatacggcagggatgcgggcgttgacgatggccccggcgcacatggggcagggctccagggtgacgtagagggcgcatccggccagccgccacccccccagggtgcggcaggcctgggcaatggcctcgagctccgcgtggcccagtgcggtctgggcggtctcccgccggttgcggccccgccctaccaccgcgccgtccctcacaatgacgcagcccaccggcacctctccctccgccatggccagcctggccagctccagcgcctggcgcatgtactcctcgtgttccataaagccctcccatgttgtgccttcatatctctaattgttatagcatatccatggaaggtatgctataataaatttcactctcctaacaatattttgcagacaggtgattggtttggttgagattttcctgattgccgtgagcctggcgctggacgccttcgcggtatccgtgtccagcggcatctccatccccggcttcggtccccggcaggccgttaagatgggtctgtggttcggcacgtttcagtttcttatgccccttctgggctggctgctgggcagcagcgtcagccagtacatcgaggcggtggaccactgggtagccttcggcctgctggccgtcatcggcggcaagatggcgtgggagtccctgcgccggggctgcggggaggaggacgaggcgccccccgacctgtccgcccggcggctgtgcgtgctggccattgccaccagcatcgacgccctggccgtgggggtgtctatggcctttatgagcgtccatattctggcctctgcggcggtcatcggcgtggtggcctttgccctgtcggtgaccggcggcctggtgggccgccgcctgggctgcctgttccagcggcgggccgagctgacggggggactggtgctcattgccatcggtgtgaagatcctcatcgagcacctgtcggggggctgagcatgggcatctgggagcagttgggcctggacatggcccgccaccggatggtggccctggtgggggcggggggcaagacctccaccctgtatgccctggcccggcaggcggcggacagcgggcggacggtggtggtcaccaccaccacccatattctgcgccaccccggcctgcccctggtggaggagccgacgccggagcgcctgcgggccgccctggaagggcacggggtggtcaccgtggggacggtctttcggggggacaagctctccggcgcgggaactccggaggagctgcgccgggcggccgatgtggtactggtggaggccgacggggccaagcgcctgcccctcaaggccccggcggagcacgagccggtgatccccccctgcgccgacgccgtggccgccgtggcgggcatggacgcggtgggacaggccgtgggggcggtctgccaccggccggagcgggtgtgcgccctgctgggcgcgggggcggagcacgtgctcacccccgaggacgtggcccttctgctggccaacccccagggggggcggaagggcgtgggggaggccatggccttccgctgcgtgctcaacaaggcggacaccccccagcgggcggcccacgccagcgcggtggccggacggctggcggagcggggcattcacagcgccattacctactatcgggaggaggagcggggcggattatgctggttctgatcaagggagcgggagatctggccaccggcacggcggtgcggctgtaccgggcgggcataccggtggtcatgacggaggtggcccagcccacggcggtgcgtcggacggtggccttctcccagtgcatgtacgacggcgcggcccaggtggaggggatctccgcccgccgggcggaggacgccggggcggcccgccgggcgctggagcggggggaggttcccgtgctctgcgatccggaggcggccattttgatggagctgccctttgacggggtggtggacgccatcctggccaagcgcaacctgggcacggccattaccgacgcgccggtggtgctggccctggggcccggcttcaccgccggggtggactgccacggcgtggtggagaccatgcgggggcacgatctgggccgcctgctcacccgggggagcgccgcccccaacaccggcgtccccggcgatgtggggggctacaccacccagcgcatcatccgcgtcccggcggacggggcgttcgagccgctggccgccatcggccagcgggtggaggagggccagccggtggcccgggtggcgggccggacggcctgcgcccagctcaccggcgtggtgcgggggatgctccccgccgggctggccgtcacggcaggcatgaaggcgggggacatcgacccccggtgccgggcggagcactgcttcaccgtctccgacaaggcccgtgccatcggcggcggcgtgctggaggggcttttatactttggaaggagggcgggtctatggagcgtctgattctctgcggcggcggccacgtgtccctggaggtggcccacatcgcccggcggctggagtttgagctggtggtcatcgacgaccggtcggagtttgccagcccggagcgcttccccatggccgcccgggtggtgtgcgccccctttctggaggcgctggacgccctgggcagccgggagagcgattactatgtgattctcacccggggccacgcccacgaccgggactgcctggagcacgtgctccgggggaagtacgcctatgcgggcatgatcggcagcaggaccaaggtggcggcggtgaaggccgccctggaggcggcgggcattgcccgggaaaccctggacggggtgcacagccccatcggcctgtccatcggggcccagaccccggcggagatcgccgtgtccatcgccgccgagctggtgtgggagcgggcccgacggggaccggcggccgcgcccccggcggcgggagagccgggcgtgctgtgtaccatcaccgccaaacggggctccgccccccggggcgtgggtacctggatgctggtgcggcccgacggttcggtgctgggcaccatcggcggcggcgcggtggagcacctggccgtccaggaggcaaaggccctgtgggcgcatgggggcggcccggtgcggagacactatgatctgacccccggcgcggccgagctgggcatggtgtgcgggggcgacattgacgtggaatttgaggtgcgcaaatgaaagagatcaccctgtttcttctgaacaactgtccccactgcaagctggccctccggcttcaggaggagctgctggaggagcatcccgcgtggcgggacatccccctccgaatggtagacgaggcggcggagcccgcctatgccgatacctttgactactactatgtcccctgctactatgtggacggcgtgaaggttcacgagggccacgccgagcgggccgacgtggaggcggtgttccgcgccgccgccggggagcccgcgggggtgtgacggacggggacaggcccacgctttttccgtactggcagtatgtgcgccgcgccggtggggcgggcagcagcgatgtaggggcggcccttgtggccgcccgccccggcggaggaaaaacggtaagaagaggcctgtgtatgggcagacggatttcccatgggggaaatccgtctttttttgtgcgggtgcgaaaccaaacggccgtccgcgccgtgttataggcagaaaggagggaggcccatggaggaacgctggcgggaaccggcggccctggcggagcagtacgccgggatgctctaccggctggcctacgcccgcaccggctcccgggcggacgcggaggacgtgatgcaggaggtctttgtccgcctgctccgggccaggccggagttccgggacgaggagcacgccaaggcctagctgctgcgggtgggcgcacgctgcgccgccgatgtgctccgcgccccgtggcggcggcgggaggggccgctggacgatgggctgcccgcgccggagccgcccggggagggcggcgtggtggaggcggtgctggccctgcccgccaagtaccggatggcggtgcacctgtactactatgaggagctgagtgtggcggagatcgccgccgtcctgggcaaaagcgagggggcggtcaagtcccggctgttccgggccagggcgctgctgcggcggtatttgaaggaggacggcgatgtttcagaacgactataggcgggagatagacgggctgaggcccagcccggcggcggtggagcggctcaaccgcatgctggaggagggcgcgccggcccggcggccccggcggctgggccgccgggcggccgcggccctggccctgtgcgccgccctgtgcgtcaccgccgtggcggcgggccccaccctgtgggacgcgctggaggcccgcctggggccctacgccccctttgccgcagaggtggagggggaaacgtccggccagggcctccggctggagctggtgaaggcggtcagcgacggctataccgcccgggtgtactacaccctcaccgacgagacgggcgaccggctcaacggtcacacccaggtctccggcgggttgaagggcgccagagcggctatggggcgaagcaccggcaaccaggtggtctcttacgacgccgaaagccgcaccctgctgctggaggccagcgcgaagggcctggacaccagccaggccgtgacgctggagctcaccggcgtcgaccccggcgagcgctatatccagggcgcatactttcagcctccggccgacgcccgcgcgctggacaccgacaccacgggggagggggccgtggtgctctcccccgggcagactccccagaccagccccaacaccgcggatttcaccatcagctccatgggctttgacggccaggggcgcttccacatccgcctggccatggccgagggctttgacgcgggctggctgctggcggtgccctatgacgcggcgggggagcagatgggctccacgctggagcaaaccgcggtggacggcggcatggactacaccatcggcggcgttgcgccggacgacgtggcggacatggcctccatccgggtctacggggcctaccgcggccccgaggcggccatcgagggggagtggagcctcccggtggagctggagccggcggagcagagggtgatcccggtgggccgcaccctggagggcggcttctatgtggagcgcatcgaggtgtcgggcatgaacatcgccgtctactaccggggcggggacaaggactggttcgtggtgtgggccaccgacaagagcggcgtccggaccggggtgcccatgggcatgatgagcgcgggcgcggaggacgggctgaacctcgggctgtggagctttgagacgcccgcggcgctggacgagctggcctcggtcacccttctgggggagaccttccccctggaataaaggggacgcaacggccgggaacaatcacccagggacggatttctttcaaagaaatccgtcccttttgcatgaaaatcccccgccaatgcgtccaatgggatagaatggagcagaggaggggagcgagatggcacatcaggcgggcagcgccgccgatctggagcggctgatggaggagtacggcacggggcttctgcggctgtgcgccctccatctgggggacgccgccctggcggaggacgcggcccaggagaccctgctccgggcgtggcggaggtacggcaccttccggggggaggcggcagagcgcacctggattacagcgattgccctcaacgtgtgccgggatctgctccgctccccgtggcacacccaccggatggagctgtccgccctggccgagccggcggcggaggacgcgccgtgggacgatacccccctgcgggccgtgctctccctgccccggaagtaccgggaggtcgtgctgctgcgctactatgaggagtttaccctggaggagattgcagacacccttgggattgcgccgggcaccgtgtccgcccggctgacccgggccaagcggaagctgcggcccatgctggaggagtggtattatgactgagctgcgcaaggcgctggagcggccggtggccggcctggtattcgacgagaaccgaaaaaatgctgtcagggaaaaggcctttacggcgaaacggggcggttctgcgctccgccgtggtgcagcggttgcgctggtctgcaccgtcctgtgcgtcaccgccgtggcggcggggccgtccctgtggcagtatattcaggcccgccagggcccctttgccgggctggcccagaccgtggagggggcggtgtgcaccagcggggggattgagatacaggtgctcagcgccctggccgacgacgtgcgaggagaggtgtattttacggttcgtgacgtagagggagaccggctggacagccagctcaccctgcgctgcggggcggacagcgatctgtccggccggctggtggagtacgattcggagagccgcaccgccctgtttgcggccggaatgtcctattaccgggcccagacggagggcgcggtgggcctcggcacgaccggcggcgctgtcccggacacgctccatctggcggtggagcgcctgaccacccggcagggcgagctggacgccggcgcctcctgcgccggagtgacggcggcccttctggacagcctgcccctgggggagggggaccgggtggtgatgggggtggaggagagcggctatcccgcctccatcctgccggacgagcgggtggtgctggcccccggccagacacccatgcccctggagggcaccggcgacgtgaccatctcctccatgggctttgccagcgacgggcggttccacgtccgggtggcctacgcccctggcatcggccacgaggatttggacatgggctatttcctcgcccgcatctaccccagggacgagcgccggacggcggaggagaaatactggcgcgccatggtgatcacccaggtggaagggggcctggacgtgctcttccccctgatcaaagcgggggaggaggccgagctgggggaggtgtacttctacggcggctatgagcgccccggtgtggacatcgccgggccgtggagcatcgacttcccgctggagcactacccctcggcggtgctggagtggacgggcaccctggcggggcggcgggtggatcacgtcaccgtctccccccttaccgtcaccatggacagcaacgacaccggcggcttccacacggcggagctcacggtggttttgaagaatgggacccaggtgcccgccgcctgcggcgcgggccgctacgccaatttgggagagggcgccggcgtggaggtgtgggacgcctacaacacctgggagctggagcgcccggtggaggtggaggagatcgaccatttgctccttctgggggagcacattccggtgtcgtagcagcggaaatatgtcaaaacggatatcccaccggctcatttgccggtgggatatccgtttgtttttaggggagtgcctccgggttatccacatccaaaagctcgtttggggaaa

SEQ ID NO: 4340 - DNA, 3772 bp, Unknown
  gut microbiota DNA sequence
cggcaagctctccaaacaggtcggcgggaaacaccaccggattgcctctccgtccttgccaggagagagcgcaaatggcgtctggtgattccaaaaaggattttttgaggcggatgatactctttgtggtcaaccatggctggtcgcagacggcaaagagcaccccgtccaggtccgacatccgggccaggcccaagcgaatggaggcggagatcccctccgccgcaccgccgttgtagagcggaagaaatccgaatcgttcaccagcagccagaatttgtggatagggggagcacaccgctgcccggtcaaattcggcaggggccagagccgccatggcccggtggtagagcgggacgctgtccacctctgccagcagtttgttggagccaaagcgccgtccaaagccggaggccatgaggacagcgcccagccgctcaggcaaaggcctgccccaactggagcaggaggatggggacagccagcttgatcaggcccaccaccagggtcataaaggtgaacagggccagggctttgccgcggctctcaaaggtatcctcccagcgggccagcatacgggtgaagttggcggttcggttctgagcgccgatgagatcggacacgctcttaatggtgttaaaggcggtatagcccatccagacgggcagggcgaccagggagacgttgtagcggtatcccccctcagccagcaaaagatagagagccagcgcaaagctggcaagcgtaaagagcagataggcccagacgcctattttggcggagcggtcgttcatgagtgtggtttcctttctctgttggttttcagggccggatgtcctgggcggcgaaggcggcaagcagggcatccatatcaggagagacccgcatgggctccccggcggcctgaataccgctctgcacgtccttcaggccgttgccggtgacgatgctcaccaccgtgctcccggcgggaatgaggcccagctccacggccttcttcaccccggcggtgccggccgcccccgcgggctcgccaaacaccccctgggtgcggcccagcaggcgcatggcctccaggatctccccgtcggacacgttgacggccacgccgtccgactcccggatggcccggagggccttgtccgggttgcggggcacccccacggcgatggagtcggccagggtgttctccgccatgggttcccaaggctttcccgtctcgatggcccggttcagggggcagcagccctccgcctgcacggagatgagccggggcagccggtcgataaacccggccgcgtacagatccttgaggcccttccacgccccggcgatggtgcagccgtcccccaccgacagggcgatgtaatcaggcgtctgccagccgagctgctccagaatctccagggtgacagtctttttgccctcggagaggtaggggttgatggcggcgttgcggttgtaccagccccagcggtcgatggcggccctggacagctcaaaggtgtcctcataggagccctccacgctgatgaccgtggcgccgaagatccgtagctgggccaccttgcccctgggggcgcggctgggcacaaagatgtaggtggacagcccggccgccgccgcattgcccgccagggaggaggcggcgttgccggtggaggagcaggcaatggtgtccgcccccgcctcccgggccttgacgaccgccagggcggaggcccggtccttgagggaggacgtaggattctggccgtcgtccttgaggtagagggtatccagccccagggcccgggccagccggtcggccttatagagaggggaccagcccacccgcaggggcggggggacggactcctcctccaccggcagaaggggccggtaccgccacatgctgtagtcgcggcagtccgccagagatttgggggagaagtgccgccggatggcggcgtagtcgtatacgatgtccaggatgcccccacaggcacaggtagtcagaccgggcgcggcggggtactcccgcccgcatttgacgcacttggcgcccaggacatatttcataaaatccccctttcggatgtgggacggcgggccgatgagggcatcagcccctacacattatgagggtaacggctgtagggggcgatgccctcatcgccccgcctgccccgctttacaggcgcttgagcaccccggtctcctcgttgaaggcggtgatcagctcatccagggcggcggcctgccggtgcacgtcgtcccaggtactgccgtaccaaaggtcgttgagctcgtgcatgtcgcggccctgctgctccacccaagtgtagtatttcagattgtgcacccgcttgcggtcgtagtagttcagctccgccatggcgtcggtgcgcaggcccagcagatggagggcgtggtccaccgcggcggcccgcccgtcataggggccatactggtcggccagctcctggatacgggagcggtacatgtccgccgagtcggtgaggacggtggccaccacgtcgtgctccgtcagctcgtagtacttggacagcttcacgcagcacagcacgttggcgatgccggagatacccagcagggagagctgcgacagggtctcctccggcaccccggcctcccgcaggtagtcatggccggccgggtcgttaaacagccgcagcagccgctgggagtccccgtcgtcgatgtcgatgaccatgtcggtgttcttcacattgtggatccaggggatgtgtttgtcgccgatgccctcgatgcggtggtcgccgaagccgttttccagaatggtggggcactgaagggcctcgcccaccgccagcttcaggccggggtagacctccttgaggtagtcgccgcagccgatggtgcccgcgctgcctgaggtgaagcaggccccggagagccggtcgccggggcgcttgaccgcctcaaagacctcggcgatggcggagccggtgacctgatagtgccacaggtggttgcccatctcctcaaactggttgaagatcatgcagtcgggctcctgccgcagctcgtgggtcttgtcgaagatctccttgacgttggactcgcagccgggggtggcgatcacctctccggcgatctgggagagccactcgaaccgctcccggctcatgcccgccgggaggatggccaccgaccggacccccagcagcttggagttgaacgcgccgccccggcagtagttgccggtggagggccacaccgcccggtgatacccggcgtcgaactgtccggtgaccagccggggagccagacagccgaaggaggcccccaccttgtggcagccggtggggaaccacttgcccaccagggcgatgatgcgggcgggcacgccggtgagggctgggggcagctcgatgtagttgggtacggcgcggtacagtccgccggactccacgggctcgttcttccaggtgatgcggaagagattcagggggtccacatcccacaggcccacgcccctcaggcgggcccggatgggctccggtaccgtctccgggtgcttcatgttctcgaaggtggggatgacgacgccgccctcccgggccttttggatgttgcggtccagtgcttggcggtggatggtcaggtcgatcatgcaaaagcctccttactccgaattgccatactcccatgatagcacaaggcgggcagaaatcaagcgcaattcgcgccggacataagagaaaaggggcgctgcacagatgcagcgcccctcctgagacagtca

SEQ ID NO: 4341 - DNA, 610 bp, Unknown
  gut microbiota DNA sequence
ggtaaacaggatcaggatgatgaaccagagggccgtgctctgggtgcccaaccagtcaaagccggtcgtgcccgccacttggttaaggatgccgttgtagggattcagaatccacttccacactaccgtgatggccaccgatccggtgaccaccggcaggtagaacacacagcggaagaaggagcggggaatggagtgcatcttatagatggcggaactcacccacagggagaaagcggtgacacagggcaccgccaccaccacgataatcagtgtattcaggaagcccttgtgaaaaatagggtcctgaaagagcttgatatagttctccagtcctgcgaaccccttgataccgcccaagccatacttcgtaaagctgtagaacaggcagatgaacatgggcacgaccacgaaggtcacgaaaaagatcaggctgggcagcaggaacagataggcggagatggtctctctccgcaccagggcgcggctcatgccggagaattgggactgcttttgctttttgggcttccgtccggcctgggccgtcacggtattttgcgccatgagtgtctcctctctttcaagtggtatttgcctttcctttcaccgg

SEQ ID NO: 4342 - DNA, 1311 bp, Unknown
  gut microbiota DNA sequence
ggagggacccgcaaagctggacatgaaggcggagtcgctcagcatctcgtcggtgcagtacaggaagcccatcatcttctccagatccatcttcatttcccggaaccggggcttgctgtccgccaccgtggccccctcggcggcccaatacatctgaatgccgccgaacacactcttgctcacgtcggtctcgtcggccgagatccaccgcatggcgttggccgcgctggagcaggtgtagcggtccagccggttgagcaagggactctgctgcacggcgctctccaggatcatcccggcgaaatcggtctggatggcaaagcctccatcggcgccgctgccctcgttgacgcccagcaccgcgttgttgaccctctggaggcgcctatcctccacgtggttcttgcggaagttatagacggcctggagctgctcgcccaaagaggcaaaaggcctgtcctctcccttgccctcgtccttgggcttgccgctgtggagcgcgccgtcgtaagcgggcttcgcgccctcctggctggccttggccagcgcctccaggccggcaatcgaggtgttgatcgcctccatctggccggtaagctcgttggcctcctcaatcttaccctcgtctaccagggcctgggcctgggtgagcaactggcccttcttggcacgcagctcggtgatcttttccatgaaatccatgctgttatctcctttcagtccttaaaatccagcaagcgccctgagccgtgccagggtgcgcgccgcctcgtccttccgggccgcctcggcccgctcggctgccacatgggcctgatattgctcccgcatggccgccgtcagccggatacgccgccctgccgcagccacaaaagccgccggctcctcctccggctcctgggccgcccccacaatctcgtcgatcaggccgtactccctggcctgggtgggggtgatccagatgtccttgtccatgagggagaccagctcctcccgggtcttgccaccgcctcgggcggtgtagacctccaggatgcagtcccgggcgttgcgcagggcctcggccgaccgccgcatggcccggtagtccccctccgcgccgccggcggggttgtggtagcacagcagggcccccggctcgctctggatcacctggcagccggtggccgccagggtggccgcgctggccccgaagccctggaacagcgcggtggtcttgccggcataccgccggagcatggagcggatctccagccccaccgccatgtcgccgccgggcgagttgaccagcagcgtcacatcctcgccgcc

SEQ ID NO: 4343 - DNA, 247 bp, Unknown
  gut microbiota DNA sequence
agcatgatcgccgccagagccaggctgagagcccgcttgaggtttctcatttggatttcctccttctgaattttgagccagaggggcgtatgacgcccctttcaggggaggaaacaatgcacatttcgggggatagagatataaaaggcggggaaacagaatcaaaaggttgctatggtagacgtttggtagacaatacgggagcgggaaaagtgaaaacgccttggaacccaaaggattccaaggc

SEQ ID NO: 4344 - DNA, 1343 bp, Unknown
  gut microbiota DNA sequence
aaaggagttacttatgttttgcacaccggagcagcggcagattggccgctggattgagaaccgttatgacattgacaaggtgcagtgcgccgaggcggtcaccaagaacacggtgcgcctgacccttcggggccatgagcccaccatcctgatcctccgccagaacgggcgggtggaccagatccccgaggcggcgcttttcgaggaggccgtctgacctcatgcttatattgtacccccagggaggagtgattaccatgccgcaggacaagcggaatatctataaaatcgcccgcgaggcgaagggtttgacccaggaggcagccgcggaaaagctgggtatctcggacagctccatccgggcctatgaaaccggccagcgcatcccacccccggaggtggtggacctgatggtcattgcctacgacagccagctcctgggcatccagcacctgcgggccagcgccgacatggcgcggagcattgtgccggatatccgagaggtgcggctcccggaggccatcatggagctgctggaccgggtatatggctttgtggacgcccaccgggaccgggagctgctgcgcatcggcaaggacggcattatcgacgatcaggagcgccccatcttcgacgccatcgtggcggagctgggcgacttggtggaggccgccatggctgtgcgctacgccaaacagggacatcttgaggagggagtaaagtgaaaaaggcaaccaaacggccgctcacggacgaggagatcatgacgtatgacaacgtgccgattgatgtggcggcccgctacataggctggtcgtcccccaccatctaccgcgccctgcgggaagagcgggcacccttcggctttgccgtttgcagcgaggagacagggacatggacatacaacatcagccccggcctcctcgtgaagtacaagaggggagacctgcccacctaccgcctccgggagctggaggaagtcatggtgcgtcacgtccaggaggcgctggatctgcggctggccggagtgtcggcgctcatgggaaaggtgctgagcgcatgagcatgatacggctggagctcagcaatcgggactataacaccatcgcggaggccctgctggaaagcgccctggactgggagcacgccgcggacgagctggggcgtctgcaccagttttgcgcccggacaggggacccggcctacgggaccaagctgtcccggctggaccgggagcagtgccgccataggcgtctcgcccggcgcaggcgggccgtactggcgcgcctgcggaaacagaaggaggcagcatcatgctgatggagcgttggaggccgctggac

SEQ ID NO: 4345 - DNA, 526 bp, Unknown
  gut microbiota DNA sequence
accataggcgggcgctttatccgtgttgatgaatcgtgggatctgccacttcttcacgttgttgaggattttacccagaaaccggtatgcagctttgctgttacgacgggaggagagataaaaatcgacagtgcggccccggctgtcgacggcccggtacagatacgcccagcggccattgaccttcacgtaggtttcatccatgtgccacgggcaaagatcggaagggttacgccagtaccagcgcagccgtttttccatttcaggcgcataacgctgaacccagcggtaaatcgtggagtgatcgacattcactccgcgttcagccagcatctcctgcagctcacggtaactgatgccgtatttgcagtaccagcgtacggcccacagaatgatgtcacgctgaaaatgccggcctttgaatgggttcatgtgcagctccatcagcaaaaggggatgataagtttatcaccaccgactatttgcaacagtgccgacgcacgacaccgctccgtggatcggtcga

SEQ ID NO: 4346 - DNA, 409 bp, Unknown
  gut microbiota DNA sequence
tgattgacccggaaacaaggtggattatcgaaaagatttttgaccttgccgttcatggccggggagccgccagcattacacggattttggtcgaagaaaaagtacctactcccggctggctgaatttccagagatacggcactttcgcaaatatctatgccggagcgccggaggaaaaagcctatgcgtggacgatagcgcaggtgaaaagtattctgaaagaggaaacctatatcggacacagcgtccacaataagcagaccaacatttcattcaaaaacaagaagaaagtacgcaagccaaaagaggaatggtatcgtgtggagaacacccacgaagcgattatttccgaagatgtgttccgtcaagtacaggagcagatttgcaacaggcgcagacggcagaagaa

SEQ ID NO: 4347 - DNA, 1083 bp, Unknown
  gut microbiota DNA sequence
agaaccattgacagcgccaggcgggtcatttcgggcacctggggcgagctgtggatcgacggggagaaggtggcggaggtctccgcctgccaggccaaggtggcgctgaacaaggagaccgtcaacctgtgcggccggttcatgaccacccacaaggccatgaacgccagcggcaccgggagcctgacgctgcacaaggtggactccggcttcgcccagaggatggagggcatcaagcgcggcgtggaccggcgcttcacggtgatctccaagctgcgggacccggacagctacggcgcggagcgggtggccctctatgatgtcagcttcgacgacctgaccctggccgactggcaggccgccgccgtgggctcggtgaccgcccccttcaccttcagcgactatgagtatctggatcagattgaggtgcagtgacatggaagagaaaaggacggatttgttggcgcttctgttgcggccggagctgcccaatgtgcagaaggagctgcccacggcggagtaccgcgtcaagcggctgagcgaggcgctgggcacggacgtggtattcaagctgagggcgctgccctacggaaaggtaaaaagcatccgggattcggtggcgggcgacccaaggctggatatcctgctggccggctgcgtggaacccgacctgaaggcgaaggagctgaaggagaagtacggcggagccaccccggccgagacggtgaaggccatgctgctgccgggcgagatcgaggatctcagccgggcggtggagcggctgtgcgggttccgccgcatcaccattgatgaagtaaaaaacgcctgacggagggcggcgacacagagctggaactggtttactacctgttccacaagcatcactggacaccggagatgtactacggcatgggccagggaggccgggatctgactctggcgttcgccctccatgaggtggaagaggggagggaacccaggtagaacggcgggcggccacgagggccgcccctacggtcgtgcgcccaacccggagcatgacaggaaacgggaacgcggctgatgcaggcatcggccactaag

SEQ ID NO: 4348 - DNA, 19214 bp, Unknown
  gut microbiota DNA sequence
ggggtatgtaaccgatggactcaggagagcgcttgaatggcattcaagaggtcagcggttcgatcccgcttatctccaccaaaaagaggcagaagccaattggtttctgcctcttttttgctaacggtgtcggaaatttgagtgatatgtggtatactaaaccaaaggggggcgcatgggagaggcacttcaaaagaagccgagtcaggaggggcgttttttgtttaactgtcatgaccgcagaatgaaggcctatctggaccggcggtggaatacgtggggggccgcccggttggcggagagagtatgaagaaagagccggagtgatggaagaaaagcggacacccccggagttggcctgggcgatgatggagctgttaggctgtccttgtacctatttcgcacccatgtgggatgacgatcctctgctggaatgcctgcagatgaacctggagccggaggggggagtacatggcgtcacgccggagcaggcggcggcgcggtactgacaggagcggcatggagcggtaccctgcgccgtcacccacgacgtgctggagtgccaattaccccgcccgatggcccgggaggagtcgatgaccctgacgctggagcaatagggcttttgcccggacattgtggatcagggcgtggagcagatcggcatcctagcggacggcctggcaaagtcggagctctggtacttttgatggaattaaaccgggggaggactatggaaaaagagtttatcaatctgacgccggaaaacctggacggggagcacctgtgctgcatcatccgcagcaggaagccccatccgggggtggaggccaagcgccgctggcttgccgggcggctggaggaggggcatgtcttccgaaagctggacgcgaaggggtcggtatttgtggagtatgccccgctggagaccgcctgggtccccgtgacgggggacaactacctgtactgcctgtgggcagcgggggcgtacaagggaaagggctgcgggcgggcgctgatggagtactgcctggcggacgccggagcgaaggggaagtcgggcgtctgcatgctgggcgcccagaagcagaaggcctggctctccgaccagagctttgcgaaaaaatacggctttcaggtggtggacaccgccgccggagggtatgagctgctggccctctcctttgacggcaccgcgccccggttcacggatgccgcccggcgggggacgatcccggagcaggagctgaccatctattacggcatgcagtgcccctacattcacgccagtctggagcaggtgaagcgcttctgcggggagaggggcgcgccggtgaccctgatcccggtggacagcctgcagagggccaaggagttgcccggcgtgttcaacaactgggcggtgttctaccgggggcggcttgagacggtcaacctgctggatgaggcgggcctcaagcggcttctctcaaaatgaattttattcattgacttttgttcaattgagtgctatactgcggatgaggtgatgggatggcgcggatatcaaagccgccggaggtacggcggcaggagatcctggacacggccatggagctgtttgcggaaaaggggtatgaggacacctccatggcggacatcgccaggcggatgggggtggtgcaggggctgtgctaccgctattttgactccaagcgggtgctgttccgggaggccatggagcagtatgttcgggagtgctgtgccgccgggctgcccatcatccacgaccggagccgcacgatccggcagcggctggacgacatggcggcgctgacgctggagaccgagcagaacgcccgttaccacgccttttaccaccggccggagaaccagagcatccatgaggagctaaactggcgcatctgcgcctatctgacgccccatgtggcggaggagctggaggacgcctgtcaacggggagagctgcgcctggagcatccggccctggcggccagctatctgctccacgggcagatcggcctgctgggggaacatgcggtgcccctggaggagcgggtggcgctcctccggcgctatgccggccggattctggagccggaatactgaacaacgcctccgaagcgcggggacgcgcgtcggaggcaaaaaattcccattcgagtgaacaaaattcaatgaataaaattcaataaggagaatgtgctatgaacgactgtaaaacgcgctctggccgagcctttgaccggcaggcctggacctatgacaccgcccgcttcggcagccatgcccgtgggctgtacccggtgttgctggagcagcttgcccagattccccacggctcggttttggacgtgggctgcggcacgggagagctgctgcgggaggtggggctccggtttccggagaccacccggacagggctggatctgtcggccaatatgctggcggtggcccgggaaaagctgggcggcgcggtggagctggtgcagggggacgccgagcgcctgccctttgccaacaggcggtttgaggtgctgctgtgcaacgactctttccaccactatcccaacccgggcgcggcggcggcggagtttgcccgggtgctccagcccggcggcgtgctcctgctgggagactgcacggccccggcggggctgaggggggtggccaacctgttcctccccctgtccggcgagggggacgtgcgcctctacagcggggcggagctggccgccctgctggaaccccacttccatggcgtggagttccggcgggtggggcgctccagcctgctggtctggggggttcgataaaataaaaagcacaggcccgccgcatatgcggcgggcctgtgccggttattcgtcaatggcgaagtgatagaggctgtcatagtccatggccacggcgatgtccacggtgccccgcacctggttgtagaggcaggaccactgggtggagctgtccttgccgggctggggctgctggctgaccgcctggagcagggccatgccctcctcctcggtgagcacgccgccgctggcctccatggtctcctccaggacggcgaagcgatcctggccccggccgaagtcccagtcgccctcggtgagcagaaagttggtggcccggggactctccaccacgttcatctcgtcgccaatgtactccaccaccacggcgcggccggcggcgtcagcgatctgaaagtggtagcaggagttggcggaggcgtgcatgtcgtactggctcagcagtgccagcgcctcatccacggtggccgcccgatccagcagcaggcggatggcggtggtggtggtgatgtcgggcttgtcggtctgctggtcggtgggctcggtgtcgatgagcagcactcccaccgccaggcccttctcgttcaggccgtccagagggacatagggggcggccagggtgagcaggctgtccagcaggctggtgggcagcttgtcctccccaaagccgatgtaggacaggttaaccatggagatggagcggtagccgtcctccggggcagtgcggacaaagagggcgggggagtagtacatgtcaaagttgcggccgaagatggcgtcgccctccggggtctcggcggcaaaggtggagcagcccagatccgggatgtcgaagcgcagggggagacccttgagcagcttctgcatcaggaagtccagcagctcgttgtcgttggaggcgccgccctgggccagaaagtcgtccaggccgtagtctcccagataggtcatggtgaacaggtcggtgtcgtccacccgctcaatggtattcagggtgcgcagctcggcttggaacagggccagcagcaccagcacggcggcgagaatcaccgccgccagggcgagcagggcccgccgaatgtatttcccggcgcggccggggcgcttggtcgtggtctcgtgcatggttgagctccttttctgatgtaggcttgtttgacgctcgaatgatttgatagccaaacgaattaccatgataaacagaggcggccaaactgtcaagagaaatttggaaaaaggggttgacatattagaatatttgaatataataatattagaaaatgacgatgaggtgagcgacatgagcgatcccaccgccctctatgaggagaaggcggagctgctgaaggccctggcccacccgctccggctgcggatcgtccgcgggctgctgaagtgcggctgccgcaacgtgggctgcatggaggccaacaccggccagtcccagtcctgcatctcccagcacctgatgcgcctcaaggccgccggggtggtcaaggccgcccggtcgggcaacgaggtatactatgaaattgccaacccggaggtggcggcggtgctctccgccctcttcggcgaccgggaggaggaataccagtgtacgatatcgcggtgatcggcggcggcccggcaggcctgtccgccgccatccaggccagggcgcgcaacaagtcggtactggtggtcagcggggacgaccgggacaatcccctctacaagaccagccgcatcgacaactatctgggtttttacaatgtgaccggtcccgaactgctggagcgcttccgcacccacgccggacagatgggggtggagcggcgggacggccgggtgctgaatctcctggccgtgggcggcgcatactatctgagcatcggcagcgaggtggagcaggcccgcgccgtggtgctggccaccggcgtggtgcgggcgaagaagtacccgggcgaggcggagcggctgggcgcgggagtgagctactgcgctacctgcgacgggatgctctaccggggcagggagatcgcagtggtgggcaaaaccgccgacgctccccacgaggccaactacctgcgggagctgggatgcagggtcacctacgtcagcgaccggccgccggagggcctgcactccgacattcccttcgtgaaggccgtccggctggaggtgctgggggagaagaaggtggaggccctgcgggccgacagcgtgaccctcccctgcgagggcgtgtttattctccgcccctctatggcccccgccgacctgctccccggcctggcgctggagggcggttacatcaaaaccgaccggaacatggccaccaacctcccaggcgtgttcgccgcgggggactgtaccggcctgcccctccaggtatccaaggccgtgggggagggccaggtggcgggccaccgggcatcggaatacgtagacacactctaattcatcataaggcgatacagagaaaggacggaacaaattatggcacttattcatctgaccaacgaggcgttcgacaaggccaccgccagcgggctggcgatggtggacttctgggccacctggtgcggcccctgcaaaatgctctctccggtgatcgacggcctggccgaccgctacgagggcaaggtgctggtgggcaaggtcaacaccgacgagcagccggagctggctgtccgcttcggcgtcatgagcatccccaccgtgattttcctcaaggacggcaaggagatcgaccgcaaggtgggcgtgatgcccgaggccagctacaccgcagtgctggacgccaacctgtaaaatagaaacgccgggtggcccaaacgggccgcccggcgtttctgtctcctcttgacaaatatattgtttgttgtatactcaatgttgaatatagaccgaggaggagacgctatgacaaaacttctggtgctgggactgctggacggggggcccatgtcgggctacgacctccagcagaagctgggcggggcggacgcggagcggtggggcggcgtgcttccgggctccatctaccacgcgctcaaaaagctggagggggagggctgcatcgccctggcgggggtggagcagacgggccaccggcagaaggcggtctaccggattaccgaggcgggccggaaccatctgcacaccctgatcgccgacgccctgcgggcctcctccgccctctatcccaccacactctacagcgccctctccctggcagacaagctgtctcaggcggaggtgcggctggccctggaggagcagcggcggcggctggaggcggagtacgccgccctggagcggggccgcgccggcaatgagggacaggaggtgccgcccctggcccgcatcaccattgacaacatggtggacatcgtccagcggcagcgcagatgcgtggaggagctgctggcggccgtgggggaggctccatgaggccggggcggttcgggcggtacgccatccgcacggcggacggggtgcaggaggcggcttacctccccatcggcggcatcgagcagtatatccgcgtccgggggcgaagccgcgccaacccggtcttgctggtgctccacggcgggccgggcagcaccttgggggccaccgcctgccggtggcagggggcgctggaggcggcgttcaccgtggtccactgggatcagcggggcagcgggaacacctattaccgggacccggccgccccgccgcccactgtggagcggctgctctccgacctggacgagctggtggacgccctgcgggcccggtatggccgggacaggctgttcctgctgggccactcctggggaagtctgctgggcgggctctatgcgctccgccgcccggagaagctctcagcctggctccccgtcagccagatggtggacttcaagcggtccgagcaggtatcggcggcggaggccatccgaagggcccgcgaggcggggcgggagaaggaggcggaacggctggcgcaggagctggagcaggtgctggccctgcggcggctggaccgggcgggggccgaagccctgctgcggtttcgccggcggaaggagcggtatctgccgccccagtacggcgggccgtctccgctggggggactggccgccccggagctgaccggaaacgacctgcggtggaagctccgctttgaccggatgctggcggccaacgccgccctctacgaggagctgctggggggcctgtccctggacggttgtccgccgcgctatggggtgccggtcatcctgacggcgggagaacgggactggaccacgccctatccattggcggcggcctattacgataccctgtcggccccctgcaaggcatttctctccctgccgaacgcggggcacctgcccttccgggagcggccggaggagtggagccatattctgctggacgcgctggcgcaaatctgacagacccccggccactgggtggtcgggggtctgccgtcagtgggagcggccgcccagcatggcgttgagctccgcccgggtacagtggtagtccccgtcgccgctgcggcggtaggagccgcgggccaggtcgccgccgatgtagaccgggcgctggtcctgctccgccgggggcaccgtgatggccacgatatccccgccgtcgacgtggagaacctggatgtcgccgggggtgagcaggttggcgctgaccacccgcgggtcctggagcagggcggtaaactcgtccaccagctcccggggctccagcagcccctgcacccgcagggtgtggtcgggcagctcctccacccccagcaggatgacaccgccgtaggtgttggcaaaggcggaataggtctcccagatgctcctgggcaacccgccggtggccagcttggcctccaggcggttgttttcccggtaacggctgatctgctggaagtcaaacatgggatgtcgccctccttttgaccctattataaaggggaaaaccgcccttgacaagggagacatgttcctcccccctccggcatatgtgtaacaggggggtgtggacatggcctttgccgagcgattgggaaatttcatctggaacccgtggctgctggggctctttttactcagcggcctgtatttttcggtgcggaccggcttctttcagctctttcacgtccggctgtggctcaaaaccacgctgggctccctgctccgtccgaagaggcggcgggagggcggggggcttacccagctccaggccctgtccaccgccctggcctccaccattggcactggctccatcgccggggtggctaccgccatcttctacggcgggccgggggcggtgttctggatgtgggtgtccgcctttctgggcatgatgaccggatgtgtagaaaagaccctggcggtgcgctaccgggagaaaagccgagacggcggctggcagggcggccccatgtgctacatggagcggggagtgggcagccggacgctggccgccctgttttccctgtgctgtgtggccgcctccctggggggcggaaatgtggtgcaagccaactccatcgccgcatccctggaggcggccttcggctgggaccggctggcggtgggactggtggtggctgtgctgaccggactggtgatcctgggcggcatcgggcgcatcgggcgggtcagcgaaaccctggtgccctgcatggcccttctgtttatcggcggcggagtgatggtgctgatttgccaccgggcggccattcccgaggcgctggagcgcatcgtgacgggcgccgtcacccccaaggcggccctggggggcggcatagggtacggcatggccgcagccatgcgctacggcgtggcccgcggtgtattcacaaacgaggcaggcatgggctcctccgccatcgcccacgccgcctccaacgtacaggaaccggcagagcaggggatgtggggcatttttgaggtgtttattgccactctgtcggtctgttccatcacagccctggtgatcctcacctccggggtgtaccaggagaatgcggccctgctggccattcagagcggcaccgtcaccagcgccatggtgggcgcgcccctgtccgccgccgccttctccaccgtgttcggccgcttcggggtggtctttgtggcggtctgcctcctgctctttgccttcacctctctgctgggcagcagctactacggggagcggggcctccagtacctcaccggtaccgaccgctggcgctggccctaccgggcggctttcctgctggccgtggtggcgggaagcgtaggcgacgtggccgtggtgtggcagttagctgatatcttcaacggcctgatggccctgcccaacctgtgcgccctgctgctcctgtcgcccgaggccctgggtctgctgaacggctggatgacggtcagaacagacggagctgcccatcgcggcaggagcaggcgggcaggtcggtaacggtatctccggggctaggtatgccggtcagtagggggctgtcgggggcgtgctccgcccgccgtgccgctgtgcgggcgggggtgcggttggcatagcagtagcggcagccggaaggacaggtgtcgtaggcgccgatgtccacgctttcacagcagccgcagccgggccgctggccccggtcggggcccagccgcagcggcccgccgcacaggcgctccagccgggcccggtcgatacaggcggcccggccgatgccgtggggggagaagtcccccgcctcgcagcaggccacaattgacaagtgatattcctttgcagtttgccccagcatggacgccagctcctgcatttccagggcatttgggggccgcaggccgcccatgggacggccggggtaggggtcgagaaagctcaccgtcacctgatcagtgaacggggaaagcgctttacagagcttgcggaaccgggcctcgtgccaggcgaggccgatggcgtcggtgaacagaatggggtcgtaccgccacagcacccgcccccgccccaggcggcggcccaggacctgaaaggtctccacaatggcccgcttgtcccgcaggcccggttcgatctccggcccgtagggggtgagggtgaactgaaacagatagcggtagcccatcccgtccagctcgtccagccaggggagcagcggggcggggtctttcgtccagaacacgatagcgtccacgactgcgggggagagggggacccggcggagctggccggggcggtagggattgcgcaccagcacctcgccggcgcgcaggcggcggaggagccactcggagtaccagcgggggatgtcggtacggcgggagacggagagaatcacggggaatcacctcgcaaaaagcgggcggacagcactgctgtccgcccgctgtgtcatgcggctgcgccggtctgcggctcgggggaggcggagggctccgccggaacggcagaactgcctctggtgtggctggtgatggtgtagccgtccaggatgagcgactcgctgccctcctgcgggacctcgtgctcaatagtgacggagtcgcccacattgaggatcacggccacctcattctgggaggcggagacggagtagaacacctcctcgccctccaggcggatgaagtagtaggtgttgccgtccagcacggcggagcggagctcggcgatgacgccgctggcctcggtctgcggccgctcctccggcgtggtgatgcccttgctgcccagcagctggacatacttctgctcacactcggagacggtggagccggtggccacgatctggtattgggccacattgaccatggcgtagctcttgaccaggttggtattgtccttcagggggatgaagtaagtgggctcgccagcgatattgagcagcagggggaaggtggctatatacccaagatcctgcaccacgcccatggcagaagcctgagcggccttctctgtagcgccgggcgccgtatagaacttggtctccttggtgcgctggttggacagcagaaaacccaggttggactggtcggcgttggctgaggtgacgccggtatacatataaacgtcgtcgttgagagcgatatagttggagccctgggtggtgacggtcacgtcccgctggccaaagatggagttgatgaagccgttgaccagggtgccgtggtagtcatactgctccatgatgagttcgggggtgtagacgttgtccacccatgtgggcacctcctcgtagtaggtgctctcgccggtgatggcgtccaccaggacggcccccttgatgtcggtgccgccgaagaggccgatggtcttgaccacccggggggcgatccaccaggggcggccgtcctcgtcgatctcgaactggggcgtgccgaacatgtaggtggggtattggaagcgcaggtggcgcacgatgttgcggttgaggggctcagagaaggagtatttcatcccttcctccaggcgcaccacagtggcctcctgggtgaccatgtccacgatgacataggcgggcaggccctgggagcggttggtgaaccacttgatgaggtcagcataggcgatgggggcgacccggacggggcggccctggtagttgatttgggtggagtcgttggagtattcaaactggctgaccatgtcgctgagggtgcccatctggcggtcgcccaggaagttggcggagtccttgtccagggtggggatctcactaaaggaaatctcggcgatgtcctcggcgaaattgccatcctccacggtgagcagatcccggtaggccgcggcgcggaaaaggggcatcgagaggatggagcccacgatggccaccgcgatcagggccagaaacaggatgcccacaggcaggcactgggtcttgatgaagcggaggtactccttggggcctccaccgctgctgaccacattcatgccggaggtgatcagggcgctgacgacatacaccacacacaggatgccgatgaaggtgtaaaaatcgctggactgcaggttgatggggggcagggccacatagaagtagaggaagcccaccacagcggtgacgatcagattgatcaggatcttccccagcttgcttgcagggcctcggcgcttcttggccggttgctgttccataaaaacattctccttttgtttcgcgggcccggaggccaaacgaacgggataagggtagtatagcctaaaatcggctgaaaggcaacggctggccggaaattggaagattaaaaaagagtaaagatccggtcgaatctttttgtaaagttcttgtaaataccgttgacgtgccactttacattcggtatactactgctggcatttggtaagagatcagaaaaaagaatgtaaaaaatgagggaatgaacgtgaacctagacataagcattctcctggggctgctgggcggcctggccctgttcctttacggcatgcagatgatgagcgccggcctggaggccgcggcgggcaaccgcatgaagggcattctggagcggctgacctccaaccgcttcctgggcatcctggtgggcgcgggcattaccgcggtcatccaatcctcctccgccaccactgtcatggtggtgggcttcgtcaactccggcatgatgacgctgaaacaggcggtgtggatcatcatgggcgccaatatcggcaccaccatcaccggccagctcatcgccctggacgtgggcgccgtggctcccctgttcgcctttgtgggcgtggccatggtggtctttttgaagaagccccagattcaccactacggaaatattctggccggcttgggcgtgctctttatcggtatggagatgatgggctcggccatggagcccctgcgggaatggcccgcctttgtcaatctggtgagcaccttctccaaccccgttgtcggcattctggcgggcgcggccttcacagctctgatccagtcctcctccgcctcggtgggtatcctgcaggcgctggcccttagtggggtaatcggcctggacagcgcggtatacgtcctcttcggacagaacatcggcacctgtatcaccgccgttttggcctccatcggcaccagccgcaacgccaagcgcaccaccatcatccacctgatgttcaacgtgttcggcaccgttctgttcaccgtcatctgcatggccacgccgttgaccgggtttatgcagtccatgacccccgacaacccggcggcgcagattgccaacatgcacaccctctttaatattgtgaccaccctgctgctgctgcccttcggcggatatctggtgaagatcgccatgcgcatcctgcccgaccgcaaggaagacaaggaggaggggatgcacctggcttttctggtgcctatgcctgcctccaagcaggagcaccccatcggcttttccgcgatgtatgtcacccagatccgccaggagctcaaccgcatgatgggcatggcgaaggagaacatcgccaccagcttccaggcagtgctggagcgggatgtaaagcgcgtggagagcgcggaggccaccgaggagtatatcgactatctcaacaaggagatctcccagtacatctccaacatcatcgtgcacgagaccaacgagaaggactccaccgcaatcagcgcctacttcaagatcactggcaacatcgagcgcatcggcgaccatgccatgaatatctgcgagtacacccagatgctggacaagaagaagattcaattctcagaggaggctcaggaggaactgaggaccatggaggccgtatgcctggaggtgctggatctgctggagcaggagagcatcgagcccaccgactggctcaccaaggtttccgcgctggagcagcggatggacgacatgactgaggagtatcgccgcaaccagatgaagcggatgaagcagggctcctgctcagacgaggcgtgcatcattttctccgagctgcttaccgactttgagcgcatcggcgaccacgcactgaacatcgcccaggagcgggcgggcatcgccaccgaggccaccgacgcctgacaaaaagaccgtgtccccgccgggggacacggtctttttttgtggatctcagagggcggcgcactgggcttcgatgtccgtctcgcaggccttcatggcctggagggtgcgctccagcaggtcgttgagctcccaacccaggagttgggctccctgggtgatggtctcccgggagcagccggcggcaaactttttgtccttgaatttcttgcgcagactggacagctccatgtcctgcacgctcttggaggggcgcatgagggcggctgcgccgatcagtccggtgagttcgtccacggcgaagagcaccctctccatttcgtgctccggctgggcgtcgccctccgtcatgccccagccgtggctgactaccgcgtggatgagggccgggtccagcccgcgggcctccatgatctcacgcaccttgacgcagtgctcctccgggtagcgctcgaagtccaagtcgtgcagcagccccgcttgggcccagaacgccgcctcctccccgtaacccagctcccgggcgaaccagctcatgacggcctccaccgtcagggcatggcgcaggtgaaagggctcctcgttatactgcctgagcagggccagcgcctgctcccttgtcagctccatggtccgacgcctccttgaaagaatagtaccatcataccacgaaaggaaagaatttgtaaagttcgtggggcgggacttgccatccttcggaaaccgtaatatactaggagcatccaaacataaggagggacccattatgaagtatgagatcattggtgagcccatgcccgtcgtggtgtgtgatctggaggccaacgaggccatgatcaccgagcggggctccatggtgtggatgagccccaacatgaagatggaaaccggagccggcggtattggcaaagccttcggccgcatgttctccggtgagtcgatgtttcaaaatacttataccgcccagggcggagccgggatgatcgcctttgcctccagcttccctgggtccattaaggcggtggagattgacccggcccaccccgtagtggtgcagaaaagcggctttctggcctctgaacagggggtggagctgtccatcttctttcaaaagaaagcgggagctggctttttcggcggcgagggatttattatgcagaagctctccggccgcggcacggcctttctggaggtcgacggctatgcggtggagtatgagctccaggcggggcagagcatggtggtggacagcggcaacctagccatgatggatgccacctgcaccattgacattcaaatggtgaagggcgtcaagaatgtcctctttggcggcgagggcctgttcaacaccgtggtaaccgggccgggcaagattctgctccagaccatgccggtcagcggggtggcggcggcgctggccccattcttcaacactggaagcaaataaatggataccctgatgagcctgcccatgaccgcctctgtcctgacggagtatggggacttggaggaggcttgccgttcctgcggctgtgacggcctggaggtggtatggggcggtgaggaactgccttgcacggtgccgcaggcgctgcacgtgggctaccacctgaccttttatccagattggctggatttctggcggggagaccgggccgcactgaccgagaaatttggctcggaggaagtgtggcggtccttttacggcggcccggagggacgggagaccctgctgcgcctctaccgggaggatctggaccgagctgtgacgtggggggcgcgctatgtggtgttccacgtgtccgacgtgtcggtggaggagggcttcacttaccactggcggcacacccatgaggaggtcatcgatgcggcggcggcggttatcaatctcctgctgggagaccgggcgtggcccttcgacttcctggtagagaaccagtggtggccgggcttcaccttcaccgagccggagctgacccgccgtctgctggacggaatccgggctgagcgcaaggggatcatgctggatatcgggcatctgatgaactgcgacaccagcctgcgtaccctggaggaaggggcggactatgtacaccgcatgctggaccggcatggaggcctttgccggtacatcagggggattcatcttcactgctccctcagcggggaatatgtccgggcccatacgggttttcttcctccgaggttgcctctggactatttaaagcggtacggcttcggctaccgccatatcctgcgcatcgatacgcatcagccctggacttcccctgccatccgtgaggtagtggagcgcatcggtccggactatttggtacatgaactctccgcacctgaccggggggcgcgggaggaggctatccatattcaaaaccgcgccctcggacgtggataaagcggcggcgcatccattcggatgcgccgccgctttttaccaagaaaaagctccgcaaccgaaaggttacggagctttggcagcgggtgaaggattcgaaccctcacatacagagtcagagtctgctgtgctacccttacacaaacccgctatttttactgctctctcgtgagcacgcatgttattataccaaaatggcgcagaatgtcaatagaaaaatgaaaaaaatttggaaagaaaaattgggccggggcggagccccggcccatggctcaaagtcagaactggttgggctggttgttcttgttctgagcctgctccttcttcttgttctgagcattctggccattggtcttgttctgaccattctggctgcgggccttcatctggtccggattctgattctgcatcaagctcacctcgctttcgctgattgtagtgtacccggaaaaaacaaaatcatacggaaatttttttcacaaatggggataccacgggctgcacttttatgctataatgaaccatcatagcttaaaatgaagcaaagggggcaagacaccatgaaatgtccgtactgcgcccatccggagagcaaggtggtggattcccggccctccgatgagggggccagcatccgccgccgcagggagtgcctggcgtgccataagcggtttacaacctatgagaccatggagagtctgcctctggtggtcatcaagaaggatggcagccgccagacatttgacaaaagcaagctgctcaacggcatgatccgggcttgtgagaagcgcccggtgccctttggaaagctggaggagatttccaacgaaattgagcaggttctccagaacgacatggaccgggagatcccctcggcgaagattggggagttggtgatggaccggctgagagaggtggacgaggtggcctatgtccgcttcgcgtcggtgtaccggcagtttaaggacatcggcacctttatgacggaactcaataagctgctggcggagaaatagaaacaaaaaacagcctgtcgaagcatgtattcgacaggctgtttttttaagtgtcattgtcatcttctcccaactgctggcggatgtagggggcgaagatgcgctccagaaggagggagtggagcagggccagaagggcgggggtgactgcgatggccaggaagaagttgagacacaccgtcagggcggcatacagcagcagcgccagggcgatcgtagagggcaggtgggcgatggccagcttggcgcagttggagaggaggccgcccacaccgaattcaaactgggagaggacggggaagaggtagcacagcaggcccagcggcaacaaaagaaacacatagtaggccataaacaggatgtagccggcgcggttgagcgatgcagtctgatagagcagggtatagagaacgaacaaaaccgcaccgacagccaccaccacgagggtggtcagggcgccaaccttgaaattttcccggaaggtacgaaaaaacaggctccagctcttgcgctcgctgccgcggatacagcgcgccactgtgcggtagagggcggcggtggcgggccccagggtgaacacgggcagagagcagaccagccagaacacactgaggagaaagagatccaccagcttttcgatcagacgccagaagtcgttttccggattaaaaatgcctgcggccatgaaggggcctcctttttgtcacaggcccggcgacagttcgccgggcctgtacgggttcagaacagtgtggcaatccgctcggccagcgtggcggccagccgggcgtggctctcccgggtgaggtgcatgaagtcaatggggttgtgcgccaagccaagggcgttagcgtccagaaagtggcagcgggtttctgcggcgaccgcccggaactggccaggcaggcgcagggatttttccacgcagcccagtcccatctcctgggccacgggagatcgctccactccctttccgatggcgggcggggcgacaatcagaaggttgggctgcccgcccgcccagcagtcgatggactgtgccttccgcaccaggcggcgcaggcccttgccgatggcgcaggcgttggcgcccagccgctccttggtatcgttggtgcccagcatgaccaccagcagggacaccggcgcgtggctcatgaggcatggatagaggtagggcagggcgctcaaactctcctccaccgggtcgtcaaagacggtggtgcgtccgggtagcccctcctcaagaaccagaaagtcctctcccagggcagcctggaggcggcaggtccaccgctctgattcattaaagcggcggagggagccgtcggcgcagtcggcgggatcggcgcagtatccatgggtgttggagtctcccaggcagacgatgtggcgtttcaccgcttacctcaactcgggcagggaggcggcggccacggactggcctacacggcgggccttctcgtcgggcagggtggggttcatgaggccggccacctccgggtactcgtcggccagcaccttcttacaggtgtccaggatgatgtcgccgccccggccggacatgacgcgacccagcagcagcacatgcttgaagccgtagaagtggtggtacagggccagggagtggcccaggtacacgccgatggagcggtagatggcctcggcgggggaaccgccctgatccatcagcttctggacctccttgagcttctcagcaggggagagatcggcggacaggctgatgccggcagcgggagccagcttgatgacggagtcctgggagaagtatttgacgccgcagccgatgtcgccggaccactcatcctccatggcgttgggggacacgtccaccggggcgaaggccagctcgttgagccaaccggtgatgttgccgctctggtccacgtagcccacggcctcgctggtacccatggcgatgccc

SEQ ID NO: 4349 - DNA, 3423 bp, Unknown
  gut microbiota DNA sequence
cggccagggcggacacatcgccgtcgttggcgaccacatagggcacgtcgccgaaggtgtcgcggatggcgcggatatagatgtccttcaccttggcatcaaagtcctccttggacaccttgaggaacagggaggccaccatggtgcggttctcgatatagatgccggcggaggagacgcccaccgcgtccacccggggcatgtgctcggcggcggccttgagggcggagacgatgccctcatagtggtagtcggggtcggaggtggtcttggggaaccagaccacctcctcggagaagaccggctcgccgtcgatgacggcggacaccttgcggtcggaaccgccggcatcgaagccgatgcggcagccgcccaggtggcggcccacagcctggggattgctcttctcggcaggcacctggtcgcagtacaccacctcaaagggcttctcatagacgttggacatgaagtcggcgtcaaaggcgcgggcgccgcccacgcggtaggtggccttcatggcctcatatacggcctgatcgccgctgaggtacaccttgaagccgcccttcatccagagcagcatcttgatgatgcggtccacatagtagatgtcggcctcggccatgtccggggtgccgtggataaaggtcttgtagaccgccacctcgccgccggcccgctccaccgcgatgtccagcggctttttggcgtccttcagaaaggcggtgcagaactttcccagggggagaaaaccggggtccagttccggcacgttttttactgggacttcaattccaagatgcttcattgcgtaagccctccttttttgtgggaaacagacaggttccttcccctataggctatcagtttttttgaatctgtcaagcatattttcagggttttgaaaataattttcgaaattctcttgacgggaggggggagggcggttatgatggaggcaaatgggggacctctcccaatcagcgaaaggtgggatctgacattatggatcataaggctcgtttacagagtcaccagaagtggattcaggaggaactggagcgcagcatccggttttggatgaaaaacggcatggacccggtgcacggcggcgtctatacctgtctggatcgggagggaaaggtgttctccacggacaagagtgtgtggatgcagggccgctgcgcttggatcttcgcttatctgtgccacgtgtacggagtgaaggaggagtggctggccgccagcaagagctgcctggacttcatggagcggtactgcatcaaccgggcggcgggcaaccggatgtacttcaccgtcaccggcgacggcaagccgctgcgtcagcgccgctattgcttctccgagggcttctatgccatcgccaacgccgagtattacggtgttaccggcgacaaggcatgcctggagcgggcccgcgcggcctacgacctgatctggaacctgaaccaggggctggtcgccgaccccacggggatgggccccaagaccatcccagagacccgctccggccgcgccctggccaaccctatgatctatctgaacatcacctcggtcctgcgccgggtggaccccgagcaggacgcgctttacagcgagcgggccgcccagtgcgtggatgagattttccgctaccactacaagccagagctgggctgcaccttggagagcgtcggccccaacggcgagttccggggcgacgtgaccgagggccgggtggtcaaccccggccacgacatcgagtgctcctggttcctgatggaagacgccaaccggaagggcgacaagaagcagcatgaggtggcggtcaaaatctttgaccaggccatcgaggccggctgggactacgagtacggcggcctgctttacttcatcgactgcctggggcgtccccctgaggcctatgagcacgacatgaagctctggtggccccacgacgagatcctcatcgccagcctgatgatctaccgcgacaccggcgacgagaagtacctgacctggtttgagcgcaccctggactactgcaaggagcacttctccgatcctgaatacggcgactggtacggctacctgcgccgggacggcaagcccaccatgcccgcctgtaagggcagtacgttcaaggggcccttccacctgccgcggatgctggtgatgtgtgaccagatgctgggacagctcctggccggacagtgagggggcagttatgccctttggaaatgtatttgaaaagatcaacagtgaatactaccagctgaccagcgcggaaaagaaggtggccgactatgcggtgattcaccagcagaagacccagttcatgtccatctccgagctggcggaggaggccggcgtggcggaggccactatctcccgcttctgcaagcggctgggttacaaggggtacagcgcgttcaagcttgccgtagccaactccacggcacggcgggtggaagcccctaccgtaccgggggagatccggccggaagacagcattgaggagctgtgtcagaagctctacgccgctgaccgggatgccatggcccagacggtggaactgatccgcccggacagcgtccggaaggcggcggatctgctcttttccgcggaaaaggtgctgtgcatggggcagggggggtccatgatcctggcccaggagtgcgcccatctgttcagcaccgcccggcccaacttctacgcggtgctggattcccacatgcaggccatcgccgcctcccacctgacggcccgggacgtggtactgtatttttcctactctggctccacggaggaactgctgaaaaacctgaaaatcatccgggaccggagagcggtggccatcctggtcacccggttccccaaatcccctggtgcggcctatgccgacgtagtgcttcagtgcggctctctggaggggcccctccagggcggctcggtggcggcccgtgtagcgcagctctacctgatggacgtgctgttccatgaggtgtgccgcagggatgtgcagggcagtgcggagacaagggaggccgtggcggaggtgctttcagacaagcacatttgaccgcgtattgcaaaacgtgaaagaaatttgcagaattttatgagaaataaaattttcttcgaaaagcatattgacaaaacaccctcggaattatacaatctacacaacggacgagatgtcctggaaagaaaaatttatcgaaaatgaggaggaagaacaatgaacatgaagaaacctcttgcgctcctgctcgccgccggtatgactctggggctggccgcctgcggcaacggctcccagggtaacagtgagtcccccgcgcccggcggcgagaccggcggcagctccaccggcgctgttgagttgaatctgtgggcgttcaacatcggtggcttcaccga

SEQ ID NO: 4350 - DNA, 869 bp, Unknown
  gut microbiota DNA sequence
cgaccagaagctgaccaacgccatcacctctggcaccggccccgacatcatctttgagggccccgagcgtatcgtgggcaactacgcccgtgagggcctgatggtggacctgtccgacctgtgggagaatggcggctccgacattcccgagggcatttcctctgtgtctcagttggacggcacctactacatgtaccccctgagcgtagccgcccactgcatggctatcaactatgatgtctttgaggcggctggtgccctccagtatatcgacgaggaaacccgcacctggaccaccgacaacttcgtaaaagccatggaggccgttcgtgacgccgcggcggcgggcaccgtcaacgttgccacccccggcatcatctactgcggagcccaaggcggggaccagggtacccgcgccctcgtcaacaacctgtactccgactactatgtcaatgaggacggcacctcctacctcgctaacagcgagaacaacgtcaaggctctcaagctgctgcaggatatggtgaacaacggttccatgtccgccaatgccagcttcgccgcggccgacgagctgcaggcctttgccaaccagacctgcgccgtgtccttctgctggaactactccaattacacccagtatgctgagcagacccagttcactccctttgccatggccttcccctccgacgacggcaagcccgagctggagatggccggcccctatggcttcggcgtgttcaacaacaaggatgaggccaagattgaggccgccaagaagtttgtgcagtttgtctgcgacgaccagaccaccggcatcgaggcggtgaagaccactggattcttccctgtccacgctgactggggtg

SEQ ID NO: 4351 - DNA, 47070 bp, Unknown
  gut microbiota DNA sequence
gctccggttcaaatccggatagcagctccacaaaaaccgctcttttcgcttgaaaagggcggctttatttttgggggagaaagaaccaccagctatactggtgggcttcccccgtatgctttagcaaaaagcagtgatagtgacaagaaagtttcaaatagaagataatatgcccgtttacgggcggccgagcgcaagatgcaggctaaagatagcggtatgggccacttcaccctgtttttaccgcgtggtataggtgcgggtgcgcagggtaaacccggcgtcgtagtgtcccagaatggaaaaacctttttgacatccacgtcattttgcagggctgttgtggcaaaggtgggcctgaggtcgtggaacatgaggtgctctaggcccgtatttttaaaatttacttatagaggtttaccattctgtccgggtgcttttcgtgctcctggatgagcagttccacggcagcctgtgggatggacgcctgccggacggagttctccgttttggagtgggtcagctccagggagcagtcagggttacggacgtattgcctgcgcaccggaattgtccggccttggatgtccacatgtccaaccgcagggccgccagttcaccttttcgcagagcgttgtccaaatccaaatagaacatgtgcaggagtacccacaccctagcagcctccaagtcgtcccggatgtgctccagaggcaggattttcatgtgcagttttcgggcattagggacgatgcaggcactaacaataagctggtaatagtttgaaatagcgtagcaaacgttaggctaggcgcaaagcttgtaccacgttcacagtccggtggccggctctcccgatgtccctgataatgccagccatccgccggcagaggtattttcttgcaattctaagtttggagtggtaaactgggcatgcacgcaacacagattggaaggagaatggagcatgaatcccgagagcgacttccggattgagagcacgtatgacaggcaggcgtatcaggccatggcaaaggccacctggaagctgttccagaagcacaggatggaggtgatggcctatcccgccctgatcagcgtggctttggtgatcgccgttctgctggtatttaactggaatcatacggtcctgcccatacgcattttgggtattgcgtttattgttctgcagttcgcggtgatccccctgggcgcgcggcgcgctcaagccaagacgtgccggaaagcgatccgtgatgcggaaaaacggggcgaatatcccgcccgtgtggagtttttgttccaggacgaccatatccgtaccacagtggggaaggaagccacgtcggttcgctaccgggaggtcagccatttggccgctctgaaagactggcggttcctctatttcgggcagggggcgtatatcatccccgtctcggcgtttcgggatgcggcggagctggaccgcttcgatacgtttattaccgggaagtgcggcatgcccattgtaatactggagggggaagtacccaagagctgacggaacgcaagaaggggaggagacggatgcaggagtccgagcgtattttcattgctgaaaacgccacgctgctgcggggaagcgagcgggagctcaaccggcagctctttacgatcctgaacagcatctatgacggactttacattacggacggacaggccaacacgatcctgatcaaccgcgcctatgaggaggtctccggcctgcggcgggaggacgtgctgggcaaaagcatgcaggagattgtcgctaccggcatgattgaccgctccggctccctgggggtgctcaagacccgaaagcccgtgacgctggagcagaccttccgcaccggcaagcaggcgctcatcaccagcaccccccactttgacagcagcggggagatcaccatgatcatcacggtggtccgggatatgacggagatctacggcctgcagcggaagtatcaggagagcgaggagcgccgccgctccgagatggagttcctgcagcgcaaccagaggtttgtctcccgcatggtggcggccgatccccgcacgctggaggtgctggcccgggcccagaaggtggccgccctggacacgacgatcctgctgctgggggagaccggcgtgggcaaggagcagttcgcgcggtacatctacgaaaactccgcccgcgcccggcagagcttcattggcatcaactgcggcgccatcccggccagcctgatcgagagcgagctgttcggctatgagaagggggccttcaccggggccagcaaagagggaaagatgggtgtgtttgagagcgccgacaagggtaccgtctttctggacgaggtgggcgacctgccccttgagatgcaggtacatctcctccgcgtcctgcaggagatgcaggtaagaagagttggaggcgtacgctccatctcggtggacgtgcgcatcatcgccgccaccaaccggaatctgctggacatggtgcatgaaaagaccttccgggaggatctgtactaccggctcaatgtggtgcccatcgagatcccgcccctgcgggagcgcaagcgggacattcgcccactggtggagagctttctcaaggacatgaacaagaagtaccgctatcagaagcggtttgccggcgcagccatggagattctatacagctacgtctggcccggcaacgtgcgggagctgaaaaacgtagtggagcaggcggtgatcctcagcgccggggacgagatccagccctccgagctgcccattgcctgccggtttgagggggagagccacggcggggacgagactgggcgtgtgaacctgaagctggaggtggcgcggttcgagtatgagtatatctgccgcgcctatgagaagtacggaacggtgcgggccgcggcggccagcctggggatggacagcgccacctttgtccgcaaacgccgcaagtttgaggagctgctgcaaaaatgaaacgggcgctgtaaaaatgcaccagcctacagaattgcggcaggtcaattggtttcagttagataagtttaaattaaccgatgatctcttgatgcagaaatgcagcaaacagggagagggatttctcgggggaaaagcccaatcaactgcgcggcagttgattgggcctttttttggagttggcatgtgaaatgcataaaagaaggagtgtcacgaacagttggccaactgtcgcagcgagactgacaaaactcctgtttgggatgagaaagagggaacgtaaatggcaaacgaacaatttgtcagccgttaccgtaaatacggtgaagaacagccctactggaaggccggtattttcaagatccgcctcccctttgtccactacaaatggtcggttcccgagatggtgcaggccgtgttcatgtgtgcgacctgcctgggcgctatccccgtgctgcaagaggtcctgggcgtttcgtacggtgtagccctgtccatggtcatcattaacggcttcttctacaacctgcatgtgttgctgggcgaccccgtggtgcccgggtggatcacccctgccattcccatcattaccgccttcctgaccgacggatatgagatgggccctgagcgtacccaggcgctgattgctatgcagttgattctgggccttatcttcctggtgttcggtatcaccggtatcggcggcaagatggtacacttggtgccaaactccgtaaaggccggcgtactgatgggcggcggcttagcggccatcatcggcgagatgggagaaaccggtcgtttctggacgtatcccatctctattaccgtgggtgtgctggtggcctacttctgcctgttcagtcccatatgggccaacctgcgccggaaatacaaggccattgatttaatcggcaagttcggtatgctgccggctatcatcatcggtgtcgttctgggccccattgtgaaggagatcgcggtgcctgctgttcagttgtggcccctcatcaagatcccagagttcggcaacatctggaaccagttgtctccctttgccatcggctggcccagcgcggcgacctggattgccgccatccccaccgccatcgtggtgtatatcattgcctttggcgacttcgtcacctcggaggagctgctccgctccgccgatgaggtccgccaggatgagaagattgacttcaacgccaaccgctccaacgtcatcagcggtatccggaacgtggccatggcgctgtgctgcccctacacccagacctgcggtcccctgtgggcggccgttactgccgctgtgtcccagcggtacaaggagggccccaaggccatggagtccatctactccggtgccggtaccttccgctggtgtacctttatttgcgtggccctgatccccatctcctccctgctacagcccgtgctgcccgtagccctgtccctgaccctgatcgtgcagggcttcatctgcacccagctggccatgaacatgtgccgcaccgacatcgagcggggtatctgcggcgtcatgggcgcggtgctggccatccagggtgccgcctggggactcgcagtgggtctgattctgttctttatgctttttgagggcaaaaagaaggcctccgagcaggtggccgtcggtgccgccgacgacaaggcgaaccagtagttccattgagttctgagtattcaaaaacatagattgattgaatctgattgagaaaggaagtcctctattatggcactcatgacaggcgaacagtacatcgaaagcatccgcaagatccccatggaaatctacatgttcggcaagaaggtggagaatccggtcgacaatccgatcctgcggccctccctgaacagcgtgcgtatgacctatgacctggcccagatgcccgagtatcaggagctgatgaccgccatctcccccgagaccggcgagcgcatcaaccgcttcacccatatccaccgctccaccgaagatctgcgcaacaaggtgaagatgcagcgcctgctgggccagaagaccgccgcctgcttccagcgctgcgtgggcatggacgccttcaacgccgagtactccaccacctatgagatcgacaagaagtacggcaccagctatcatgagaacttcaagaagttcatgctctactgccaggagaacgacctgaccgtggacggcgccatgaccgacgtcaagggcgaccgctccaaggccccccacgcccaggacgaccccgacatgttcctgcatgtggtggagcgccggcccgacggcgtggtggtctgcggcgccaaggcccaccagaccggcatcatcaacagccacgaggtcatcgtgatgcccacccagtccatgggccccgacgacaaggactacgccatctccttcgccgttcccctggacaccaagggcctgttcatgatcatcggccgccagagctgcgacacccgcaagctggagggcagcgagatggacgtgggcaacagcgagttcggcggcgtggaggccctgaccgtgttcgaccacgtgttcgtgcccaacgaccgcatcttcatgaacggcgagaccgagtacgccggcatgctggtggagcggttcgccggctatcaccgccagagctacggcggctgtaaggtgggcgtgggcgacgtgctcatcggcgccgccgccgtggccgccgactacaacggcgccaacaaggccagccacatcaaggataagctcatcgagatgacccacctgaacgagaccctgtactgctgcggcatcgcctgctccgccgagggcgcccccaccgagagcggcaactacatgatcgacctgctgctggccaacgtctgcaagcagaacgtgacccgcttcccctatgagatcgtccgtctggccgaggacatcgccggcggcctgatggtcaccgcccccggcgaggccgacttccgcgacgagaagctggggcccgtcatcgacaagtacctcaagggcgtgtccaccgtctccaccgagaaccgcctgcgcattctgcgcctcattgagaacctgtccctgggcaccgccgccgtcggctaccgcaccgagtccatgcacggcgccggctctccccaggcccagcgcatcatgatctcccgtcagggcaacctggcccacaagaaagagctggccaaggccatcgcccacatcaaggagtaagcaaaaaccatattcgaatcgcatctgtattcgaccggagggcggcggcaatccgccgccctccggctttgcaaaaggaggcatccgccatgtatgaggacatcgaggccgtgctggacgagcacgtgcgcccgctcctgcgcacccacggcggtgagatggagattattgaggtggaggacggcgtcgtccgcttcaagctcaagggcaagtgcgccggctgtccggcggccgatctgaccaccgaggagctgatccagaccgcgctgaccgagcacctcccgcacatcaagcgggcggtgctggtgcaggatatcagcccggagctgctggacgaggcccgctccatcctgaagatgcgccatggcggatagacggcagatcggcgtccgctactgcggcggctgtaatccccggtatgaccgggtggccctggtcaagcgcatcggcggctttttcccggaggcggagttcgtcaccgcccaggccggggtgaagtacccggcggtactggtggtgtgcggctgcccctcccgctgcgccaacgtcagcgatctggcggtgcccgccgggcggctgatctgcctcagcgggtgggaggagctgctgccggcgaaggagaagctggccgaggccctgaaggggcagcaggcgcggagcctgacccacgaggaggtgctggacatcctgccccaccgggagcccatgctgttcatcgacacggtgagccgcctggtgcccggggaggaggcggtggcctccttccacgcccggccggagctgccctgcttcgcgggccacttccccggcacgccggtgctccccggcgtctacaccatcgaggccgccgcccaggcggcggacatcctgatgatgaccacggagcgttacgccgggaagctccccctgttcatgggggtgcgggaggccaccttccggcggaaaatcctgccgggggatacgctggaaatccacgtgtcccttctggaggagaaggcggagcgggccatcgccgcctgccgggggcaggtgtttgtggagggcgtgctggcggcggatctggagctgcggctggccttccggtagcccaataaaaaggagacagtgcaatgacatacgcaatcaaggccccggcccgctatgcacagggcgcgggagagctggccaacctgggccgcagcgccaagaagctgggaaataagtttttggtgatctgcaccgacaacagccgcgggcgctttggcgcccaggtggaggccagcctggccgagcaggagaaggaggtggtgttcaccaccttccacggcgaggccaccaaggacgaggtctttgccaagatggacgagtgcagggcccagggctgcgacgtggtggtgggcatgggcggcggcaaggctctggacaccgccaaggccgtggccgaaaatttgggcctgccctgcgtcattatccccaccgtggcctccaacgacgcgccctgctccggcgtggccgtgctctacaacgacgccggggtggttatcaaggccgtgctcatgcgccgcaacccggatctggttctggtcgataccggcatcatcgccaacgcccccaggcggctctttgccgccggcctgggcgacgcgctgtccacctggtttgaggcccgggcctgcaagaacagcggcgcccgcaccatggcccggggcaacgtgtccaacaccgggctgatgatggcccgcctctgctacgacctgctgatggagaaggggcgggacgccctggccgcggtggagcggcacgaggtcacccccgcgctggaggacgtggtggaggccacaatctacctcagcggcctgggctttgagaacggcggcctggccgccgcccacgccgtcaacgacggctttgcccaggagccccaggcccacggcatgtaccacggcgagaaggtggccttcggcaccctggttcagttggtgctggagaaggccccccaggaggagctggagcaggtgctcgggttcctgcgggacaccggcctgcccctgaccctggcccagctcggggtgaaggagatcgtgcccgagaccctgaaaaaagtggcggaggccgccgtggtgcccacccagtccaccaagaacctgcgcgccgatatcaccgcccaggaggtctacgacgccatcctggaggccgaccgcatcggccgggactatctggcccactgagcccaatcttaaaatccaaagaatagagggtgtgtatcgtatgaattggaaggaatattacaagcagcacctgatgagcgcggaggatgcggtcaaccacatccagtcgggcaaccgggtggtggtggcccacgcctgcggcgagccgtcctatctgctggacgtgatggtggccaacgccaaggcctacaaggatgtggagatcgtccacatggtggccatgggcaaagccgagtactgcaagcccgagtacgccgagaacttccgccacaacgccttctttgtgggcggaaccagccgggacgccatcgccgagggccggggcgacttcacccccagcttcttctttgaggtgccccgccagttcagctccaccatgccggtggacgtggccatggtcatggtgacgcctcccgatgagaacggcatgtgctccctgggcgtgtcggtggactacaccctggaggccgtcaagcaggccaagctggtcatcgcccaggtgaacccccagatgccctggaccggcccctacagcctggtgtccgtcaaggatctggactgcatcgtggagcatgaggcccccatcattgagctcaagccccccaagatcggcgacattgagaaggccatcggagagcactgcgcctccctggtgcccgacggggccaccctccagttgggcatcggcgccatccccgacgccgtgctcctcttcctcaagcacaagaaggatctgggcatccactccgagatgttctccgacggcgtggtggagctggccgaggccggcgtcatcaccaacgccaaaaagaccctccaccccggcaagtttgaggtggcgttcctcatgggcacccgccgcctttacgacttcgtggatcacaaccccgacgtggagctgcgccctgtggactatgtcaacaacccctttgtcatcgcccagaacgagaacatggtgtccatcaactcctgcgtacaggtggatctgatgggccaggtggcctccgagagcatcggccccaagcagatctccggcgtgggcggccaggtggacttcgtccgcggcgcttccgccagcaagggcggcgtgtccatcatggccatgccctccaccgtcaagggcaaaatctccaagatcgtgccgctgctggatgagggcgccgccgtcaccaccagccgcaacgacgtggactacatcgtcaccgagtacggcgtggccgcgctgaagggccagaccctccgccagcgcgcccgcaacctcatcgaaattgcccaccccgacttccgcgacgagctcaaggcggagtacgagaagcgcttccactgcaagtattaagcggcatggggcgggccggaggcccgccccatttggtgcttacgccgcgggatagaaaggaaacgagctatgacaaatctggagaagtatgaccgcctgttcctcaccgccttccgggtcaagccggaggagttgcccggcctcaagtaccggggcatccccctgtgggactcccttggccacatggatctgatgggggacatggaggagaccttcaaaatcagcatcggcaccgccgacgtgctggatttctcctcctatgagaagggcaaggagattctggccaagtacggcgtggagctctgagccgtgctgcttctggagcggtggacggagccgctggcggagagcaactgctatctgctgggggaggcggggcgcgcggtggtcatcgaccccaacgaccccagggggccgctggagcggctggaggcgctggggtggacgccggagcggatcctcctgacccacgagcactgcgaccacatggccgggctggaggcgctgcgaaaccgctggcccggggtgcgggtggcggccaccgccgcgtgcagcgccggcctgggggacacccggctcaacatgacccggaggatggaggtctatctcgccttccggggcaagccgggggtgtcctatccgcccttcgtctgccggccggcggatgagacctatgagcgcgcctgggagtacgtatggcggggacaccggctccgcgctgtggccctgcccggacacacgccggggagcgcgggaattttcctggacggggacacctttttctccggggactacctgattccgggggaggaggtcatcctccgcctgcccggcgggagcgagacggactaccgcgccgtcacggagcccattctccgggggctgccccccggcctgcgcatctgccccggccacggggagccctatattctcataggaaaggagtgaagccggtgtggagctgagcacactgctgcaatacaagccctattccacggcccggacggagaagcgggcgctttacgccggactgctcaccgagctgacccagtttcaccgggagcactgcccggagtacggccgcctgctggacgccctgggctgccccgcccacatggactgtacggtggagaacacccccatgctgccggtgtccctgttcaaggaactggagctgcggagcatcccggagggagaggtgttcaagaccattacgtcctccggtaccaccgggcagcgggtgtccaggatctttctggacggggccacctccgcctgccagcagcaggccctctgccagatcatgtccgacttcctgggggagcggcggctgcccttcctggtgctggacagcaggcaggttctgcgcaaccgcgccatgttctccgcccggggggcgggcattctgggcttttccatcttcggcaccaggccctgctatgccctggacgagcacatggagctggatctggacggggtgcgggccttcctggaggagcaccagggggagaccatcttcctcttcggcttcaccttcatgatctggaagcacgtcgtccgcgccctggaggagcggggggagaggctggacatccccaacggcatcctggttcacggcggcggctggaagaagctggcgggggaggcggtgtcccccggggagttcaaggcccgggtggcggcggccaccggcgtggagcgggtaagcaactactacggcatggccgagcagaccggctgcatttacatggagtgcccccagggccacctccacgccagcctgtggtcggatatcgtggtgcggcgggggcgggactaccgcccctgtgagcctggggaggagggggtgctccaggtgctctccccgctgccccgctcctatcccggccactccctgctgaccgaggatctgggcgtgctgctgggggaggacgactgcccctgcgggcgcaagggcaagtatttcaaggtgacggggcgggtgccccgggccgaggtgagggggtgcagcgatacctatgagggataacgtcacgcttttggccggggcggagcaggtggacgccgcaccctggcccccctttgaccccagggcggtggacttcctggcggagctgtccgccgaggtgctccgcagcccggacacccggcggcaggaggcctccgccgccttcggcttctggtgccgccgggcccgcctggaggccctggccgcgcgccacgcctccccgctgccccggctgggccgggggctggccttccatctggcccccgccaatgtgcccgccctgtttgcctacaccctggccatcggcctgctggcggggaacgccaacgtggtgcgcctgtccagccggcgggtggagggggaggcccccctgctggcggccctccgccgggtgctggagcggccggagcacgccgccgtgcgggcccgcaccagcctgatcacctacgggcgggacgatgccgtcacggcggactactgcgcccgctgcgacgcccggatcgtgtggggcggcgacgccacggtggcggcggtgcgggccatgcccatgcccccccacgccgtggagctgtgcttccccgaccgctggtcgctggcggtgttcagccagcgggccttctccgccctcacgccggaggagcggggggcgctggcccaccggttttataatgacacctaccagatggatcagaacgcctgctccagcccccagctggtgctgtggctggaggacgggggagaccccgcctgccgcggccggtggtgggaggcggtggccgccgaggcggcggagcgctaccccttcggccccttccaggcggcccgcaagctggagcggctgtgcctctgcgccatgaccatggaggagcccgccgtcgccgccgtggagcgctatcagggcaacctgctctatgtggcccggctggcggggctgtctggaaacctgccctccctggccgggggcttcgggctgttctttgaggcggacttgccccgtctggaggcgctggcccccctgctcccgcccaaggcgcagaccctggtgtgcggcgggctggagccggcggaggtggccgccctcctggcccgggcgggggcgcggggcgtggatcgggtggtgccgctggggcaggccctggagatggatacggtctgggacgggagggatctgatcgccgccctgtcccgcatcattggataggaggagcacatggaactgtttgcgcgctgcgaccgggagccggagcggctgctggccgtcaccgaggaggggaaacggtacaccctgggggatttgaacgccgccgcggagcggatcgccggggccgtgggggagcaccggctggtctttgtgctgtgtgagaacacccccggaaccctgctgggctacctggggtgcctaaaagcgggagaagtgcccctgctgctggacgcccacattgcgccggagctgctgcgcggcctgctggagacctaccgccccgccttcgtccatgtgcccggcgacctcccggcggagacggggcgggtgctggagggctttgtcccggcgctggaggtggaggacagcgccctgctccgccgccccggcgggcaggggccggagctccacccggagctggccctcctgctcaccacctcgggcagcaccggcagccccaagctggtgcgcctcagcggccggaacctggatgccaacacccgctctatcgtggagtacctggagctggacgagggccagcggcccgtcaccaacctggccatgagctactcctacggcatgtccatcgtcaacacccacctgctggcgggggcggcgctggtgctcacccggcgcagcgtgctggagcggcccttctgggagctggtggagcgggagcgggtcacctctctggccggggtgccctacacctaccgcatgtaccggcgggcgggcctgctggagatggagctgcctgcgctgaacaccctgacccaggcgggcggcaagctgccggaggcccttcacctggagtttgccgactgggcggcgcggacgggacggcgcttttttgtcatgtacggccagaccgaggcggccccccgtatgggctacctgcccgcggagcgggcggtggagaagtgcggcagcatgggggtgccggtgcccggcggccagttccgcctgctgggggaggacggcgcgcccattgacgcgccggacaccgtgggcgagctggtctaccgcgggccaaacgtggccatgggctacgcccggcgggcggaggagctggccctgggggacgagtggcacggggagctccacaccggcgatatggcccggcgggacggggacggcttctactacatcgtgggccgcaagaagcggtttatcaagctctacggcaaccgggtgggcctggacgaggtggagcggctgcttgccgcccgcttcccggacacgggctttgcctgcgtggggagggatgacctcctccgaatctttcacgacagccccgatcccgccgtgaccggggcggcggcggagtatctcagcgaacagatgcacttcccggagcgggtctttcagatccgggccttggaggccattcccaaaaatgaggcgggcaagacccagtacagggcgctggaggagatgcggtaacaccggccgaagtatgctgtatatgagccgggccgccgggaattcccggcggcccggcttgtatttttcggggagctgtgctatgctgggaccacggaacaaaagagaggcccggctcagacgccggagccggccgcgaatcgcggccggtcccgcagactcacgcgtattcgcttcgctccgccgaagcgccgcggcggtatcccccagcacacctgcggtgtgctgggggataccgccgcgccgttcgccatacagcaggttttgttccgaaccgggaagggaggggcggccatgggaatcgtctatcaagagggcccctccctggcccgggacctggggcttcccctacgcaccctgtatgccgtcagcaaccggattccagcccactaccaccgggcggaggttcccaagcgggacggcggagtgcgggtgctccgggtgccggaccctgtgctcaaggacatccagcggcgcatcgcccgggtgctgctctcaggcatgcccgtgtcgccccatgccaccgcctaccgatacggcgcgggggtggtggagaatgcccggcggcatgtgggccgccccgagctgctgaagctggacattttgcactttttcgacagtatccgctatatccaggtgaaggaggcggccttcccggcggagatctacgccgagccgctgcggactctcctctccatgctttgctacgaccgggatgtacttccccagggcgcgcctacctcgccgtggatcgccaatctggtgctgcgcccctttgacgagaagctgggggcctggtgccgggcccggggggtggtgtatacccgctactgcgacgacctcgccttctccgggacggcgctggacggcgtggaggagcgggcggaggagggcctgcgggcgctgggcttccggctcaaccgggccaagcgggcgctgtgccgggacggccagcagaagcgggtcaccggcctggtggtcaacgaacgggtggccgtccccgcctgctgccgccgcagactgcggcaggagctgtacttctgccgcagacggggtgtagaggagcacctgagggctgtcggcctggcggaggggcgggagcagtgcctgcgtcgcttgctggggcaggtggacttttggctccaggcccagccggacagccaggaggcggcggagtaccgccgttggctgctggacgagatgcgggatgggcgttaagcggggagggcatatgggaaacggggtgctcctgactgcggcgatgtgatggcttcctactgcttgtgatatttctataaaatatacatttttcttgtggcgaagacggaagtatattataataaacatatatcttttctatggataaaaagacctacccatatcaattgaatggaggaaaacctatgtaccaggtctccaattttaccgagaatgatgacgtaaaagtgctctctgagctgggtgcctttcagatcattgaataccagcgggatttgagcgtttcgccgtcctctgcagtaacggcctacttcagcgcacagatgaacgtcaaaaagcgccaactggtatgccatctgcacaagtcccatgtgaccattcaggcgggtgccatgcagtggatgctgggcaacgtgaacgccaccaccggcattaagggcgtaggggacttcctggggaaggcggtgcgcggcaaggccagtggtgagtctgcaattaagccggagtacaccggcgacggactgctggtgctggagccaacctataagtaccttattttgatggacgctgccgactggggtgggagcgtcgtgctggacgacggcctgtttctggcctgtgagtccagcctgcagcacaaggcggtcatgcgctccaacctttcctccgcggtggctggcggcgaggggctgtttaacctgagcctcaacggcagcggcatattctgtatcgagtccgactgtcccaaggaggaattgatcgagatcaccctccagaacgatgtactgaaggtggacggcaactatgcaattgcctggagtaagagcctggacttcaccgtggagcgctccggtaagagcctaatcggctcggccgcctctggtgagggccttgtgaacgtataccgtggtaccggaaaggtgctgatgatgcccactgcaaagatgcccaatatctgagcggatgccaggccttgggccccagggattaacaaaggtttgggccgccccttgtatatagggtgcggctatccactgggtgactaagtaagtactgcgccgcccgtctgtgtcgttccgggggctgactgaggcggacggcccggagggggagaggcccctgcccgccccggcggaggagccggagggcgtcaccgtcaccgacacctccggatactaccgcatgaccttctgccctgggaatctggtctactactacatggatgactattggaatttctggttccaggggacgggagaggcggagctctacccgctcctgctggagcagacggcatagacgtaaaagcgccgggcggccttggccgcccggcgttttatctattttgtcctatttgtccgccatgcgcttcaccgcccggacggtgagggtgtccccgtccacggtgaagcggatgttgaccccggcgaagtccagcccgtatacccgctccggatcgtgctggtagggggggcgggggtcgcgggagagcacgccggtgagggcggcccgcttgtccgcgggcacccgctccagcagctccggcgggaagtccaccgccagggtggccccgccgccgctgccggtaaagccgccgctggcctccgggcggcagtcggcgtaggggatgtagggcttgatgtccagaatgggagtgccgtccatcagatcggccccggagacctccagcacatgacccagctccggctctctccggatgccctccagccgcacgcaggacaggccgatggggttgggccggaagggcgagcgggtggcgaacacccccatgcgggtgttgccccccagccgggggggccgcaccgtgggagaccacttgtcccgcacggcctcggagaactgccagatgagccagaggtgggagaagtcctccagcccccgcagcgcgtcggggctgcggtattccggctcaaagaccacggtggcccgcagctcctccaccaggccgctctggcgggggatgccgaacttggtgggaaagtcgctgcggatggtggcgatgatttccatggggatcatggcttgtcctcctgtctgcgccgggccctctccagggcggcggccaccggctgggagggggcggaacggttgttggccgccagaatggcggagatctggccggctacctgctctacctcggtcttgaaggcggaggccgacagccgcagggccccgtggcccaggatgatgagctgctcggccccgtcggaggtggccacccgcacccggtggtgcctcccgatctcgtaggtggcccgctcaatgtaggtgtccgccgtctcggcctccttggtgtagaccacgtagatgttgtggtacttcgtcacgtcctggacgctgcggggcaccctgtaggcgtcgaacaccagaatgacgatattctgcttgaagccctggtagttgctgagcacctccatgagcatctgccgggcggcgtccaggttgtcccgggccaccgccttcagctcctcccaggcgaagatgaggttatagccgtccgccagcaggtattccggccccttcttctgggcctggatggagtacttccggtcgtccaggctggtgcgggcgggcttgggctgggggcggaaggcgccccgctccaccttgccgtaggtgcgctcgaagatggcctggagctccttgtcctgctccagggaggcggcgtaggacacgctgcggggccggacgggggcggcctcctccggcggaggcggctccgcccctaggcgcaggccgctgtccacgtgggcgtgggccttgacctcgttccacttcacgctgtagcccgccccgtgggcgcagaacaccgagtccgccgggttgtccacgtcccgctccgggtcgtagcccagagcggcgatcacctcatcggcgttgtggcagggggcatagccgccggcggtgcagctcagccgtccccggccccgggtgtaggcggccacctcccggccgtagtcccgcaggcccgccaccggggcggagccggtgagcacgctcagcgccccggcggtctccggcgtgccggcctgcccgcccatgcgctggaggtcggacagagcccggcccacctgctccgggggcagctccagccggaagtcgtaccacggctccagcaggatgctctccgcctccatgaggccctggcgcaccgcccggtaggtggcctgccggaagtcgcctccctcggtgtgcttgaggtgggcccgccccgccaccagggtgatgcgcacatcggtgatgggggagccggtgagcacccccaggtggggcttctccgccagatgggtgagcaccagccgctgccagttcccgtccagcatgtcctgggggcaggcggcggccagctccaggccgctcccccgggggagcggctccagcagcaggtgaacctcggcatagtggcgcaggggctcgtagtggcccacgccctccaccggggcggcaatggtctcccggtagacgatgccgccggggccgaaggtgatcgctaggccgaagcgctgggccgccagcgcctggagaatctccagctgaacctcccccatgagctggatgtggatctcccgcagccgctcgttccacacgaggtggagctggggatcctcctcctccagcaggcggagcttgcccagggcggcgtggggatcctgcccctcggggaggagcacctggtagatgagcaccggctccagggcggggggcagggcctccgcctctgccccaaggccctccccggcggcggtgcggctcaggccggtgacggccaccacgcttcccgcttgggcctcgtccacggtctggaacctggaccccgagtagacgcgtagctggtcggccttctccgtccagccggggccggagagggcctccttcacccgcagggcgccgccggtgagcttcatccacgtcaggcggttcccctggttgtcccgggaaattttgaacacccgggcggcaaaatcggggccataccggggccggggggcgtacgccaccagcccccggaggaattcggccaccccctccagcttcagggcggagccgaaccagcaggggaagagcttccgccgggcgataagggcggtgagggtatcgccgtccagcgccccgtcctccagatagcgctccagcgcgtcctcgccgcagagggcggccgcctcgtcccgctccgccgccggggcggtgaagtccacgcacccctcgtccagcccggctttcagccccgccagcagggcggccttgtccgcccccgccagatccatcttattgacaaacaggaaggtgggcacgccgtagcgctccagcagccgccagagggtgtgggtgtggccctgtacgccgtcggtgccgctgatgaccaggatggcgcagtccagcacctggagggtgcgctccatctcgctggagaagtccgcgtgacccggcgtgtccagcagggtgagctccgccccgtccagagggagcaccgcctgcttggaaaagatagtaatgccccgggcgcgctccatgggatcggtgtccagaaaggcgtcctggtgatccacccgccccagctttttcaggcgcccgcaggtgtagagcagcccctcgctgagggtggttttccccgcgtccacatgggccagaatgcctacaaccagtttgtccatagctgccgtcctttacggtgtgatactatagtatagcacgtccggggcggacggggcaacaaacttcatgggcttaaagcgcaccacgggcccaggcaaacgccggtgcgcaggaagcttttgcgcatgtgggccgtcctggcccacgggctgttgcgttcatggccgcgccaccgaaagcggcacacggccctttttgctatacctttgcatagtaaaaagggccccgaagggccctctggaggggaaatcagcccttggcccccgcgctcatataggagccgtacagcggggtgggcaggccgaagccgccggccacgggcagaatctcgccggtgatgaaggcggcccggtcgctggccaggaaggcgacggcatcagcgatgtcctccgggcggccggggcggttgagggggacgtttttcaggaaaagatccaggaaggcctgggacatgttgttcagagcggcgtcggtggcggtgaagccggggagcaccgcgttgcaccgcaccccctgccgggcatactgcacggcgatgtccttggtgaggaagtggatggccgccttgctgacgccataggccgtgcggctcagatcggggtagaggccgcccacggagccgatgttgatgatggagccgccgccgtttttggccatgaggggcaccgccgccttgctgggcagatacacgctcttgaggttggtgttgacgatgcggaagaagtcctctgaggggccgttcaccacgtccaggtcggtcttgacgtcggtggagccgaagttgttcaccagaatgtccagccggccctccttggccgccacctcgtccaccatgccggaaaagctctcctcccgggaggcgtcaaagaagaccaccccggcccgcccgccggcggcaatcagctcgtcggcgatctgctgtccggcctccaggcggcggaccccgagatagaccgcggccccctgggcggccagcgtcttggcgcaggccaggccgatgccgcgggtggaggaggagaccagagcgaccttgttttcgagttctttcatgcttattctccttttcaaaccgattagtatagatatgatactgtgatgatagcacttaagaacccaaatgacaagcgttaattttttgacgtatgcagtacagcaggaggccctgggaaccggaaggttcccagggcctcctgctgtactgccattacaggcgctcaaagatacctgccgcgcccatgccgccgccgatgcacatggtgaccatgccgtaccggccgccggtgcgctccagatagcttaaggccttacaggtgagcatggcgccggtggcgcccagggggtggcccagggccatggcgccgccccaggggttgaccctggccgggtccatgcccagggtgcggatgaccgccagggcctgggaggcaaaggcctcgttgagctcaatggtgtccatctgctccagggcaaggccggcctttctgagcgccttgggcaccgcctcgatggggccgacgcccatgacctccgcaggcacgccgccggtggcaaaggagacaaagcgggccaggggcttcacgcccagctctgcggctttttcctccgacatgagcaccacgaagccggcaccatcggtcatctgggaggaggtggctgcggtgacggagccgttttccaggaagcagggcttcagcccggccagcgtctccgcggtggtgtcggggcggatgccctcgtcccggcagaccaccacctcgccgccgtcggggccggggacggtgatggggatgatctgtccgtcaaagcagccgccggcctgggcctgggcggcccggcggtggctctcaacggccatggcatccatatcggcccggctgatgccccactggcgggccacattttccgccgtgatgcccatggtggtgtagacctcggggcggtgctccgccagccaggggtcggcatcctccgcgcccaccagcatgggaaccagagacatggactccacgccgccggcgatgaccacgtcctcctccccgcagcggatggcgttggcggcggtggcgatggtctgcaggccggaggagcagtagcggttgacggtctgggcggtgacgcagtcgggcagcccggcccgctggacaatcagccgggccatattgccgccctggacaccgaagggcatggcgcagcccatgatcacgtcgccgatgtcctccggccggagctggggtactctggccagcacacccagaagggtctgggcgccatactccacggggtggagctgggcaaaggagcccttgcgggccttgcagtagggggtgcggccgaaggcgacaaccacggcctgtctcagttgtgtctgcatggtaatgttcctctcctcagtctgtctattttaattggtattgttccattttttcgtagagcactgtgcgggagatgtccagaagcgcggcggccttgacccggtttcctccggcggcggccagggcgtcccgaataagctcccgctcaaaggcctggcgggcggggcgcagcttgaagtcccccggcccggtgagctggcgccgccgccgggcctgcatccgctgctccagttggcggaagtcccgccgccgcaggatgggggagtcagccgcgttcatggcgctctccaccgcgttctgcagctcgcggacgttgcccggccagtcgtaatccatcagcaggtccatggcaccgggggccaccccctcgatgaccatgccgagctggtagttgagccggtggataaagttgtccacaagcaggggcagatcctccttccgctcccgcagggtgggggcctggatgcggatgacgttgaggcggtaatagaggtcgctgcggaattgtcccgcctccaccagcgtctccagcgggatattggaggcggcgatcacccgcacgtcgatgggaatgctcttctccccgcccaccgggtcgatctccatctcctgaagtacccggagaaacttgggctgcatggtggcggtgagcaggttgacctcgtcgagaaaaatggagccgccgctggcgagctgaaagcggccgatgcggcccttccgggccgcgccggtgaaggcgccggcggcgtagccgaagaactcggactccatcagctcggccggaatcgcggagcagttgacccgcacaaagttggccgccttgcgggcgctcatggcgtggatagagtgggcgatgagctccttgccgctgcccgtctccccctcaatgagcaccgtggaggtggagcgggcggcctggacgatctgctccttcaggcggaggaccgaggcgctttcgccgatgatgttgtccagtccgtagcgtgcgccccgctcccgggacagctcctgctggtagaactccaccttgctggacagctcgccgatgcgccgggtcaggttctgagcgtcctccataccctggacgatgacatagagaaacagcccgcacagcttcccatcccggtcaaagcggggaaaataggaggtaaaggcggggccgttggcgttgacggccttggcaaagaccggcttgcccgtgtggaagacctcggtggcgtgggtgtcgggcaccatttcccaaaccttccggccgatggcctcctgtgcggtgtggccggtgtagcgctcccagcccgggctgacataggtgtagacgccgtcctggtccagaaccgccatggcggccagaccctcgataaattccagcatggtgcttggatcaatgtggttttccaatgcggcttcctccactcatacacggtacggaatgtattaacgatagcaagctacgcgctgttttacaatggttaatttcaccgaaaatgaatctttttgtttagttgatgcggagaaaatgggtttttgcaaaaaattgagtcacaaaaaacgccagaaaacgtccaaaattgtttgcgaaatgtacggaaaacaaaacatgtaaggaaatcgatacatgaggcttaaaacataagaacagagggggattgccaaaagacagctcaaaataaaatattcaaatgtacggattaccgaacagtgtttgggcgcctggatgtcaatgaaaataaccgctttttcttacagttgcaacggcttgcagagtattagacagacttggcacagaaattgctatcttatgagacgcaagcaacggccaccggccgaatcaaaaggagtgtaaccactatgaaaatcattgacctgtctattcccattgaagacggactgcccagtgatcccccgatccagattcccaagattcagtattgcaaccacaaggacaccgcggagcaaatggctggcttctttaagggctgcaccgttgaggatctgccggagggcaacggctggggaatcgagttcctgcaggtgtgcacccattccggaacccatgtggatgccccctaccactattaccccaccatgaacggcggtgagcgggcctggaccattgacgaggtgcctctggactggtttgtgggcgacggcgtggtgatggatttccacgacaagcccgatggatacaagatcaccgccaaggatgtggaggagtacttccagaagatcaactacaccctcaagcccggcgatattgtcttcctgcgcaccgacgccgatgaccgctggggcaagcctgagtacctggttgcgggtgcgggcatgagctatgaggccaccatgtggctgctggagcgcggcgtgcgtgtggtgggcaccgacggctggagctgggatgtgcccctgcccttcgagggggaggaatttgaaaagaaccacgatgcctccattatctgggaggcccaccgggtgggccgcgacaaggcctactgccacatcgaaaagctgaccaacctggatcagctccctgtcaccggctttaaggtaagctgcttcccggtaagcatcaaggccgcctccgccggctgggcccgtgtggtggccttcgtggagtaacccttttgttgtgtcagtgtaaacaaccatacatatgaaagagagggacaaacgtgggtaacgtcatatttgtcgtcatatttgtcattttctgcgcgtttctattgggcgcaggcctgatcagcaagcggtgggtcaaggagtcctccgacttcgtgctggccggccgtgagatttccacccccatcaacgtggtgggcgtcattgctatcggctttgccggcaccacggtcacactggcccccggcttcacgattcagtacggcctgctgggcggcctgggttggggtgtcatctactcggtgtgcggcctgctgatcttcggcctgctgtactccaactttgtccgccgcagcggcgcccagaccctgcccgagtttctggagatgcgctacgacgggcacacccgttccgtagtggccatcacctccgttatcggcatgtgcggcattatggccaataacgtggtgtccagtgtggacaacattgcggccttcaccggctggaaccgcctggccattaccgctattatcttcgctgtcatcatcgtgtttacctttgtctccggcctgtgggccaccaccatcaccgacctgttccaggtgctcatcggcgtgattgtggtgcccgccaccttcttcatcctggccggacgattcggctggctggacgccatcagcgccaactggggtgccggcgacttcatgagccagggctttgtgggggcgctgcccggcatgaagctgacctacccctcggtgtttaacttcattatctgcttcgccgtagccctggtttggggcaacaactactactggatgaaggtcgccaactgccgcagtgagaaggtggcccgccgctccttcgtggccgctgccatcatcctgattgtggtgttcatggtgcccctgtgcttcatcggcggctacatgggcgcgttctatcccgagcagctcaccctcaacggcggtactgtggctcctaccggcacctacggctatgtggccaagaccttcgtgtctctgtttggctccctggtggttatcagcgccgtggcggcatccatctctaccgcctccacctccgccctgggcgcctccgctgtggccaaccgcgatatctaccagcgcctgatcaaccccaaggctgacgcaaagaagagcctgaagatgtccaagatcatcatgctgctcatcggcgtggtcaccttcgtgctctgccagttccccggcggccccacctacctgttcgcctttgccaactgctggctggtgccccccgccattttgctgggcctgggcgccatctggccccgctttaacggccgcggcgccctgtggggcgcggtgtgcggcatggccaccatggctgtgttcaccctgctggacctgaccaaggtgttctccatcaacagctatgtgtatctggccaccctgggcctggtggtcaccctggtggtggcggtgatcgcctccctgttcggccagcccaagtattacggccgccccggctgggagcgggtgcccaccgcctccaaccgtaaggaggtcaagctgggcgagttggaaaagcagattctggagatgctgcgcatcggccactgctacatgtccgacctgaccgacgccctgggggtggactccaagacctccggcgccgccgtggagaacctggatcagggcggctacctggtccgtgccggcatgagcggctccaagttctacacctttaccatcaccgagaaggggctggcggccctgcccgccctcagcgggaaggaggccgagatggcagaggagttcctgaaccccctgtatgtccagctcctgaaggtggtcaaggagaaccccgagcagcaggcggagtttgtgcagaaaaacggcattaagtccatgcgcatgtccgcaatctgctcccacctgacccgccgcggctacgtggtggagggcggcctgttcaagcgcaagctgcgcatcaccgagaagggcgccgctgcgcttcagaagtacgcgtaattctcctgtctgaatcaatcttcagagggcggggcagcctggctgccccgccctctgtgcaagaaaaggagtgctttcccatgtttgaggcggaatatgcccgccggcgcaccaccgcggaggcggaggcaggccgtatctgctccggggacaccgtctatctggcgggcggcccgctgctcccagtggactttgccgccgccctccaccggcgggcggcggagctccacggggtacgggtgctcaactacctgccccttgagcccttggctctgcttaccgaccccgcctgcggggacgcctttcaaatagagtcgattttttacaacacctaccagcaggaggcccagcgcctgggccgctgcgcctttctgcccaaccacctgcgcaatgcggccagggactggacccacggggcgccggagtacgactgcctggtactcacggtctcccctatggacaagcatggctgcttttccctggcgggctcggcctgcattgagctggaggtgctcccccgcgcccggcgggtggtggtggaggtggcctcctgtgctccccggatcttcggggacgtgaccctccatgtctcccaggtggacgccattgtggagtccgaccgctaccccgccgccctttcaccccagccccccgatgaggtggaccgccagcttggccgggtggtggcggagctggtggaggacggggccaccatccagctcggctttgggggtaccatcaacgccttggccgccgagctcaaggacaagcggggactgggtattcacaccgaggccatgtctgacgcggccatggagctgctccggtgcggcgcggcggacaacagccgcaagagcctccaccggggcaagacggtgacgtgctttaccatgggcagccatgccctctatgatttcgtggatgacaaccccaccatcctccacaaggccctgagctacaccaacgatctgtctgttttggcggccaaccggggcatgacctccatcaatgctgcgctccaggtggatctcaccggccagtgcgcctcggagagtgtgggaccccggcagatctcgggcagcggcggacaggtggacaccgccgtaggcgcacagatggcgccggggggcaagtcggttattaccctgcgctccacctactctgcaaaggacccggacacgggggagcggcgtctccagtcccgtatactgccggtactgccggagggggccgtggtgacccttacccggagcaatacccactttgtggccaccgagtatggcgcggtctgtttgcgggggctgacggttccgcagcgggccaaggcacttatctccatcgcccacccggactttcgggattggctggaggaggagtttcaccgcatctaccgcctgtgacggtccgtccgtatgtggaaacagagagcagccccggaaccgacgggttccggggccgctgaggctatcgataaaccttccgggtgaaggtttcggagggaaagatagtgtgaaagaaaaccgtcagggttgtctttcgcgtttggtcaaccgactttttgaaacttcaaaaggtttcaaaaagtccctcagcctgtcgaaaagactttttcgacaggctgagcggccccggaaccaaagggttccggggctgctctctttgtgaaggttattggtactgagcccagtttcccgcaggctggaggccggtccaggtttcatggacagtgtcggccttgcgctcgtagtcgtggctgttggtggcctcctggaccgccagatagtaccaggcatccggcgggttgtcgggccaggcgatcatgtcgtccagcagatcatccgcggtctcgggcaggcggcccaggacgcggttgatggtggtcatggcctcggcgcgggtgatgctgcggtcgggggcgaaggaaccgtcaggctggccctccacccagcccttcaccgcggcctggttgatgtacccggcggcccagtggccggagatgtcggagaagcggtcgtcgccgtggtagggatcgctgtcaaagcgggcggcgatggcagcgaactcgccccgggtgatgggcgcctcgggatcgaaggcggaggggctgcggccctccacgatgcccatggcctgcatggtggccacggcggtggcgtaccacgcgtcggaggccacgtcggcaaagggactggtctcggtcaggtactcgtcccgggcctcgtcggtgagcagacggaagaagatgatggccacctcggcgcgggtaatgggggcctcagggtgaaccaagccgtcgtcccggccgatgatgtaggcgaaatggtcgtctccattgagccggtcgggcacgccggtcctttcccagccggcgtacacggtcttgttggaggtcatgcggatgtcgtcgatgggctcggtcagggccttgtcggcgtaccagccggtgaaggtgtagccctcccggacgggctccttgtccagctccaccagagtattgcgtcggtaccgctcgtccttgtatttggtgccgccattgctctcatagcgcagggtgtagtaggtggtgccaccaccgccgccgtggtccccgccgccggactccttctgatagaccagcgcgaagggggagaagctgccggtggcaaacttgatatactgtttgccgttcagggttaccagtgtgccgtccagcttctccgcaggattctccttcagttgttcgtccgccgcgccctcgtagtcgcggtcgagcgcgtcaaagtggacgatatagaagggcgcagaggtgtcggcgtcgtcgggcaccggccagtagagatctatcgtctggccgtcgcccagggtcacataggcgttgccgttgctgctgtccaccagatccaggtattggaactcgtagagatagtcgccgttggggatgccggtatcagacccgatgatttcattgctgatgtgatcaatgagcacctggtcgtccagcacttcgtcggtcagcaggtggacggcgttcttgtcggtgatctccacctggctgtcgttgacgtagtacgtaacgtccgccggggccaccgcggtgatggcgtcccccgtcacatcgtctgccttgtcctccaccggggcagtgacgccctcctttgtcgcaccgcgaatggtgagggcgccttcttcaatcttgaccgggtaggtaaatgtctcgtcggaatgttcgggaatatctttgaacaccgcctttacgaggtcctgatccaccccgccggagtagatggtcatggagtaggtcctgttctgctcgatggcagagacttcgaattcgtcgctgatcttgacttccccggtctctggatccgtaaactggagccgaacgggatcctggccttcctttaccgattccatccggtagatataacgggcgattccgtccaccgggtcggtggtgctggtagcgccgccgctgtaaagctgaatatcccaggcccggacggtttcgccggcgccataggtaaaggtcaggtgaccggcgaggtcaaccgcctgtccagggccttccagcatatcgttaatctcctgcgggacggtgagcagatagcctgcctcaggcaggccgctgccgctgacaatctggccgttctcgtccgtgacgccgtcatagctgttgccgccggtgtaaaccgtaatgtccgccgggcggatggtgacatactgggtctggtcgacaaaccactcgtgggtgatgtcggactcgtctgttaccgctcggtcatccgtgaagtattccttggcctgaccggcctcggagacggcaaagtcaacctttgcagacggctctgtgtatactgttccctgcttgaggaacacatcgcccttgacgtagtccgcatcggccgcgccgttatccttagtggggacataggccgcgccctcctgcacggtgacattgctgcccccagtcaaatagcagatatctgcttctgcgctgatcggcgcaggcattttcaatgtgcctgcacaagtgaagtttccggaaatctcgttgctttgcagcagatccagcgcgccgccctcttgaatggtgacagtctccacgccgtcaaacagcgtctcgccggaggcgagatgctcgcgcaggatgccgccgtcctcaattacaacctcagggaacccgtggattccggtagaggtgtaatcgcctttgacgatgacgctggcgccgtttccggtacgggtggggttatctttctcatggttataaaggtgctggtccagcttggaatcaccccgcaccgcgccgcttagctcgtcagtgtcgtccaggataatcgtaaccgtatggtcggaggtcacttcgccaaacttgtccagtgtgtatacgttggcccggctgccgtgcagagtaatggagacattgccgtcaacttgggccgggttatcctcgtcctcccctttaccggtcgcaaaaatggtcgggcaggcggattgggggccaccggatactgtgattacgacatcgccgatcacgtccgcaccttcattgcctccagcgcggatctcaccgatcacctcactgctgtcatccacggtgattgtaacaccacctgttatggtggaatctccggttccgccgccccagacggtttcctctgagataaggctgttctctttgatatggataaagatgtctcctgttacgtcgctgtcgtacccgccgccatagatagcggccgcattattgttcattttagtatttgaaatgttaaatgtaatatttcctactactggagcgtttttcccatacccgccgccgtaaatgggcctgccaaagccattatttagtccggacagatttatgcaaattgaaccagtaacctccgctgaataggacgaccgcgcatatccgccgccatagataggattatcggtgactgagttgataaagtccaacgttatatttccgttgactttggcatcttttttatttgcgtaaccaccagcgcgcacatgctgaatcttaccgcagttttcaatgtgcagataaacattgctctccacggagccattcactccgccgccgtatacataggtaagcggcaaggaggtataaatctccacatgagtgccgccggtgatatcctcgtccagacctccgccaatcacatagcagctggatgtgctacatgttttaccgtcaacaatggtgtctgcggtataatagctgtactgcacgcccgaggcgatgaccaacggataaccgttggcaacgatggtgtaggtaccataatatctgctaaaaaaataatccgtatagttgcagttaaatttgatctcatctatggtcagggcatctgccagactgatgttgtacgctccatccgaggccgaacaatactcaaacagcagctccgcgttctcgtccccgcctcgaagagtagtctctacagtggggctagtccaggtatctactgatacctgtcctaagaccacgatttcgaccggttttttcccttcgttttccaattcggttgcacgggccagcgtggtcggcgtttcggcggtcgcgccgtcgtcctcctctgtaccttcgttcgagacataaatcgtccgccgctccgcgccggcatccctcggcttctctgcgggcgcctcctggggctgcgccggggtaagcccctccgtccgcacgtctacctccggtagatttgcagccagagttgaaggagaaaaagaaattataatacatagagccaaaataaggaataacaatcgcttttcatgtttttgaaactcctctcttatggatactggggatatcgcgcctcatgtttgaaaaattttcactttttcagtccgtaaaattacttgtcgaaaaaagctaaaattgacaacaagaaagcgtatatctctagcaaaagcgcttgttattcctggaaagctgtggtatattatgtaattacaacggcgtgtttgaaaaagtgaaggttttcaaacacgccgccgctgttttttcagagggattttatgctataataaagaaaacgttgtggaatggtgttccattttgccgaagccacatagagaaaaagaaaaggaggggaaccaatggaatggaagaccctattgtatgcccggcggaaggaaccgctggacatcccggacgacctgtccaaatacccgatgaacgactttgagctggactactggcggattgtcaacagcgcgcccttccgccgtctccaggacaagacccaggtgtttcccctggacaagagtgactttgtgcgcacccggctgacccactccatggagacctcggcgctggccaagcagcttgccaccatgattaccgccaatatccgcaaaaacaagagcggcaccccctacgccatgacggaggacgaggcgcgggacgcggccaacgccgtcatgtgcgccggactgcttcacgacatcggcaatccgcccttcggccacttcggcgaggtggtcatcggcgactggttcaagagccacctggaccgtctgagctacaagggcaggcccctgtcccagtggctggaccgccagatgaaggccgatctttgccacttcgagggcaacgcccaggccctgcgcctgctgaccaaggtgtaccgggtggacagcgccttcggtatggatctcatgcctgccgtgcttaacaccctggtcaagtacccggtggattccaccagggtagacaaggccagcgccgacgtgaagctccacaagctgggctactacaaggccgaggaggcgcttttcggcgcgctggcctccgccaccggtacccggacggtggagggcttctgccgccatcccctgacctatattctggaggcggcggatgacatcgcctatgccactgccgatctggaggacgcctacaagaagggcctgttcaccctggacgagttcgagcggttcttccgggacaccctggaggcgaaaaaggacgactggggcctcaacggcggccaggtcaaaaaatccgccgagatgatcgacgagctgacccgcctgcgcgagcgggagagcagctccatggcggccttccagcggtggatcgcctatgcccgccactggctcatgtataccgccgcctttggcttcgtcccctacggcgccggacagacggactcctattccgccatcatggaggggacgttccggcgggagatcatggagggcaccttccacggcggctccatccgtattttgaaggcggccatgggtcgctttgcctacgactcggagggaattctcaccctggagctggcggcccagaccatactcaccaccctgttgtcccggtttgtcccggcggtgctctacctggatgccggcgacgacgcccccgaggaataccggcccacggcggcggagaaaaagctggtcaagctgctctccgaaaatcaactggcctgctaccgggccgacgcagagggaaaggatgaggggtaccgcctctatctgcggctgctgctggtgaccgacttcatcagcggtatgactgactcttatgcaaaaaatctctatcaggagctgacggggatctattgattcctgcggcgacaaaagcaagcggtaccgcccggatgggcggtaccgcttgcttcaatctggagggaatttgaaagggaattggggatcagtccagcacgccgacctctttgtaatagcgctcggcgccggggtgcatggggatcagggcgccttcgatgccgcgctccggacaggtgccggcggcgttcttatgcacggcttccagagcatcggcgttctccatcatggtcttgaccaggttgtagacggtctcctcgggcacgtcggcacgggcgcagagagcggtgtactgggcaaaggtggtgatatcctcatcacagccgtcataggtgccggcggggataaccactgtgtggtaccagggcttctcggccatcagcttgtcaacggcctcctggccgatgtcgacgaccttgatgccaaaggacatggccaggtcggtaaagttggtgccgggggcgggagtggcgtacaggaaggcgtcgatattgccgtcctggagggcggtgcacaggtcggacagagacaggtttaccacgctgcccagatcatcggtggtcatatcgtaggcccacagaacatcgtccaggtaaccggccatcatgccggcagtgacaccgaatttggtgccggccaggtcgggaatgctgttaatatcggacttcgcagaagtgataacgtggaccgtcgcgccggtgccggagtgggtggccacgtgcatgatctgctctgcgggcaggccctcaaactcgccctcggcattgtagcaggacagggtcatatccatgcccatggtgccgaagtcggtttcgtccatagccagcaggcgggcattctcggcggagccggtggaggcctcaatagcaaagctgtacttgccggggttggctttgttcatcatgtcggcaatggaattatacaggacgttctgatagccgttcaggggcccgcagctgatgcgcacggtttccgtaccgccggaggagcctccgcccccctctccagcatcactgctacaggaggcgattcccatcagcataccgactgccagcaacagacacataagttttgacagctttttcataacgatatctccttttctttttctctccaatggcattcacccgggggaaaatgtcacgtggtagactgggaaacggtaacggggacgaacttctccgaacgcttaaacatgaactcggtgacaaactccaccacgatgatggcgatacctaccaaatcggtgaccataccgggcacaatcagcatcacagcgcccagtatcatgagcggacgctcgaaccacttcaggctccagcggaagaagaagccctcgaagccggaggccagcagataggcgccaatgagcgcggtaaccaggctccagaggatgtccagcacgccgccctccatcagcagtaccggattgtagacaaacaagtacggcatgaggaaggaacagaaggccagacggaacgccttgtagcctgtcttgtttggatcgcacccggccaggccggcaccggcataggcggccagcgccacagggggggtgatggaggagatgcagccgaagtagaagatgaacatgtgggcggccagcgggggaatgcccaactgaatcatcgtgggggctaccagggaggccagaaccagataggccgccgtggttgggacgcccatgcccatgatcagggagacaaccatcgtcagaacgagcagcagcagcatgctggtgccggccacgctggtcaggatggaggagatgcggtagcccaggccgctgcccatgatcacaccgctgataataccggccatggcgcaggcaatgccgacggaaacggcgctctttaccgtctggacaggaatctggagccactgctccttggtcatacgggtcttggggttgatttccaccaggacgagagtgacgatgatggtcagcaggccagagcgcacgatggtcatattgaacacggccatgcagaagatcaggaagatcaggggggcaagcatgtaaatctgcttgagcatgctgcgtaccttgggcagttgggagcgggggatccccttcaacccatgcttggcggcatagatatcgacgccaaagaggacggccaggaagtagagaatagcaggaatcagggcggcctttgccacggcggtatagggaatgcccagcatttccgccataataaaggcggtggagcccatgatggggggcatgatggctccgccggtggaggcggtggcctcaaccgccgcggcaaactcgggctcaaagccgttctttttcatcataggaatggtgaaagtgccggtgccgatgacattggccgtgggactgccgctgatggagccaaagaagccggaggccaccacagccaccttggcggggccgccgcgcatgtggccgaacagggaggtggccagattggtcatatagtcgccgatgccggagacgctcatgatagcgcccagcaggacgaacaggaccacataggaggccgaggcatagaggggggagccgaagataccgtctgtggtcagatagaccaaagaggtgaacttcttcagcgtcatgccgggctggttgaggaagccgggaatatacttgcccaggaaggcgtaggccacaaagactagggtgatgatgaccaggggattgcccatcttccggcggcacgcctcaaagatagcgataatcagaagaatggcaaacagaatgtcgctggcgtacacaattccggcgcgcagttgcaggttttcatccaggatggtgatgtaggcacagccgcccagggcgaagagtgccataataccgagaaaaatttgctcccaacgcttctcgctgtcgaccattgcattgatgtagaagatcaccagcaggaagcccaggtggatcgacttctgcgcaatgcccggcatagtgccgaacgctgcggtgtagaggtgaaatgctacaaagcagatggccaggatcagcgacaccttttttaaggcggacttcatgtgtgattgatcctcgctttctgtattttgttaaacaattaatccattttacctttgctggcgagaaatagtccgattcccattgtaccgaagacgcaggtaagcataacgatgggagtgaccagcttgccagggaggaaggaaaggagctgaagcttattcattaggaccatgatacccgtaatcgggagggcgacaagcgctaactttggcttttttacaatttgatttgcaaagagtgcgccaaacagagccgggagcaataggtttaatgcatccaaaacatgctgaggcaacagactaacaacatagttgcctacaataacaccgactgtcaggaaagcaatattgatgaaaatggagacagcaataccaacagtggctatgataccgccttcgtcactaccttcttcgacgttagcagcgctctgagcgatggatgcacagggagctctcatgttatttacatttcccgatagaaagcccatataagtgcctgcaatacccagtatggcaaagtaggagattggttcatagaaatatgcagcgactactgcggggagctgagcggctataccagccattacaccgctaacagatgggaaaatacccataacggccaatccaaggcatggaccaaaggctaaaacgattccaaaaagacttaaaccacgcccccagcggatggcaaagggcaagaagtctgtgtgaaaaatcgaggaagtgtttggtttattttctgtcatagaaatacccctttcaagcgatggaagtattaaccttacaagaaaaaggatccaagcagcatgccgctaaacatggcgatcatcattccaaattttctaacccatgccacgtttttctttttaccatagattgccaaggcaaacataataccaaaaccaaaaataaccgtcattgtttgtgcatcggggccggcgagaacaatgccgcgattaaagcactgatagccataagcgcccataccgccagcgacactgatgacactcatttttgctttgttgttgccagctacccggtcacgcaagtcacccattttgtgtgcaaaaagggcagaaacaagaatccagccaaggcagcagattaccatggtatatacggcgcaggcaaatgcttccatagtcatgttagaggttcccaaggtacatccgacagcagaggcggcccgatcagcggcagaaagctcaaagttgacagcgccaatataggctaatcgcatccaggcaatagggcctcccatggagctgagtaaagcaatcattccagttacaatgattagggatggaccgattgaggccagagcggaactccgaatcgcgcttttaaactgacgctctgtaatacccatttttcttccggatacaatggctcttcgagataatacaatcgcctgcacgattactaacaatacgcctggaaggacggaaatccacataatagggttatttgcgactttcaaatactcaagctccaaaacaattcccctctctctgtcaattagtaggaaatgcgataactagtccagcatcagccgttttgaaagcagaataaacattggcatagcaaccctgaaacattcttcatcaatatcaaactttggattatgcccccgcgtaataattcctttttcgacatttctggcgccaaagtagaacatacacgcattgtaattcctggtataccaagaaaagtcctcaacccccattgtgggagcagggcggtataggacgttttcacgtccaaccaattccactgcggtgttctcaactaattgggtcaactgctggtcgctggtcaagggaggcacttttgtaacatgctccaaggtataggaacaacgacttgcagaacacaggccagctacgatttcctccatccgagtcaaaacataggtgcgtacatcctcttccagcgtgcgcacggttccagctaacacagcctcctgcggaacgacattttttgattcatgctgtccggcctgaaccgaacaaacagaaatgacagcggcctttaatggatccagctcacggctaataatttgttgaaatccctcgataacttttgcagcgagtaaaataggatctttaccggtgtgcggacgtgcaccatggcaacctacaccatggagccgtaaagtaaattcatcaccaccaccgtttgaagggccgtagcatacctgaacttgaccgacatctacatccagtactgcatgctgacccagaatgtaatccgtgccatccagcacacctgattgacagacaagctttgccccttctaacagttcttccgcaggctgaaacaagaactttattgttccacaaaattcagtgcgatgatcggaaatatagttcgcaacaccaagaagatttgcagtatgggcatcatggccgcaggcatgacagacacctgaaatttgtgagcggtagggtacatctttggcatcttggattggaagtgcgtccatatctgcgcgcaggacaactgttttgccaggtttattggtatgtagtgttcccaaaaccgctgtaccagcaaaattacgctgcacatcaaggccgaactttgttaggagatctgcaatcaagttagaggtacggacttcttggagtcctagctctgggtgcatatggagatccctgcgccaagaaatgaccttgggtaaataggtttcgagatcgggaatagacattttagactccttccccatatgggcacatgaggtagttagggcatgaacacgaggaacagacccagtgtacggcggcagtccacatagagcttgccgtccttgtggaagtaattcaggttcagatcataggcgcgcttttccacaaattccaggtggcagccggagaaggcggcggccacgatgggcagcttcaggccgtcgttgcggggctcgcagccgaactcggccacgtaggcgtcgtgatccaccaactgataggtgtccaggttgaagccggtgtcagtggcccccttggcggcgttgtagagcttggagatggcggcgtcggcctcctcaaagcgctccttgctgtcgcagtagccggtgatgtaggccaggcgcttggcgccgttgatgtgggggaatttggtctcgttcttgacgatcagctccttggccagatgggtggtgcagccgaagagaatgtcggtaaagggctcgtagttctgaataaagaaggtctggtaaccggcctcgccctccttctcaccgtagcggacatgctggcggaaggggttgttgatctcgccgatggtctcaatgccgcccttgatcaaagcgttgcgcatgggattggggtcagtccccttgacgctcaggcgataggagtggaccttgggcagattggtggcggggacggactgggtcagccaagtgatggtggtgttcagctggtaggtgcacagctcgaagtaggagttctcaaagatgaagtgcacggtgcggtcggtgtagcagtcggcggtggtaaagcccagcttggtcaccaggtcgatcgggcggtcgcggtgggtagtggcgatgctgaagtggtcgatacaaaacggtacctttttctctaacatgtcatagcctcctaatccattctggtcgtgtttccggggaaattaccgggccatgccgcgcttcctggcggcctgatagaagcggtccagagcgtctgccagggtcttgcgggggcaggcgacgttgatgcgctggtagccggaaccggccgcgccgaagtcggtgccgttgtccaggtagagcatgcactcgtcggtgaggaacactttcatgtctgcgtcgctcatgccgaagcagcggaagtcgcaccagaccaggtaggtgccctccagctcggtgaccacaaccccggggaagtgctgggcgaagaagtcgcggacatactcgtagttgcccttgatgacctggatgagctcctccagccactcggcgccgtggcggtaggcggcctcgtgggccacggggccgaagcgctcgatgtgcatgaaggcctggaggcccatctgcttctggaacttggcccgcacctcgtcgttggggatgatgatgctggcgtagcacaggccggccaggttgaaggtcttgctcagggaggtgcagattacgcagttgtcggcaaactctttgcccagagaggcgtacacaatgtgcttgtacccgggctggatcagatcgtggtggatctcgtcggccaccaccatgactccgtactcgttgcagatctcgcccatcctgcgcagctcctcctccgtccagacgcggccggtaggattctggggggagcagaggaagaacagcttggcctgcttggccttctcacggaagtcgtcgaaatccacggtatagtggcccttctcgtccgccaccaggcggttttccagcaccttgcggccggtgtttacggtagcgccggtgaagtgatggtagtcgggggtctggatcaggatgccgtcgccgggctgggtaaaggtccagacggcgttatagagggcgggaacgacctgctcgaaggggacgatccagtcgggctgaacgtcccaatcgtgacgggttttcatccactggcagcaggactcccgaaagctgtcggtcaggcggtggtagcccagcacgccgaagtccgcctcggctttgattgcgtcaataacgcagggggcggtgcggaactccatgtcggccaccgacaggggaacgatgcccttggggggcttattgcccttagagtccttcatgatgcggtactttccggtgccgcggatggccggatcacggtcaataatcgtttcaaaatcgtatttcatcgcgcattctccttttccaagtcaatttacggctgataaagaacacccttctcaggcttgatgccgagaatctcgcgggcctcggcggcggtggcaatctcacggccggccaggataccaagcttgaccgcccgctccaccaactgggcgttggtggcgtattcgcccttcttcataaacacgttgtcctccagaccgacgcgcaggttgtcgcagccggcggccagaccggccagcatacagggcatgtgggctttgccgattccggtgatcgaccaggtggagccctccggcagcttggaaaccagatggttgatcgagtcaatattgcccggcataccaccagggacatccagaaccagctggtagtggagcggggccttcaggacgccttttttcaggtagtaatccacgttgcccagcataccggcatcaaagatttcaatttcgggcttgatgtccagctcctgggtgagcaggcccagccgctccaggaaggggggcgtgttcaggaagatgtagctgttggcccagttgagggtaccagggtcataggagcacatctcgggcatcaggatgggcaggtgggccacccgcatatcctcggagaacttggtgccggaggtggtgacattgatgatggcatccaggtggttggtgcgcagggcttcccggatcatggagaccacctgcacaaagcggctggtctccatggtgttcgcgccctcgtcatcgcggacatggatgtgcaggatgcaggcgccggcccgaactgcggccagagaatcggcgaccagctcctccggcgtcagggggacgtagggggactgcttgcgggtggtaccgccgccgcagagggcgcaggtgatcataagcttgtttgttttcataattggatatccctttccgttccatcaaaacgacttaaattgcgtgctttattggagaatcggtataccagtggagccaatatagcacttatgcatacaatttgtaaagatgcaacttgccatttctctgttatgaccaaggaaaagcgacggcttttgtcaaatgtaacgatttttattttgtgtattctcattgctgagtgaatctgctataattcggattggtataccagagaaaaagcaaaaaagagataaaaatggaatattagcaaaaaatactacataaaaagaaaaatatgtgcgcctgctattgcgcggaataccggaatgacatggtgcggtattccaaaaaggcgcacgttttggctggaccaatgggacagccaggaagaggtccgaatgcttacaaaacagctttccgattttctatatgaagtccgctatgagagtctgccctccaaagcggtggacaacgcaaagctctatctggaggatctgctcggcgtggcggcagccggctcagttcagccgcaggggggtatctggcgcagctactttgccgccggggacggacagcaggaggcgaccgcctggaacagcggactggagcggttctcctgcgaacatgctgccgcgctgaacgcagcgtgcgcccatgtcatggatatggacgacgtgcacaacgcctccatcacccacctgggggcggtaaccatccccgcggcgctggcggtggggcagaggcttcaccgctccgggcgtgaggtgctggctgccattgccgcgggctacgagattggcgcacgggtgggggaggccatcaacccaggctcctaccactactggcataccactggagtggtgggggcgctctgctctgccgtggcggcgggcaagctgatggggctggaccgggagaaactgctgcacgccattggctcggcggggacgcaggcggccggcctgtggcagtttctggaggacggcgccatgagcaagaccctgcacaccgccaacggtaccctctgcggcctgcggtcggcacgcctggcggcgctgggctttaccgctgcggaggacattctggcgggagaccggggcctgctgggcgccatgacgccggataaccacccggaggcgctgacgcgggcgctgagctgggaaaactgcgccctgctgaccaactccctgaagccctacgcctgctgtcgccacacccacgcggcggactactgcgcccaactgctgcggggggagcaccggctggagccggagcacatcacccgcattgtggatcacacctatcaggtggcggtcaacacggtggacaatccggagccatccaccccctacggctacaaattcagcggccagtactgcaccgcggccatgctggtgtacggccacctgggggagtccgccttcacgccggaggccacctccgacccacgggtgcggcggctgatggacaagattaccctggtgtgcgacccggagctggaggccagctatcaggcggaccgcaaccggtgggcccaccggttggaggtaactctggaggacggccgggtgctcacccgtcaggtggagtacccctatggcgacttcaataacccctttacctgggcctatgagcacgagaagtttcacaccctggccgacggggttctgggcccggaccgggttgccgcgctggttgagcggctgccgcacctggaggagctggatgacataaaccggctgtttgaggggctgtaagccctgcctcagcgggcggccgccggaacggcggcgcccattaccttacgaatggagcattgcgctatgaatcagaacgaagcacttgtcaaatccgccattcatgacgcggttatccgcgccgtgaccgaaatctccgccgatgtgaaggggctgcttaaagacgcactagcccgggaaacgaatgaaaccgcccagagcatgctccgctccatggtggacaacctgtccatcgccaaggagggggacaaggcggtgtgccagtctcccggctaccccacaacctggctctcctttggagacggcaacctgccggagtgcaccagggaggccatctcggaggccgtggccgaggccacgaagaagggctacctgcgcccctccatggtggaccccctgacccgggagaactcgggaaacaacaccggcaagggcgtgcccaatatcgagtatgaataccaccccggccagaaatacgtcgacttcatcatcagctttaagggctgcggcgccgagctgggcaacgccatgcagattatgaccaccgccaagctgggcaaaaacctctccggcctgaagcgcttcatcctggagaccgccgtcaacgccggcggcaagccctgccccccctacggcatcggcatcggcatcggcggccagatggacattgccgccaagctcagccgcaaggccatctccacccgccggtgggacgacgtgaaccccgaccccgagctggccgcgctggaggcggagctgaaggacgccatcaacggcctgggcctgggcgcggcgggtaccggcggcgacaccgtctgcctggccctcaagatggagcgggcccacacccacaccgccatcgcgccggtggcgatcaacttccactgctgggtggcccgccgggccggtatccgcatctacgacgacggccgcgttgagaagctgctctgatttccaaaacggcaaaaaaggagtatagtaaggatggctacttatcatttttccacacctctccaggaagaggacatgcgcaagctgcacgtgggagacgtggtgtatctgaccgggcatgtatttacggcccgtgacatggctcacctgcgtatccgcggcctgctggaggaggggaagcccctgcccaaggactttgccggcgctgcggtgttccacgccggcccggtggccctgaaaaacgaggacggctcctggcggctcaacgtcatcggccccaccacctccatccgtatggagccctatgccgatgtagtgggccggatgggggtacgggcggtcatcggaaagggcggcatggacgccgataccctgcgggcctgcggccagtacggatacgtgtacctccaggcggcccccggctgcgcggccaagctggcccagggcattgagcgcattaacgatgtgacttggtttgagctgggcatgccagaggccgtgtgggacctccaggccaatgagttcggccccctggtggtgggcatggacacccacgggcagagcatctacaaaaatctgaaagaggccgcgctgcacaagatcgacgaggcctatcccgcctgagggcggacgaaaggagacgcgagacaggatggactaccggatggaacgggactcaatgggggagatggaggttcctgcggaccgctactggggcgcgcagacccagcggagctatcagaacttccagatcggcac

SEQ ID NO: 4352 - DNA, 396 bp, Unknown
  gut microbiota DNA sequence
ttggtgtttttgagccgctggtagaacaggctgcccacggtcgtcttccccgccccagacaggccggtgaaaaagtatacggttcccttgtgttccatgtcctcctcctcagtgatacagcggctgttccagcagcgccgggtccagctttaaaggcctcatcatttttaaaggctggccttgcttgtttacaaaccgcaggccacggagcaggaaatccgcaatgcggcggcggttttcctcatagcgggggacaatgctttccacctgcatatcaattacctcttttccatttgtaaccgtaattgctttcaaacggagggcattttgatatgagcgttcgatatagccatccagacaggtaaagctgtgaagcttttgttcgatccagtcctg

SEQ ID NO: 4353 - DNA, 1244 bp, Unknown
  gut microbiota DNA sequence
cgatgtagaggagacccccgatgtagaggagacccccgatgtagaggagacccccgatgtagaggagacccccggtgtagaggagacccccggtgtggaggagacccccggtgtggaggagacccccgctcccgtggagaataatggcctccagacgataaacctggaggaactgacccaggagtgggacaagacggccaatcccatgacggtggccctggccgagggcatggagaatgtgacctttaccgcccacttcaagctggcggaggtcaccctgggcgagggcgcgtatctggaggggagcggatcttcggagagcatagtcagtccgtccttcgcagaggaggagggagacacgcttccggcgggcagccgggcccggctctacctccctctcagcgtatccgccgcgatcccggacggacaactcaccgtcacgatctacgagggcggttcggcagagggaacgcttctcagcagcaacgtcaagacacgggattgggaggccggcaaaacctatcgcatctggctccccatcgacccgctgccctacacagacaagctgacggtgacggcgttgatccgaaccactgtgggcaacacggagacggtggagaagacctacgatatctcgacggaggccaacgagaagaatagcgcgttcacctatgtgaccagccccaacgtgcccgccggaaccggaggctccaccacagaggcagggcccgacatccgcggggtgtccggctggaccgatccggagaccggagaggccgaactgtacttctacggtaaggacggcgtctacacctgggcggacagcggggaccgggatctgatgagcatcagcgacggcctgcccaccattacaggagacgcggctggcgtcctcgccgtggggccggacggacagggcggcctgctggccgctgtcagcgaggtggggaaggagatcgataaggtcaccacgccgggctatccgtcagacgccgaaggggtgatcctccgcggggcgcactttctctaccgctacgacggcacgtcctggagccaggtggatgcctcctgcttctcggattaccagaagatttacaatcaagaagcatacaacctgaatcagccccgcgaccccggcgacgcggtggtcatcctctcggacggcaccatatggcagaacaagtaccactgggacgggacgcagtggcttgagaatggtgtggagttcaactccttctaccggg
